United States Patent Application Publication US 2024/0327476 A1 - sequence listing, part 96

SEQ ID NO: 184961 - DNA, 3126 bp, synthetic construct
  misc_feature 1..3126: note = Description of Artificial Sequence: Synthetic coding sequence
  source 1..3126: mol_type = other DNA
atggccacccccgccggcctggagcggtgggtgcaggacgagctgcacagcgtgctagggctcagcgagcgacatgtggcacagttcctgataggcacagcacagcgttgcacatcagcagaagagttcgttcaacgcctgcgcgacacggacaccctggatctatcagggccggccagggactttgctctgcgactttggaacaaagtcccaaggaaggccgtggtcgagaaacctgctcgagctgctgagcgtgaggcaagggcactgctcgaaaagaatcggtcatatcgtctgctcgaagatagcgaggagtcctccgaggagactgtgtctcgggcggggtcctccctgcagaaaaagcggaagaagcggaaacatctgcggaaaaaacgcgaggaggaagaggaagaagaggcctccgagaaagggaagaagaagacaggtgggagcaagcaacagacagagaaaccagaatccgaggatgagtgggaaagaaccgagagggaacgtttgcaggatctggaggaacgggatgccttcgccgagcgagtgcgccaacgagacaaagatagaactaggaatgtgttagaaagatccgacaaaaaagcatatgaagaggcccaaaaaagactgaagatggctgaagaagaccgcaaagccatggtccccgaactgcgcaagaaatctcgacgggaatacctggcaaaacgggagagggaaaagctggaagatttggaggctgaacttgctgacgaggagtttcttttcggcgacgtggagcttagccgccatgaaaggcaagagttaaagtataagagacgagtgagagacttggcccgcgagtaccgagccgctggggagcaggaaaagttagaggcgaccaatcgctatcacatgcctaaggagacacgaggtcaaccagccagggccgtcgatctggtggaggaggagagtggcgcgcccggggaagagcaaaggagatgggaagaagcaaggctgggcgctgcgtctctaaagtttggcgctagggacgctgcctcccaggaacccaaatatcagttggtgctggaggaggaagaaactatcgaattcgttagagcaacgcaactgcagggcgatgaggaaccctctgcgccccctacttccactcaggcccagcagaaggaaagtatacaggccgttcgccgatccctgcctgttttcccctttcgggaggagctgcttgccgcaatcgccaatcatcaggtgcttatcatcgaaggcgaaacgggctcagggaagaccactcaaataccacaatatttatttgaggagggatacacaaataagggcatgaagattgcctgtacgcagcccagaagagtggctgccatgtccgtggctgcacgggtcgctcgtgaaatgggggtgaagttgggcaatgaagttggctacagtatcaggtttgaagactgtacttcggaaaggacggtgctgcgatacatgaccgatggtatgctactgagagagttcctgagtgagcccgacctcgcatcatacagtgtggtgatggttgacgaggcgcatgaaagaactctccacacggatatcctgtttggcctcatcaaagatgttgcgcggttccgaccagaactgaaggtcctcgtggccagcgcaacgatggacactgctagattctctacatttttcgatgatgcaccggtgttccgtattccggggcggcgcttccctgtcgatattttctacactaaagctccagaggccgactacttagaagcctgcgtggtctcagttctgcagatccacgttactcagccccctggggatatactcgtttttctgacgggacaagaagagatcgaggccgcttgtgagatgctccaggatcgctgccgccggttgggttctaaaatacgagagcttctggtgttgcctatctacgccaatctgccttcagatatgcaggcccggatcttccaaccaacgccgcctggcgcccgaaaagtggtggtggcgaccaacattgctgaaacttccctcacaatagaagggattatatatgtgctggacccaggcttctgcaagcagaagagctataacccacgcaccggtatggagagcctgacagtgactccttgctcaaaggcctctgctaaccagcgtgcgggccgagctggcagggtcgccgccggtaagtgtttccgactatatacagcctgggcttaccagcatgagctagaggaaaccacggtgccggagatccagaggacgtcactgggcaacgtcgtcttactcctgaaatccctgggcatacacgacctaatgcacttcgacttcctggaccctccaccgtatgagaccctgctacttgctctggaacaactgtatgctctcggggcactgaatcacctcggcgagctcactacttcggggcggaagatggcagaactgccagtggatcctatgctgtcaaagatgattctcgccagcgagaagtacagctgttcagaggagatcctaacagtggcagcgatgctgtctgtgaacaattccattttttataggcccaaagataaagtagtgcatgcggataacgccagggtgaatttctttctcccgggaggtgatcatttggtcttacttaacgtctacacccaatgggctgagagtggctacagcagccaatggtgctacgagaattttgttcagtttaggtccatgcgccgggctcgcgacgttagagagcagctggagggcttactcgagcgagtagaggttggcctgtcttcctgccagggcgactacatcagggtgcgcaaagctattactgctggctatttctatcacacagctagactgacacgctccggatatcgaactgtaaagcagcagcagacagttttcattcatcccaattccagcctattcgaacaacagcctagatggttgctgtatcatgaacttgttctgacaactaaagagttcatgcggcaggtcctcgaaatcgaatcttcctggctattagaagttgctccccactattataaggctaaggagcttgaagacccccacgctaagaagatgccaaagaagattggcaaaactcgagaagagttgggctag

SEQ ID NO: 184962 - DNA, 1683 bp, synthetic construct
  misc_feature 1..1683: note = Description of Artificial Sequence: Synthetic coding sequence
  source 1..1683: mol_type = other DNA
atggagagccagcccgcccaggagtgcctgatgcagatgttcctgcccatcgagcctgcttgctttgtggaatggttgggtacttccccatcccagttgggagtggtgatggtcgatgaggcccacgagcgtaccctccacactgatatactgttcgggctcatcaaagatgttgccagatttcgccccgagctcaaggtgttggttgcctccgctactatggatactgcccgattctctaccttcttcgacgacgcgcccgtttttcggatacctgggcgccggttccctgtggacatattctacacgaaggcaccagaggctgactatctggaggcctgcgtagtctctgttctgcagatccacgttactcagccaccaggcgacatccttgtcttcctgactggacaggaggaaatagaggctgcctgtgagatgctgcaggatcggtgcagacgactgggaagtaagatcagggagcttctggtcctgccaatctacgcaaatctgccttcagacatgcaggccagaatcttccagccgaccccgcccggcgccagaaaggtggtcgtcgccactaacatcgctgagactagcctgaccatcgaggggataatctatgtcctagaccctggtttttgcaagcagaaatcctataatccccgcaccggcatggaaagtctgacagtgacgccttgtagcaaagcctcagcgaatcagagggcaggccgggccggacgcgtggccgctggaaaatgtttcagactgtataccgcctgggcctaccagcatgaacttgaggagacaaccgtgccggaaattcagaggacaagcctgggcaacgtggttctgttactcaagtctctaggcatccatgatttaatgcacttcgattttctcgacccacccccttacgaaacgctattgctggcactggaacagctgtatgccctgggggcacttaaccatctcggggagctcacaacatctgggcggaaaatggccgaattgccagtcgatcctatgctgagcaaaatgatcctggcctcagaaaagtactcatgctccgaggagattctgaccgtagctgctatgctgtctgtcaacaatagcattttttacagacccaaagataaggtggttcacgctgacaacgctcgagtgaacttcttccttcccgggggtgaccacttggtattattaaatgtgtatactcagtgggcggaaagcggctattcgtctcaatggtgctatgagaacttcgttcagttcaggtcaatgagacgtgcccgtgatgtacgggagcagctggagggactcttagaaagagtggaggtgggtctgagtagctgccagggggactatattcgggtcagaaaagccatcacagccggttatttctaccacaccgcacgtttgaccagatctggttaccgcacagtgaaacagcagcagactgtcttcatccaccctaatagcagcctgttcgaacaacagcccaggtggttgctgtatcatgagctggttctgacaacaaaagagttcatgcggcaagtgctggagatcgagagttcatggctcctggaggtggcaccccactactataaggccaaagagctcgaggaccctcatgccaagaagatgcccaagaagatagggaaaacacgtgaggagctgggatag

SEQ ID NO: 184963 - DNA, 1683 bp, synthetic construct
  misc_feature 1..1683: note = Description of Artificial Sequence: Synthetic coding sequence
  source 1..1683: mol_type = other DNA
atggagagccagcccgcccaggagtgcctgatgcagatgttcctgccaattgaacccgcctgttttgtcgaatggctcggcacttctccatcgcaacttggagtggtgatggtagatgaggcacatgaacgcacactgcacacggatatactctttggccttatcaaagatgtggcaagattccgccctgaactgaaagttctggtggctagcgccaccatggacactgctagattttcaacttttttcgacgacgcgccagttttccggattcccggtcggaggtttcccgtggatatcttttacactaaagctcccgaggccgactacctcgaggcatgtgtggtctcggtccttcagatacatgtaacccagccacccggagacattttagttttcctcactggccaggaggagatcgaggcggcttgtgaaatgttgcaagaccggtgtaggcggctcggcagtaaaatcagggagttactcgtgttacctatttacgctaatttacctagcgacatgcaagctcgtatttttcagcccactccccccggggcacggaaggttgtggtggctactaacatcgctgaaacctccctaacaattgaaggaatcatttatgtcctggacccaggattctgcaagcaaaagagttacaatccacggaccgggatggagtccctgacagtgacgccatgctctaaagcctcagccaaccaacgggccgggagagccgggcgggtggccgccgggaagtgttttcggctctatacagcatgggcttaccaacatgaactggaggagaccacggtgccagaaattcaaagaacttcccttggcaacgtcgtactgttgttaaagtcactgggaatccacgatctgatgcacttcgattttctggaccctccaccctatgagaccctgttgcttgcactagaacagttgtatgctctgggcgccctgaaccatcttggtgaattaactaccagcggtaggaagatggcggagctgcccgttgatccaatgctatcaaaaatgattctcgccagtgagaagtattcatgttcagaagagatactcactgtagctgcgatgctttctgtcaacaattctatattttatcgccccaaggataaggtggtgcacgcagataacgcccgtgtgaacttcttccttcctggcggtgaccatcttgtcctcctgaatgtctatacccaatgggcagagtcgggttactcatcacagtggtgttacgagaattttgtacaatttagatctatgcggagggcccgagacgtgcgcgagcagctggagggtctcctcgagcgcgtagaggtgggtctgagctcatgtcagggtgattacattcgggtccgcaaagcgatcaccgcagggtacttctatcatactgcaaggctgactagaagcggctatcgaaccgttaagcagcaacagaccgtgtttatccacccaaatagttccctgtttgaacagcagccccgctggcttctctatcacgaactcgttctgacaacaaaggaatttatgagacaagttcttgagatcgaaagctcatggcttctagaagtggcaccacactattacaaggcgaaggaactggaggacccccatgccaagaaaatgcctaagaaaattgggaagacgcgagaagagctggggtag

SEQ ID NO: 184964 - DNA, 567 bp, synthetic construct
  misc_feature 1..567: note = Description of Artificial Sequence: Synthetic coding sequence
  source 1..567: mol_type = other DNA
atggagagccagcccgcccaggagtgcctgatgcagatgttcctgccgatagagccagcatgcttcgtcgagtggctgggcaccagtccctcgcagctcggcgtggtcatggtcgatgaggcccacgagagaactctgcatacagacattttgttcggcctcataaaggacgtcgctcgctttcgtcccgagctgaaggtgctggtcgccagcgcaaccatggataccgccagattctccactttttttgatgatgcacctgtctttcgaattcccgggcgcaggtttcccgtggatatcttttataccaaggcccccgaggccgattatctggaggcatgcgtcgtgtcagtgctgcagatccacgttacgcagccaccaggggacattctcgtcttccttacaggtcaggaggagatcgaggccgcgtgtgagatgctccaggaccgctgtcgtagactggggagcaaaatccgggaactgctcgtgctgcccatctacgcaaacctcccaagcgatatgcaggccaggatcttccagccaactcctccaggggccaggaagtag

SEQ ID NO: 184965 - DNA, 3126 bp, synthetic construct
  misc_feature 1..3126: note = Description of Artificial Sequence: Synthetic coding sequence
  source 1..3126: mol_type = other DNA
atggccacccccgccggcctggagcggtgggtgcaggacgagctgcactctgtgctcggcctgagcgaacgccacgtggcccaatttctcattgggaccgctcaaaggtgcacctctgccgaagagttcgttcagcggctgagagataccgatactcttgatttatccggcccagcacgggattttgccctgagattgtggaataaagtaccgcggaaagccgtggtggaaaaaccggccagagcggctgagagggaggctcgggcgctcctggagaagaatagatcttatagactcctcgaggacagtgaagaatctagtgaagagacagttagtcgcgccgggagcagtctgcaaaaaaaaagaaaaaagaggaagcatctacgaaagaagcgtgaggaggaagaggaggaggaagccagtgaaaagggcaaaaagaagacgggagggtctaagcagcaaaccgaaaagcctgagtcagaggacgaatgggagcggacagagcgggagaggctacaggacctagaagaacgggatgctttcgctgaaagagtgaggcagcgtgataaagatcggactagaaacgtgttagagagatcagataagaaagcctatgaggaagcccagaagagactgaaaatggccgaggaggatcggaaggccatggtgccagagcttaggaaaaaatcacgtcgagagtacctcgccaagcgcgagagggagaagctggaggacctggaggcggaattagcagacgaggagttcctgttcggtgatgtggaactaagcagacatgaaagacaggaactcaagtataaacgccgggtcagagatctggcacgtgagtatcgggctgccggcgagcaggagaaactggaggcaaccaaccggtaccacatgcctaaggagacacggggtcagcccgcaagagcagttgacctggttgaggaggaatccggcgcgcccggtgaagagcagcggagatgggaagaggcccgactgggagccgcttcgctcaagtttggagcgcgtgacgctgcatcccaggagccaaaatatcagctggtgctcgaagaagaggagacaatcgaatttgtcagggctacacaattacagggagacgaggaaccctccgcacctccaacttctacccaggcccagcaaaaagagtccattcaggcagtaagacgcagtctacccgtgttcccctttcgggaagagctgctggccgctattgcaaaccaccaggtgctcattattgaaggtgaaacaggttctgggaagaccacccagattccacagtaccttttcgaggaaggatacaccaataagggaatgaagatcgcctgtacgcagccaaggcgagtggcagcgatgagtgtggcagcgcgggtggcccgcgagatgggtgtgaagctgggcaatgaggtaggttacagcatccgctttgaggactgtacctctgaaaggacagtattgaggtacatgaccgacggaatgctcctgcgggagttcctgagcgagcccgatttggcctcctactccgtggtcatggtcgacgaggcacatgagagaacgctacatacagacatcctattcgggttgatcaaggacgttgctagattccggccggagctcaaagtgcttgtggctagtgccacaatggacacagcccggttcagtacattcttcgacgacgcaccagtgtttcggattcctgggcgtaggttccctgtcgatatattctacaccaaagctccagaagctgactatctagaggcctgcgttgttagtgtgcttcagatacatgttacacagccgcccggagacatcctggtgttcttgacagggcaggaggaaattgaggccgcttgcgagatgcttcaggaccgttgccgccgccttggctcaaaaatcagagaactgttagtcctgcctatttatgctaacttgccctccgatatgcaggcaagaatcttccagccaacaccccctggcgcaagaaaagtcgtggtcgcaactaatatagctgaaaccagccttaccatcgagggcattatttatgtcctggatcccggattttgcaagcagaagtcctacaacccaagaacaggcatggagagcttgaccgtgaccccatgcagtaaggccagcgccaaccagagagctggcagagccggcagggtggccgccgggaagtgtttcaggctgtatactgcttgggcctaccagcacgagctcgaggaaaccaccgtgccggagatccagaggactagccttggaaacgtggtactgttgctaaagtctctgggcatccacgacttgatgcacttcgactttcttgatccacccccctacgagactttgctgcttgccctagaacagctttacgcgctgggggctttgaatcacttgggcgagcttacaacaagcgggcggaagatggccgaattacccgtcgatcctatgctcagtaagatgatcctcgctagcgaaaaatactcatgttccgaagaaatcctgacagtggctgctatgctctctgtgaacaactcaatcttttacaggcccaaagataaggtggtgcacgctgacaatgcaagagttaattttttcctacctggcggcgaccacttagtgctcttaaacgtctatacacagtgggctgagtcaggctactctagtcagtggtgttacgaaaatttcgtgcaattccgcagtatgagacgagctagagacgtgagagaacagctcgagggcctgctcgaacgcgttgaagtgggcctgagctcttgccaaggtgattatataagagttcgaaaagcgattacagccggatatttttaccatacagcccgtctgacacggtcaggttatagaaccgtaaagcagcagcagacagtttttattcacccaaatagctccctttttgagcaacagcccagatggttactctaccatgagctggtcctcaccacaaaggaatttatgcggcaggtcttagaaatcgagagcagctggctgctcgaagttgcccctcattactacaaggctaaagagctggaagatcctcatgcaaagaagatgccgaagaagataggcaaaacgcgggaggagctcggatag

SEQ ID NO: 184966 - DNA, 444 bp, synthetic construct
  misc_feature 1..444: note = Description of Artificial Sequence: Synthetic coding sequence
  source 1..444: mol_type = other DNA
atggccacccccgccggcctggagcggtgggtgcaggacgagctgcatagcgtacttggcctatctgagcggcatgtggcccagttcctgattgggactgctcagcggtgtaccagtgctgaagaattcgtccagcggcttagggacacagacacactggatctatccgggccggcccgcgacttcgctctgcggctgtggaataaagtaccaaggaaagccgtcgtagagaagcccgccagagcagctgagcgtgaggcccgggcgctgctagaaaaaaacaggagctatcgtctgctggaagatagcgaagaaagttccgaagagactgtttctcgtgccggctcctccctccagaagaaacggaagaagcgaaaacacctgcgcaagaagcgagaagaagaggaagaagaggaagccagcgagaagggcaaaaagaagtag

SEQ ID NO: 184967 - DNA, 4110 bp, synthetic construct
  misc_feature 1..4110: note = Description of Artificial Sequence: Synthetic coding sequence
  source 1..4110: mol_type = other DNA
atgggcggcaagaacaagaagcacaaggcccccgccgccgccgtggtcagggcagcagtaagcgcttctagagccaaaagcgcagaggctggcatagccggcgaagcccaatccaagaaaccggtcagcagacccgctacagcagcagcggccgccgcgggtagtcgggagcccagagtgaaacagggcccaaagatctacagcttcaatagcacaaatgactccagcggaccggccaaccttgacaagtccattctcaaggtcgtaataaataacaaactggagcagcgcatcatcggcgtgattaacgagcataaaaaacagaataatgacaagggcatgatatctgggagactcaccgccaagaagctacaggacctctatatggcactacaggcattcagcttcaagacaaaagacatcgaggatgcaatgaccaacaccttactgtacggcggcgatttacactccgcgttggattggctctgcctgaatctgtccgatgatgctctgccagaaggtttctctcaggaattcgaggaacagcaaccaaagtcccggccgaagttccagagccctcagattcaggccaccattagcccgccactgcaacctaaaaccaaaacatatgaggaggaccctaagtcaaagcctaaaaaagaggaaaagaacatggaggtcaacatgaaggagtggatcttgagatatgccgagcaacaaaacgaagaggagaaaaacgaaaatagcaagtccttggaagaagaagaaaaatttgacccgaatgagcgataccttcaccttgctgccaaattacttgatgctaaagaacaggccgctacatttaaattggagaaaaacaaacagggccaaaaagaggctcaggagaaaatacggaagttccagagggaaatggaaacgctggaggatcaccccgttttcaaccccgccatgaagatttcacaccaacagaatgagcggaagaagcctcccgtagcaactgagggagaaagcgcgctgaacttcaacctgttcgaaaagagtgccgctgcaactgaggaggaaaaagataaaaaaaaggaacctcacgacgtgagaaactttgactatactgcgcgtagctggactgggaagtctcctaaacaattcttgattgactgggtgcgtaaaaaccttcctaagagccctaacccgtcgttcgaaaaggtgccagtcggaaggtactggaagtgtcgcgtacgcgtcatcaagtccgaagacgatgtgctagtggtttgccccaccatcctaaccgaggatgggatgcaggcgcagcacctgggcgccaccctcgccctgtacagacttgtgaaggggcagtccgtccaccaacttctgccgccaacctatagagacgtatggttggaatggagcgatgcagagaaaaagcgggaggagctgaataagatggaaactaacaagccccgcgatctgtttattgctaagctgctgaataagctgaaacagcaacagcagcagcagcagcaacattcagaaaacaagcgggaaaatagcgaagatcccgaggaatcctgggaaaacctggtgagcgatgaggatttttctgcactgagcctggagagcgcaaatgtggaagacttggagccggtcagaaatctgtttagaaagctgcagagtactccaaagtaccaaaaattgctgaaggaaaggcagcagctccctgtctttaaacatagggattctatcgtggaaacgcttaaaagacatcgggtggtggtagtggccggggaaaccggctcaggaaagtccacccaggtacctcacttcctactggaagacctgctactgaacgaatgggaggcctccaagtgcaacattgtttgcactcagccgagacgcatctctgcagtcagtctcgccaacagagtgtgcgatgagctgggatgcgagaacggtccgggtgggcgcaacagtctgtgtggttaccagatcaggatggagtcgcgtgcctgcgagtcaactcgactgctatactgcacaacaggagtcttgctgaggaagttacaggaagacgggctcctgagcaacgtgagccacgttatcgtagatgaggtgcatgaacgaagtgtgcagtcagacttcctccttattatcctgaaagaaattctacagaagaggagtgatctgcacttgatcctcatgagcgctacagttgactcagagaagttctcgacctattttacccactgcccgatcctgagaattagtggtaggtcttaccctgtggaggtgttccacttggaggacatcattgaggagactggcttcgtgttagagaaagactctgaatactgtcagaagtttctggaggaggaggaggaggtgaccataaacgtgacttcaaaagccggcggcataaaaaagtaccaggagtacatcccagttcagacaggcgcccacgccgatctcaacccattctatcagaaatatagctccaggacccagcatgctatattgtacatgaatcctcataaaataaatctagatctgattttggagttacttgcctacctggataagtcacctcagttcaggaacatcgagggcgccgtcctcatattccttcctggcttggcccacattcaacagctgtacgatttgctctcaaatgatcggaggttctatagcgagagatacaaggttattgcactgcactcaatccttagcacccaggatcaggccgctgctttcactttgccccctcccggcgtgaggaagattgtgctggctaccaacatcgctgaaactggcatcacaatccccgatgtggtgttcgtcatcgacacggggagaactaaggaaaacaagtatcatgaatcatcacagatgtcatcgctggtggagacctttgtgtccaaggctagcgcactccagaggcagggtcgagctggacgggtgcgggacggattctgtttccgcatgtacacacgcgagagattcgaaggtttcatggattactctgtgccagagattctgcgcgtcccactggaggagctctgcctgcatataatgaaatgtaatctggggagtccggaggattttttgtctaaagccttggacccaccacagttgcaggttataagcaacgccatgaacctgctcagaaaaattggagcctgtgagctgaatgaacccaaactgacacccctgggacagcacctggctgctttgccggtaaatgtgaagattgggaaaatgctgattttcggcgctatcttcggttgccttgatccagttgcaacactagcagcagtgatgacagagaagagccctttcaccacccccattggtcggaaagacgaggctgatctcgctaagtctgcattagccatggccgacagtgatcacctgacaatttacaacgcatacctgggatggaagaaagcaaggcaagagggtggctatagaagtgagataacatactgcagacggaatttcctcaaccggacctcgctcctgacgctggaagatgtgaagcaggagctcataaagcttgtcaaagctgcgggcttctctagctcaacaacctccacctcatgggaaggaaaccgagccagccaaactttgagttttcaggaaattgctctgctcaaagccgtgttagtggctggtctgtacgacaatgtcggtaaaatcatttacactaaatccgttgatgttacagagaagctcgcctgtattgtggagactgcgcagggcaaagcccaggttcacccatcgtctgttaaccgtgacctgcagacccatggctggctcttgtaccaggagaagattagatacgccagggtctatctccgggaaacaaccctgatcacccctttccctgtgctccttttcggtggggacatagaggttcagcatagggagagactcctgagtattgatggatggatctacttccaggcccctgtgaagatcgctgtgattttcaaacagctgagggttctcatcgattctgtactgagaaagaagttggagaacccaaaaatgtcactggagaacgacaaaatccttcagataattactgaactcattaaaactgagaataactag

SEQ ID NO: 184968 - DNA, 1989 bp, synthetic construct
  misc_feature 1..1989: note = Description of Artificial Sequence: Synthetic coding sequence
  source 1..1989: mol_type = other DNA
atggaggaggagggcctggagtgccccaacagcagcagcgagaagagatacttccctgagagtctcgacagctcagacggggatgaagaagaagtgctcgcatgcgaggatttggaactcaaccccttcgacggactcccctacagctcacggtactataaactcctgaaggagagagaggacctacccatttggaaagaaaagtattcattcatggagaacttgcttcagaatcagatcgtcatcgtgagcggtgacgccaaatgcgggaaaagtgcccaggtgccccaatggtgtgccgaatactgtctctccatccattatcagcatggtggggtgatctgcactcaagtccataaacaaactgtcgtacaacttgctctccgtgtggccgatgagatggatgtgaacatcggacatgaagtgggctacgtaattcctttcgagaactgttgcactaacgaaaccatccttaggtattgcaccgatgacatgctgcagcgggaaatgatgagcaatccatttttgggatcttacggagttattatccttgacgatatacatgagcgaagtatcgcaaccgatgtgctgttagggctgttaaaagacgtgttgctagctcgacccgagctcaagctcatcataaactcaagtccacacctcatctccaagctgaacagctactatggcaatgtgcccgtgatagaagtgaaaaacaaacaccccgttgaggttgtgtacctgtctgaagcacagaaagactcatttgagtctattctccgtcttatctttgagatacaccattcaggcgaaaaaggggacatcgtcgtctttcttgcctgcgagcaggtgtacaatccgcgcatccgagccaatagcttggtgatgcaaccaatttcccaatcccaggcagaaattagaaaacagatattgggctcatctagttccggtaagtttttttgcctgtatactgaagagttcgcctccaaggatatgaccccccttaaacccgctgagatgcaagaggctaacttgacaagcatggtcctcttcatgaagagaatagacatcgctggcctgggtcactgcgacttcatgaatcgacccgcacccgaatccctgatgcaagccttagaggacttagactatctcgcagcactggacaacgacggaaatctgtcagaatttggcatcatcatgtccgaattccctcttgacccgcagctgtctaagtccatcctcgcctcgtgtgaatttgactgtgttgacgaagtgctgactattgctgccatggtgacagccccgaactgcttctcacacgtgcctcatggtgctgaggaggcggctctgacttgttggaaaacgttcctccatccggagggagaccactttacactgatctccatttacaaggcctatcaagataccaccttgaactcttcttccgagtactgcgtggaaaaatggtgccgtgactactttcttaactgctccgcgttaaggatggccgacgtgatccgcgccgaactgctggaaatcataaaacgaatcgaactgccatacgctgaaccggcgttcggctcaaaggaaaatacattaaacattaagaaggccttactgtccgggtatttcatgcagatcgctagagatgttgacggatctggtaattacctgatgttgacccacaaacaggtagcacagctgcacccgctgtctggatattccattacaaagaaaatgcctgagtgggtgctttttcataaattcagcatttccgagaacaattacatccgtataactagcgagatctcaccggaactatttatgcagctcgttcctcagtactacttcagcaacctgcctccaagtgaatctaaggacatcctacagcaggtggtcgaccatctgagcccagtttcaacaatgaacaaggaacaacaaatgtgcgaaacctgcccagagaccgagcaaagatgtactctgcagtag

SEQ ID NO: 184969 - DNA, 2232 bp, synthetic construct
  misc_feature 1..2232: note = Description of Artificial Sequence: Synthetic coding sequence
  source 1..2232: mol_type = other DNA
atggaggaggagggcctggagtgccccaacagcagcagcgagaagagatatttccctgaaagcctggacagctccgacggggacgaggaggaagtgctggcctgtgaagacctggagctgaacccttttgatggtctgccttattcttcgagatactacaagcttctgaaagagagagaagatctccctatttggaaagagaagtacagttttatggaaaatctcctccagaaccagatcgtcattgtgagcggcgatgctaagtgcggcaaaagtgcccaggtccctcagtggtgcgccgagtactgcctgtcaatccattatcaacacggcggcgttatttgtacacaggttcacaagcagacagtggtgcaacttgctctgagagtcgcagatgagatggatgtgaatattggacacgaggtcgggtacgtgatcccattcgagaactgttgcacgaacgaaaccatcttgaggtattgtaccgacgacatgctgcagagagagatgatgtctaatccatttctgggttcgtatggggtgataattttggatgacattcatgaacgatccattgcgacagatgtgcttttaggactgctcaaagacgtgctgctggcgcggcctgagttaaagctaattatcaacagtagtcctcatctgatctcaaagttaaattcttactatgggaatgtgcctgtcattgaagtgaaaaacaagcacccagtagaggtggtctatctgagcgaggcccaaaaggactcctttgaatcaatccttcggcttatcttcgaaatccatcatagtggcgaaaaaggagacatcgtcgtctttctggcctgcgagcaggatattgaaaaagtttgcgaaactgtgtaccagggcagcaatttaaaccccgacctcggagaattggtggtggtccccctgtacccgaaggagaagtgctccttgtttaagcccctggacgaaaccgaaaaacggtgccaagtttatcagaggcgcgtggttttgaccacctcttctggtgaatttctcatatggtctaattccgtgagatttgtgattgatgttggcgtggaaaggcgcaaagtgtacaacccaaggattagggccaacagcctagtcatgcagcccatttcccagagtcaagcagaaattaggaaacagatactgggtagctccagctccggaaagttcttttgcttgtacaccgaggagtttgcctcaaaggatatgacacccctgaagccggccgagatgcaggaagcaaacttaacaagtatggtgctgttcatgaagaggattgacattgccgggctcgggcactgcgattttatgaacagacctgcccccgagtcattgatgcaggcactggaggacttagactacctcgctgcgctggacaacgacggaaatttgtccgaattcggaattatcatgagcgagttcccactcgatccccaattgtccaaatccatcctggctagttgcgagttcgattgcgtagacgaagtgttgacaattgctgccatggtgacagctcctaattgtttttcccacgttcctcatggtgccgaggaggctgcgctcacatgctggaagacattcctccaccccgagggtgatcacttcacccttatctcaatttacaaggcatatcaggacaccacccttaacagctcatctgaatactgcgtagagaaatggtgtagggactattttctgaattgctccgcactgaggatggcagacgttattcgggctgagctattagaaataatcaagcggattgaactgccttatgcggagccggcttttggaagcaaagagaacaccctgaatattaagaaggctctgttgtccgggtattttatgcaaatagccagggatgtcgatggttctggaaattacctgatgctcacgcataagcaggtggctcaactgcatcctctttctgggtactccatcacaaaaaaaatgcccgaatgggtgctttttcacaaattttccatttccgaaaataattatattcgcataacttctgagatcagtcccgagctgtttatgcaactcgttcctcagtattactttagcaacctgcctcccagtgagtcaaaagacatcctgcagcaggtagttgaccaccttagtccggtctccacaatgaacaaggaacagcaaatgtgtgagacatgccccgaaactgaacagcgctgtacgctgcaatag

SEQ ID NO: 184970 - DNA, 1104 bp, synthetic construct
  misc_feature 1..1104: note = Description of Artificial Sequence: Synthetic coding sequence
  source 1..1104: mol_type = other DNA
atgcagcccatcagccagagccaggccgagatccggaagcagatcttaggatcttcctcaagcggaaagttcttctgcttgtacactgaggagtttgcaagcaaagatatgactcccctgaagcctgctgaaatgcaggaagctaatctcacgtctatggtattgtttatgaaacggatcgacattgcaggcctggggcactgtgactttatgaaccgtcccgcccctgaatctctaatgcaagccctcgaggatctagactacctggctgctcttgacaatgacggcaatctttcggagtttggaatcattatgtcagagttcccccttgatccgcagctgtccaagagcatactggcctcctgcgagttcgattgcgtcgacgaggttcttactatagcagctatggtgactgctcccaactgtttctcccatgttccacacggagccgaagaagcggctctgacttgctggaagactttcctccatcccgaaggggaccacttcacccttataagtatatacaaggcctaccaggacaccaccttgaactcttcctctgaatattgtgtggagaagtggtgccgggactattttctgaattgcagtgccctgagaatggcagacgtgatccgggcagagctgctcgaaataatcaagagaattgaacttccttacgctgagccggcgtttggttcaaaggaaaataccctgaatatcaagaaggccctgctatctggctactttatgcagattgcccgagacgtggatggatcgggcaactatctgatgctgactcacaaacaggtcgctcagctccatccactcagcggctatagcatcactaaaaagatgcctgagtgggtactgttccataagttttctatatccgagaacaactacatccggatcacttcggagatctcccccgagctgttcatgcagcttgtaccccagtattactttagcaatctcccaccctcggagagcaaggatatccttcagcaggtcgttgaccacttgtctcccgtctctaccatgaataaggagcagcagatgtgcgagacctgtccggaaacagagcagagatgcaccctccagtag

SEQ ID NO: 184971 - DNA, 339 bp, synthetic construct
  misc_feature 1..339: note = Description of Artificial Sequence: Synthetic coding sequence
  source 1..339: mol_type = other DNA
atggaggaggagggcctggagtgccccaacagcagcagcgagaagcgatatttccccgagtcactggacagctctgacggcgatgaggaagaggtcctcgcatgtgaggatttggagttgaatccgtttgatgggctaccctattctagtagatactacaagctccttaaagaacgcgaagatcttcctatttggaaagagaagtattcgttcatggagaaccttcttcagaaccagatcgtcatcgtcagcggcgacgcgaagtgtggaaaatctgcacaagtgccccagtggtgtgccgaatactgtctcagcatccactaccaacacggaggatag

SEQ ID NO: 184972 - DNA, 1935 bp, synthetic construct
  misc_feature 1..1935: note = Description of Artificial Sequence: Synthetic coding sequence
  source 1..1935: mol_type = other DNA
atgaccatcgagatcgacttcctgcagaagaagagcatcgacagcaacccctacgacaccgacaaaatggctgcggaatttatccagcagttcaacaatcaagcttttagcgttggtcaacagttagtattctccttcaacgagaagctctttggcctacttgtgaaagatattgaggccatggacccttcaatcctgaagggggagcccgccaccggcaaaagacagaagatcgaagtcggcctggtggtcggtaacagccaagtggcatttgaaaaggccgaaaactcatctctgaaccttatagggaaggccaagaccaaagagaatagacagagtataattaatccagactggaatttcgagaaaatgggcattggaggactggataaggagtttagcgacatattccggcgggctttcgcatctcgagtgtttccacctgaaattgttgagcagatgggctgcaagcacgtgaagggaatccttctttatggcccacctggctgtggaaagacactactagctaggcagattggcaagatgctgaatgccagggagccaaaagtggtgaacggcccagagatcctcaataaatacgttggcgaaagcgaagctaacatacggaagctttttgccgatgctgaagaagagcaaaggaggctcggcgcaaactccggactgcatataataattttcgacgaaattgatgccatctgcaagcaacgtgggtcaatggctgggtccactggagtgcatgatactgtggtaaatcagctgcttagtaagatcgatggtgtggagcagctgaataacattcttgttattgggatgacaaaccgcccagatctgatcgacgaggcattactgcggccagggcggctcgaagttaagatggagattggattgccagatgaaaaggggcggctgcagattttacacatccataccgccaggatgcgggggcaccagttgctgagcgccgacgtggacatcaaagagttggctgtcgagaccaagaactttagcggcgccgagctggaggggctcgtgcgcgccgcgcagtccacagccatgaacagacacattaaggcctctacaaaggttgaagtggacatggagaaggcagaaagcctgcaagtgacgaggggtgactttttggcgagcctcgaaaatgacattaagcctgcctttggaacaaaccaagaggattacgcaagttacattatgaatgggattattaagtggggggaccctgtcacacgcgtcctggacgacggcgagctactcgttcagcagaccaagaatagcgataggacccccttggtctcagtgttattagaggggcctcctcattctggaaaaacagccctggccgctaaaatagccgaggagtccaacttcccgttcatcaaaatttgctctcccgacaagatgattggcttcagcgagacagccaagtgtcaggccatgaagaaaatctttgatgatgcttacaagtcacagctttcatgcgtggtggtggacgacattgaaaggttgctcgactatgtcccaatcggaccacgattctctaacctggtcttacaggcgctcttggttctcctgaaaaaagcacctccgcaggggcgtaagttattgataatcgggaccacttcccgaaaggatgtgctacaggaaatggagatgctgaatgccttcagtacaacgattcatgtgcccaatatcgccactggagagcagcttctggaagccctggaactccttggcaacttcaaagacaaggaaaggaccactattgcgcagcaggtcaagggcaaaaaggtgtggattgggattaagaaactgcttatgctgatcgagatgagtcttcagatggacccagaatatagggtccgcaagtttttggcattgctgcgcgaggaaggggcttag

SEQ ID NO: 184973 - DNA, 1452 bp, synthetic construct
  misc_feature 1..1452: note = Description of Artificial Sequence: Synthetic coding sequence
  source 1..1452: mol_type = other DNA
atgcccgaggaggccggcttcccccccgccaagcggttccggcccggaagcggccccccctcccgcgccgggagttttccaccgggcaggcaggttgtgatgttactcactgccgggagtgggggcagaggcgggggagggggccgtcggcagcagccgccccttgctcagcccagcgcatctccgtatcccgaagcagtcgagttgcagcggagaagcctccccattttccaggcgagagggcagcttttagcgcagctccggaatcttgacaacgccgtgctcatcgggtcgccctttttcaccggacatccaggcgtgccgcactgggccggcggggaccgcagccatgagcaggacgtgccgcggcattgcaaagccccgccacgccggctcccctgtgacgcgggccccagctccgtgcggctgccagcgctctgcactgctgcaccttctctgccccgcggcccaaaggatagcgggctcgaggttctcgctgtgcagcgcgttagtaagacgcaggcctggcagagaacgggccgcgcaggcagagaagattccggcatatgttatcggctgtatactgaagacgagttcgaaaagtttgataaaatgactgtccctgaaatccaacgctgcaatctcgcatccgtcatgctccagctactggcaatgaaagtccccaatgtcctgaccttcgattttatgagtaagcccagcccagatcatatacaggccgccatcgcacaattagatttattaggcgccctggagcataaggacgaccagcttaccttgacacctatgggacgcaaaatggccgcgttcccattggaacctaagttcgctaagaccatattaatgtcacctaagtttcactgcaccgaagagattctaaccattgtaagcctcctctccgtagattccgtgttgcacaaccctccgtctagacgggaagaggtacaaggagtgcgcaaaaaatttatatcgtccgaaggggaccatatgaccttgttaaacatctatcggacctttaaaaaccttggtggtaataaggattggtgcaaagagaacttcgtgaactccaagaacatgacactggtggctgaagttcgggcccagctgagggatatttgccttaagatgtccatgcccatagcttcatctcggggtgacgtggaatctgtaaggcgatgcctggctcactctctgttcatgtccacggcagagctgcaaccagatggcacttatgctactaccgacacccatcaacccgtggctattcacccttcatccgtgcttttccactgcaaaccggcatgtgtggtctatactgagctgctgtatacgaataagtgctatatgcgggatctgtgcgtcattgatgctcaatggctttacgaagcagcccctgagtacttcaggcgcaaactgcggacagctaggaattag

SEQ ID NO: 184974 - DNA, 2940 bp, synthetic construct
  misc_feature 1..2940: note = Description of Artificial Sequence: Synthetic coding sequence
  source 1..2940: mol_type = other DNA
atgagctacgactaccaccagaactggggccgggacggcggcccccgcagttccggcggtggttatggtggtggtccagcgggcggccacggcgggaaccgaggatcggggggcggcgggggtggaggtggaggggggagaggaggccgcggccgacacccagggcatctaaaaggaagagaaataggcatgtggtacgcaaaaaaacaggggcagaaaaataaagaagctgaacgacaggagcgtgccgtagtgcacatggacgagaggagagaggagcagatcgtgcagctgctgaattctgtgcaggccaaaaacgataaagaatccgaggcccaaataagctggttcgctccagaagatcacggatatggcacagaggtgtccactaaaaacactccttgtagtgaaaataagcttgacatacaggagaagaagctgatcaaccaggaaaaaaaaatgttcagaatcagaaatcgatcgtatatcgaccgggactccgaatacctgcttcaggaaaatgaaccggatgggactctggaccagaaattgttggaggatctacaaaaaaagaagaacgacctgaggtacatcgagatgcagcattttagggaaaaactgcccagctatggcatgcagaaggaactggtaaacctgatcgataatcaccaggttaccgtcatcagcggtgagaccgggtgcggcaaaacaacgcaggtgacccaatttatccttgacaactatattgagaggggaaagggctctgcatgcagaattgtatgcacacagccccgacggatttccgctatctccgtagccgaaagagtcgccgcagaacgggccgaatcttgtggctcgggaaacagcactggttaccagattaggctccagtctcgactgcctcgcaaacagggctccattctatactgcacaacaggcatcattctccaatggctacagtcagatccgtatctcagtagcgtgtcccatatcgtgctagacgagattcatgaaaggaatcttcagtcggatgttctgatgaccgtggtcaaagatctgctgaacttccggtctgatctgaaggtaatacttatgtcagccaccctgaatgctgaaaagttttccgaatatttcggaaattgccctatgattcacattcccggtttcaccttccccgttgtggagtatctgctcgaagacgtgattgaaaaaatccgctacgtccctgagcaaaaagaacatcggtcgcagtttaaaagaggttttatgcaagggcacgtgaaccgacaggagaaggaggagaaggaggctatctataaggaaaggtggcctgactacgtgcgagagctgcgccgcagatactccgcctcgactgtggacgtgattgagatgatggaggatgacaaggtggatctcaatctgatcgtcgctttaatcaggtatatagttctggaggaagaggatggcgccattctggtgttcttgcctggctgggataatatcagtactctccacgatttactgatgagccaggtaatgttcaagagcgacaaatttctgattatacctctgcatagtcttatgccaactgtgaaccagacacaggtgttcaagagaaccccgcctggagtgagaaagatcgtgatcgctaccaacattgccgagacctccattactatcgatgatgtggtgtacgtgatcgacggcggcaagatcaaggagacacactttgacacgcagaacaacatcagcacgatgtctgccgagtgggtaagtaaggctaatgccaaacagaggaaaggacgcgcaggcagggtgcaaccagggcattgctaccatctctataacggactccgggcctcgctcttggacgattatcagctgccagaaatcctgcggactcctctcgaagagctctgcttacagataaaaattctgcgactgggcgggatcgcctattttctgagcagattgatggacccaccttcgaacgaagcagtcctgctgtctatccgccatcttatggagctcaacgctttggacaagcaagaggagctgacaccgctgggtgtgcatctcgcccggctccccgtagagccccacattggcaaaatgatacttttcggcgccttattttgctgcctggacccagtcctcacaatcgcagcatctttgtccttcaaagatccgttcgtgattccactaggctgggaggaggccagaaggcgaggcttcagatatgaaaaggactactgctgggaatattttctcagctcgaatacactacagatgctgcataatatgaaggggcaatttgcagagcacctgctgggagccgggttcgttagttcaagaaacccaaaggacccagagtctaacatcaatagtgacaacgaaaagattatcaaggcggtaatttgcgccgggctgtatccgaaggtagcaaagatacgactgaatctcggaaagaagcgcaagatggtgaaagtttacactaaaaccgatgggctcgtcgctgtccatcccaaatccgtgaatgttgaacaaaccgattttcattacaactggttgatctaccacctaaagatgagaacctccagtatctacttgtatgattgtactgaggtttccccctactgtctcctcttcttcggaggagacatcagcatccagaaagataacgaccaggagaccatcgcagttgatgagtggattgtcttccaatcaccagctcgcatcgcccatttggtcaaggagcttagaaaagaactggacatattactacaggaaaagatcgagagcccacacccagtggattggaacgacaccaagagcagggactgtgccgtgctgtccgccataattgacctcataaaaacgcaagagaaggctactcctagaaacttcccgccccggtttcaggacggttactatagctag

SEQ ID NO: 184975 - DNA, 2985 bp, synthetic construct
  misc_feature 1..2985: note = Description of Artificial Sequence: Synthetic coding sequence
  source 1..2985: mol_type = other DNA
atgagctacgactaccaccagaactggggccgggacggcggcccccgaagctcaggcggcggatatggcggcggtccagcggggggtcacggcggtaatcgaggctccggcggaggcggaggtggtggtgggggtggacgcggcgggcggggtcggcaccctgggcatctcaaaggcagagagataggcatgtggtacgcaaagaaacagggccagaagaataaagaggccgaacggcaagagagagcagtggttcatatggacgagagacgcgaagagcagatagtgcaactgctcaacagcgtccaggccaagaacgataaggaaagtgaggctcaaatatcttggtttgcgcctgaggatcatggctacggaacggaagtcagcacaaagaatacgccatgtagcgagaacaagttggatattcaggagaagaagctgattaatcaggagaagaaaatgttcagaattcgaaaccgctcatatattgaccgtgatagtgagtaccttctgcaagaaaacgaacctgacgggactctcgaccaaaaactcctcgaggatctgcaaaagaaaaagaacgatctgcgctacatcgaaatgcagcacttcagggaaaaactgccatcttacggcatgcagaaggaactggtgaacctcattgacaatcatcaagtgacagtaattagcggggaaacgggatgtgggaaaaccacacaagtcactcagtttattctggacaactatattgagcgcgggaaggggtctgcctgtcgtattgtttgtacccagcctagacgtatcagcgcaatttctgtcgcagagcgggtggccgcagagagggcagagtcctgtgggagtgggaacagcaccgggtaccagataagactgcagtctaggctcccacggaagcagggtagtatcctctattgtacaactggcattattctgcagtggttgcagagcgacccctatctgagtagcgtctctcacatcgtcctggatgagatccatgagagaaaccttcagtccgacgtcctcatgactgtagtgaaggatctcctcaactttaggagcgatctgaaagtcatccttatgtcagctactcttaacgctgagaagttttctgagtattttggaaattgtcctatgattcatattccaggctttaccttccctgtggtcgaatatctgctggaggacgtgatcgagaagatacgatacgtgcctgaacagaaagagcatcgtagccagtttaagagaggctttatgcagggccacgtgaaccgccaggagaaagaagagaaggaagcgatctataaggagcgatggccagactatgtaagggaattgcggcgccgctattctgcgagcacagtggacgtcattgaaatgatggaagatgacaaagttgacctcaatctgatcgtggcgctgattaggtacatcgtattggaggaagaagacggagccatcctggtcttcctgccaggatgggacaatatttctaccctgcatgaccttttaatgagtcaggtcatgttcaagtccgtgaatcagacccaggtattcaagcggacccccccgggcgttaggaagatagtgatcgccactaatattgctgagacttccattactatcgatgatgtggtgtacgtgatcgacgggggaaagattaaggagacgcactttgacacccaaaataacattagcacaatgtctgcagagtgggtgtcaaaggccaacgccaagcagcggaaagggcgcgctggccgggtgcagccaggccactgctatcatctatacaacgggctcagggccagcctgttggatgattatcagctccccgagatccttagaacccctcttgaagagctgtgtctgcagatcaaaattctgcgactcggcgggattgcctactttctgtcacgtctgatggaccccccatcgaatgaagcagtgctgttgtccattcgacatttgatggagttgaatgccttggacaagcaggaggagctgaccccactaggtgttcatctcgccagactcccagtggagccacacatcggtaagatgattcttttcggtgcattattttgctgtctggatccagtcctgactatagctgccagcctgagctttaaggacccctttgtgatcccactgggtaaggaaaaaattgccgacgcacgtaggaaggagcttgcaaaagatacaagatccgatcacctaacagtcgtgaacgccttcgagggctgggaggaggcgcgcaggagaggctttagatacgagaaggactattgctgggaatacttcttgtcaagcaatacgctgcaaatgctgcacaatatgaaagggcaattcgctgaacaccttctgggagctggattcgtttctagtcggaacccaaaggatccggagagtaacattaattcggacaatgaaaagataatcaaagccgtcatatgcgccggcctttatcccaaggtggctaaaatcagactcaacctgggaaagaagcggaaaatggtaaaggtgtatacgaagactgatggcctggttgcggtgcacccgaaatctgtcaatgtagaacagactgactttcactacaattggctgatataccatctgaagatgagaacatcttctatttacttgtatgactgtacagaagtatcgccctactgtttgctcttttttggcggagatatatctatacagaaggacaacgaccaggaaaccatagcggttgacgaatggatcgtttttcagtcccccgcccgtatcgcccacctcgtgaaagaactccgcaaggagctggatattctcctacaggagaaaattgagagtccccatccagtggattggaatgataccaaatcacgtgattgcgccgtcctgtccgccattatcgacctgatcaaaacacaggaaaaagctacccctaggaactttccccctcgattccaagacggatactattcctag

SEQ ID NO: 184976 - DNA, 3027 bp, synthetic construct
  misc_feature 1..3027: note = Description of Artificial Sequence: Synthetic coding sequence
  source 1..3027: mol_type = other DNA
atgagctacgactaccaccagaactggggccgggacggcggccccagatcttctgggggagggtacggaggaggcccggctggggggcacggagggaacaggggttctggggggggaggcggcggggggggagggggaaggggtgggagggggcgacaccccggtcatctgaaaggccgcgagataggtatgtggtacgcaaagaagcaaggacagaaaaacaaagaggcagaacggcaggagagagctgtcgtgcacatggacgaacgtagagaggaacagatagtccagttgcttaactccgtgcaagctaagaatgataaagaaagcgaggcccagatcagctggttcgcccctgaggatcatggatatggcacggaggtgtcaactaaaaatactccctgcagtgaaaataagctcgatatccaggagaagaagctgataaaccaggaaaaaaaaatgttcaggatccggaatcgctcctatattgatagagacagtgagtatctgctacaagaaaacgaaccagacgggaccttggaccagaagctcctggaggaccttcaaaagaaaaaaaacgatctgcgttacatcgaaatgcagcatttccgagaaaaactgcccagctacggtatgcagaaagagcttgtgaatctcattgataatcatcaagtcaccgtaattagtggcgaaactggctgcgggaagaccacccaggtaacacagttcatcctggataactatattgagcggggcaagggttccgcctgtcggattgtatgcacccaaccaagacgaatcagcgccataagcgtggctgaacgcgtcgccgcagagcgcgcagaatcctgtgggtcaggaaattctactggatatcagatccgactgcaaagtaggttgcctaggaagcaagggagtatactgtactgtactaccggaataatactgcagtggttacaatctgacccctacctcagtagcgtcagtcatatcgttctggatgaaattcacgagcgaaatttacaatccgacgtccttatgacagtggtgaaggacctgctgaacttccgtagcgacctgaaagtgatattgatgagtgcaacactcaacgctgagaaattcagtgagtattttggcaactgcccgatgatacacattccagggttcacgtttccagtagtcgagtatttgctcgaagatgtgatagaaaaaatccgatatgtgccagagcagaaagagcaccgcagtcaattcaagcgagggttcatgcagggccacgtaaatcggcaggaaaaggaggagaaggaggcaatatacaaggagcgatggccagactacgtgagagagctcaggcggcggtactcagcctcaaccgtcgacgttatagaaatgatggaagacgacaaggtggatctgaacctgatcgtggctttaatccggtacatcgtgttggaagaggaggatggcgctatcctggtgtttttgcccggctgggacaatatttcgaccctgcacgacttgctgatgagtcaggttatgtttaaatctgacaaattcctgatcattccgctccactccttgatgcccaccgtgaaccagacccaggtgttcaagcgcactccccccggcgtgcgcaagattgttattgccacgaacatcgccgaaacttcaatcaccatcgatgatgtcgtctacgtaattgacgggggaaagattaaagagactcactttgatacccagaacaacatatcaacgatgagtgctgagtgggtctcaaaagcaaatgccaagcaaaggaagggccgtgccggcagggtgcagccaggtcactgttatcacttatacaacggtctacgcgcttccctgctagacgattatcagttgcctgagatacttcgaaccccactggaggagctgtgcttgcaaatcaaaatactgagactgggcggcatcgcctatttcctgtcacgtttaatggaccccccgtctaatgaggccgtcctgctgtctatccgccacctgatggaactgaacgccttagataagcaggaagagcttacgccactgggagtgcacctggctaggctgccagtggagccccacatcggaaaaatgatcctgttcggggctctgttttgctgtctggatcctgtcctgaccatagcggcttctctctcttttaaagatcctttcgtgattccactgggtaaggaaaagattgcagacgctagacggaaggaactggcaaaggacacccggtccgaccatctgacagtcgttaacgcgtttgaggggtgggaagaagcccgccgccgcgggttcaggtacgagaaagactattgttgggagtacttcctgagcagcaacacccttcagatgttacataatatgaaaggtcagttcgctgaacatctgttaggtgcaggattcgtctcatctcggaacccaaaggacccggagtctaatattaactccgacaacgagaagattatcaaagctgtcatctgcgctggtctgtaccccaaagtcgctaagattagactgaacttgggaaagaaacgcaaaatggtgaaggtctatacgaagacagatggactggtcgccgttcaccctaagagcgtgaacgtagagcagactgatttccattacaattggttaatttaccacctgaaaatgaggacgagttccatttacctgtacgactgcactgaagtgagcccctactgtttattattttttggcggagacatttccatccagaaagacaatgatcaagagacaatagcggtggacgaatggatcgtcttccaaagtccagcacgcattgcacaccttgttaaggaactgcgcaaggagctggatatcctactccaggagaagatagagtctcctcaccccgtggactggaacgataccaaatcaagggattgcgcagtgctctctgctattatcgatttgatcaaaacacaagagaaggccacaccacggaatttcccgcctcggttccaggatgggtattacagttag

SEQ ID NO: 184977 - DNA, 2985 bp, synthetic construct
  misc_feature 1..2985: note = Description of Artificial Sequence: Synthetic coding sequence
  source 1..2985: mol_type = other DNA
atgagctacgactaccaccagaactggggccgggacggcggcccccgctcctccggagggggatatggaggggggcccgccggcggacacggagggaacagaggttccggagggggggggggcggcgggggaggcggccggggggggcggggacgccatcctgggcacctgaaaggtcgcgaaataggcatgtggtatgcaaagaaacagggccaaaagaataaggaggcagaacggcaagagcgtgccgtggtccatatggacgagagacgggaagaacagatagtgcagctgctcaactctgtccaggctaagaacgataaagaatccgaggcccagatcagctggtttgcacctgaagaccacggctacggaacagaagtctccactaaaaataccccttgcagcgagaataagctggatatccaagaaaaaaagctgatcaatcaggaaaagaagatgtttagaatacgtaatcggtcctacatcgatcgcgacagtgagtacctgttacaagaaaacgagccagacgggaccctggaccagaagcttcttgaggacctgcagaagaaaaagaacgatctgagatatatcgaaatgcagcattttagggagaaactcccgtcatacggaatgcaaaaagaactggtcaatctcatcgacaatcaccaagtcacggtgatctcaggggagaccggatgcgggaaaactacacaggtcactcaattcatcctggacaactacatagagcgggggaagggcagtgcatgtcgtattgtgtgcacgcagccacgcagaatctccgctatatctgtagctgaaagggtggcagccgagagggccgagtcatgtggtagcggaaatagtaccggatatcagattcgtctgcagtcccgcttgccaagaaagcagggaagcattctttactgcactacaggaatcatcctccagtggctccagtccgacccctacttgtcttctgtgagccatatcgtgctggacgaaatacacgagcggaatctccagtcggatgtattaatgaccgttgttaaagatctgttaaactttcgcagcgatttgaaggtaatcctgatgagtgctacacttaacgctgaaaagttttccgaatattttggcaactgtcccatgatccatattcccggatttaccttccccgttgtcgagtacttgctcgaggatgtgatcgagaaaatacgttatgtgccagagcagaaagagcacagaagccagttcaaacgcggattcatgcaggggcatgtgaaccgccaggaaaaggaagaaaaagaggccatttacaaggaaagatggccagactatgtgcgtgaactccgacgccgctactcagcttccacggtcgacgttattgagatgatggaagatgacaaggtggatttaaatctgattgtcgcgttgattcggtacatcgtgttagaggaggaagacggggctattctggtttttttacctgggtgggacaatatctctacactgcatgatctgctcatgtctcaagttatgtttaagagtgggaccatgagccaggtgtttaagagaacgccacctggtgtcagaaaaattgtgattgcaaccaatattgcagaaacaagcatcacaatcgacgatgtggtctacgtaattgacgggggtaaaattaaagagacccacttcgatactcagaataacatctccacaatgagtgccgagtgggtttctaaggccaacgcgaaacaacggaagggccgggctgggcgggtgcagccaggacattgctaccatctgtacaacggccttcgggccagcttgttggacgattaccagctacccgaaatactgcgaacacccctcgaagagctatgcctgcagataaagattctgcgcctcgggggaatcgcgtacttcctgagtcggctcatggacccaccttctaacgaggccgtcttactctccattcgacatctgatggaactgaacgcgcttgacaaacaggaagagctgactcccttaggtgttcatctggcccgtctgccagtagaaccccatatcggaaagatgatcctctttggtgccctattctgctgcttggacccagtgttaactattgccgcttcgctgtcatttaaagacccattcgtgatccccctggggaaagagaaaatagcggacgcacgcaggaaggagttggcgaaagacactaggtcggaccacctgactgttgtgaacgcatttgagggatgggaggaggcacgcagacgcggattcagatacgaaaaggactattgttgggaatacttcctgtccagcaatacactgcagatgctccataatatgaaagggcagttcgcagaacatctactgggggccgggttcgtgagcagtcggaatccaaaggacccagaatctaacattaactctgacaatgagaagatcatcaaagctgtcatttgtgcaggtctgtatccaaaggtggcgaaaatccgactgaatcttggaaaaaagaggaaaatggttaaggtgtataccaaaacagatgggctggtggccgtgcatccaaagagcgtaaatgtggaacaaactgatttccactacaactggctgatctatcacttaaaaatgaggaccagtagcatatacctctacgactgtaccgaagtctctccatactgcctactgttctttgggggcgacatttccattcaaaaagataatgaccaggagactatcgccgtggacgagtggatcgtgttccaaagccccgctagaattgcccacctggtcaaggaactcaggaaggaactggatattctgttacaggagaagatcgaatccccacacccagtcgattggaacgacaccaaatcccgcgactgtgcagtcctgtctgccataatcgatctaattaagacccaggaaaaggctactcctcggaatttcccgcctcggtttcaggatgggtactattcctag

SEQ ID NO: 184978 - DNA, 3684 bp, synthetic construct
  misc_feature 1..3684: note = Description of Artificial Sequence: Synthetic coding sequence
  source 1..3684: mol_type = other DNA
atgggcgacaccagcgaggacgccagcatccaccggctggagggcaccgatttggactgccaggttggtgggctgatctgtaaatcaaagagcgccgcatctgaacaacatgtgtttaaagccccggcccccaggccttcgctgctgggactggatcttttggctagcttaaaacgccgagagcgcgaggaaaaggatgacggagaggacaagaaaaagtctaaagtcagcagctataaggattgggaggaaagcaaagatgatcaaaaagacgccgaggaagaggggggcgaccaggctggccaaaacatacgcaaagatcggcattacagaagcgccagggtggagacgccaagtcaccccggaggcgtctccgaagaattttgggaacgctcccgtcagcgcgaacgagagcggcgcgaacacggcgtctatgcttcaagtaaggaagagaaagactggaagaaggagaagtccagggaccgagattatgatcgcaagcgggatagagatgaacgcgaccgatccagacatagcagcaggtccgagcgagatggtggaagtgagcggagctccagacgcaacgaaccggaaagcccccggcaccgtcctaaggatgccgctaccccctctcgatctacgtgggaggaggaggattccggctacggatcctctcgcagatcgcagtgggagagtccatctcccacccccagctatagggatagtgaacgcagccatcgtctgtccaccagggatcgggatagatccgtgcgcgggaaatacagcgatgatacaccactgccaaccccttcctataagtacaatgagtgggccgatgatagacgtcatttaggctctacccccagacttagtcgcggccgtggacgtcgggaagagggagaggaaggcattagcttcgacacagaggaagagcgacagcagtgggaagatgaccaacgacaggccgatcgtgattggtacatgatggatgaggggtacgacgagttccacaatcccctggcgtatagttctgaggactacgttaggcgtcgggaacaacatctgcacaagcagaaacagaagaggatatcagcgcagagaagacaaatcaatgaggacaatgagcgctgggagaccaacagaatgctgacgtcgggagtggttcatcgtctggaagtggacgaagacttcgaggaggacaatgctgcgaaagtgcatttgatggtccacaacctggtccccccttttttagacgggcgcattgtgtttaccaaacagcccgagcccgtgattcccgttaaggacgctacctcagaccttgcaataatagcgcgcaaggggtcccagaccgtgcgcaagcaccgggagcagaaagaacgcaaaaaagctcagcataagcactgggagcttgcaggcactaaactgggggacataatgggagtgaagaaagaggaggagcctgataaggctgtgacggaagacgggaaggtagattaccgcactgagcagaaattcgccgaccatatgaaacgcaagtccgaggcttctagcgaattcgccaaaaaaaagagcatcttggaacagcggcagtacctgcccatttttgcagtacagcaggagttactgaccataataagggacaacagtatagttatcgttgtgggtgaaaccggcagcggcaaaacgacacagttgacacaatatctccacgaagacggctacactgattacggtatgatcggctgtactcagcctaggcgggtggctgctatgagcgtagccaagcgcgtttcagaagaaatggggggtaatctcggggaggaggttggctatgccattaggttcgaggattgcaccagtgagaacaccctgattaagtatatgacagatggaatcctgctaagagaaagccttcgggaagccgatctggaccactactcagctattattatggacgaagcgcacgagcggtcccttaatactgatgtgctgtttggacttctgagagaagttgtcgcaagacgcagcgaccttaagcttatcgtgaccagtgcaactatggatgcggaaaagtttgccgccttctttggtaatgtgcccatctttcacattccaggccggacttttcccgtggatatactgttttcgaagacaccgcaggaagattatgtggaggctgccgtaaagcagtcccttcaggtgcatctctctggagcgccaggcgatattctcatttttatgcccggacaggaggacatagaggtgacttctgaccagatcgtggagcatctcgaagaacttgaaaatgcccctgctctcgctgtgctccccatctattcccagctgccatcagacctgcaggctaaaatctttcaaaaagcccctgacggtgtgcgcaaatgcattgtggccaccaacatagccgagacaagtttaacggttgacggaataatgttcgtcatagattccggttactgcaaactgaaggtgttcaatcccaggatcggcatggatgctcttcagatttatcccatatcccaggctaacgccaaccaacggagcggacgagccgggcgcacaggccctggacagtgtttcaggctctatacacagtccgcgtataaaaacgaactgctgacaacaacagtccctgagatccagcgcaccaatctcgcaaatgtggtcctattactgaagagcctcggggtgcaagatctgctccagttccatttcatggatccccccccagaggataacatgttaaatagtatgtaccagctctggatattgggggcactcgacaatactggcgggcttacctctaccgggcgcttgatggtagagtttccgctggaccctgccttatcgaaaatgctcatcgtatcttgcgacatgggctgttcctcagaaatcttgctgatcgtttctatgctttcggtgccagctattttttatagaccaaaagggagagaagaggaaagtgatcaaatacgtgagaaatttgcagtgcctgagagtgatcatctaacctacttgaatgtttacctgcagtggaagaacaacaattatagcacaatatggtgcaacgatcattttatccacgctaaggccatgcgaaaggtccgagaggtcagagcccagctgaaggacatcatggtgcagcagcgtatgtctctggccagttgtggtaccgactgggacattgtgaggaagtgcatctgtgctgcttattttcatcaagcagctaagctgaaggggatcggcgagtatgtgaatatccgaacaggaatgccttgtcacttacatccaacctcaagcctgtttggcatggggtacacacccgattatattgtgtatcacgaattggttatgactacaaaagaatacatgcagtgcgtcacagccgtagacggcgagtggctggccgagcttggccctatgttctacagcgtgaaacaggcggggaaaagccggcaggagaatcggaggagagccaaggaagaggccagcgccatggaggaagaaatggccctagcggaggagcaattgagagcccggaggcaggagcaggagaaacgctctccactcggctcagtacgaagtaccaagatttacacgcccgggcggaaagaacagggcgagccaatgaccccaaggagaaccccagcaaggtttgggctctag

SEQ ID NO: 184979 - DNA, 1620 bp, synthetic construct
  misc_feature 1..1620: note = Description of Artificial Sequence: Synthetic coding sequence
  source 1..1620: mol_type = other DNA
atgggcgacaccagcgaggacgccagcatccaccggctggagggcacagatttagactgtcaggtgggtggcctgatttgcaaatctaagtccgccgccagcgaacagcatgtgtttaaggcgcccgctccgaggccctcgctcctgggactcgatttgcttgcctcactcaagcgtcgggagcgcgaagaaaaggacgatggggaagataagaaaaagtcaaaggttagctcctataaagactgggaagaatccaaggatgatcaaaaagacgctgaagaggaaggcggtgatcaagccaaaatcttccagaaagctccagacggagtaagaaaatgtattgttgctacaaatattgcggagacgtcccttacggtagacgggatcatgttcgtgattgatagtgggtattgcaagctgaaggtgtttaacccccgtattggcatggacgctcttcaaatttaccctatatcgcaggcaaatgcaaaccagaggtccggccgagctggcaggaccggaccaggacagtgtttcaggctttatacccaatcagcctataagaatgagcttctcaccactaccgtgccggaaatccagaggaccaatctggctaacgtggtcctgctgcttaaatcactcggcgtgcaggaccttttgcagtttcacttcatggaccctcctcctgaggataacatgctgaactctatgtatcagctttggatactgggggccctggacaacaccggagggctgaccagtacaggcaggcttatggtcgagttccccctcgatcccgccctgagcaaaatgttgatagttagttgtgacatgggatgctcctctgaaattctcctgatcgtgtctatgctgtccgtgcccgcaatcttctatcggcccaagggcagagaggaggaatctgatcaaattcgcgagaaattcgctgtcccagagagtgatcacctgacctacctgaacgtgtacttgcagtggaaaaataacaactactctactatttggtgcaatgaccattttatccatgctaaagcaatgcgcaaggtgagggaggttcgagcacagctcaaggatatcatggttcaacagaggatgtcactggcctcatgtggcaccgactgggacattgtacgcaaatgtatctgtgctgcttatttccatcaggccgctaagctcaagggtatcggcgaatatgtcaacatccggacaggtatgccgtgccacctgcatccaacatcgtcccttttcgggatgggctacacacccgactatatcgtgtaccacgaactggtgatgacaaccaaggagtacatgcaatgcgtgaccgcagtagatggagagtggctcgcagagctgggacctatgttttatagcgtgaaacaggccgggaaatccagacaggagaacaggcgaagggccaaggaggaagcgagcgccatggaggaagaaatggcactcgcagaggagcagttaagagcccggcgtcaggagcaggaaaagagatccccattggggtccgttagaagtacaaaaatctacactcctggccggaaggagcagggagaaccaatgactcctaggcgcacccctgcccgtttcggactgtag

SEQ ID NO: 184980 - DNA, 2340 bp, synthetic construct
  misc_feature 1..2340: note = Description of Artificial Sequence: Synthetic coding sequence
  source 1..2340: mol_type = other DNA
atgagccggttccccgccgtggccggccgggccccccggcggcaggaagaaggagagagatcaagggatctccaagaggaacggttatccgctgtttgcattgcagaccgggaggaaaaggggtgcacatctcaggagggcggtacgaccccaacattcccgatccagaagcagcgtaagaaaatcatacaagcggtccgtgataactctttcctgatcgttaccggtaacacggggtctggcaagaccacacagctccctaaatatttatatgaggcgggcttcagccaacacggcatgataggcgtgacgcaaccaagaaaagtggcggcgatctcagttgcgcaacgggtggccgaggagatgaagtgcaccctgggatcaaaggtggggtaccaggtgaggtttgacgattgctctagtaaagagactgcaatcaagtacatgacagacgggtgcctgcttaagcatattctgggggaccctaacctcaccaaatttagcgtaatcattctagacgaagcccacgagaggacattaactactgacattctgtttggacttctaaaaaaactgtttcaagagaaatcccccaaccgtaaagagcacctgaaggtggtcgtcatgtccgcgacgatggaactagctaaactgtcagcttttttcgggaattgcccgatctttgatatcccaggtaggctctatcctgtacgcgagaaattttgtaaccttatcggcccaagggatagagaaaatactgcatacatccaagccattgtcaaggttactatggatattcatctgaatgaaatggctggagatatactcgtttttctgaccgggcagttcgaaatcgagaagtcatgtgaactgctgttccagatggccgaaagcgtggattacgattatgatgtccaagacacaaccctggacggcctcctcattctgccctgttatggttctatgacaactgatcagcagcgacgaatttttcttcctcccccccctggaattcgcaagtgtgtcatttctacaaacatttccgcaacgtctctcaccatcgacggtatacggtacgtggtggacggaggcttcgtaaaacagcttaaccataatccaaggctagggctcgatatactggaggtggtccctatttccaaaagcgaggccctgcagcgtagcggaagggcaggcaggacctcaagcggcaagtgtttcagaatctactcaaaggacttctggaatcagtgcatgcccgatcatgtgatacccgagattaagagaacttcactcaccagtgtggtgctgactctcaaatgtctcgcaattcatgatgtgataaggttcccatatctggacccccctaatgaaaggctgatcctggaagcactaaagcaactgtatcagtgcgatgcgatagacagaagcggacacgtaactcgcttagggctatccatggtggaatttcctctccccccccaccttacttgcgcagttatcaaggcagcatctttggactgcgaggatctgctcctgccaattgccgccatgctttcagtggaaaatgtgtttatccgcccagtggaccccgaatatcagaaggaggcagaacagcggcaccgagagctcgctgctaaagccggtggctttaacgatttcgctacacttgcggtaattttcgaacagtgtaaaagtagcggggcaccagctagctggtgccagaagcattggatacactggagatgtctgttcagcgcctttcgagtggaggcacagctccgggaactgatacgcaaactcaagcagcagagtgattttcccaaggagacctttgaaggtcctaagcatgaagtgctccgcagatgcttgtgcgcaggctactttaagaacgtcgcacgacggtctgtgggccggaccttctgcacaatggacgggcgggggagccctgttcacatccatccgtcttcggccctgcatgagcaagagacaaagctagagtggatcatctttcacgaggttctggtgaccactaaagtctacgcgaggattgtgtgtcctatacgttacgagtgggtgagagatctgttacccaaacttcacgagttcaacgcgcatgatttgtcctccgtggcccgccgggaggtccgcgaagatgcacgcagaagatggacaaataaggaaaatgtgaaacaattgaaggacggcattagcaaagacgtcttgaagaagatgcagcgccggaacgacgacaaatctatctccgacgcacgagcccgcttcctggagcggaagcagcagaggacccaggaccatagtgacacccgaaaggagacaggatag

SEQ ID NO: 184981 - DNA, 2169 bp, synthetic construct
  misc_feature 1..2169: note = Description of Artificial Sequence: Synthetic coding sequence
  source 1..2169: mol_type = other DNA
atgagccggttccccgccgtggccggccgggccccccggcggcaggaggagggagaacgctcgagagacctccaggaggagcggttgtctgccgtatgcatcgcggacagggaggaaaaggggtgtacgtctcaggagggagggacgactccgaccttcccaattcaaaagcagcgcaaaaagattatacaggctgtccgagataactctttcttgattgtaactgggaatacaggctcaggtaagactacgcaattacccaaatacctatacgaagcaggctttagtcaacatggaatgatcggcgtaactcagccacgcaaagtcgcagctatctctgtggctcaaagagtggctgaagagatgaagtgtacgttgggctctaaggtgggctaccaggtgaggtttgacgattgtagcagcaaggaaaccgcaatcaagtacatgacggacggttgtctactgaagcacatactcggcgacccaaatcttaccaagttttccgtgattatccttgatgaagcccacgaacgaaccctgacgacagatatactttttgggcttctgaagaaattgtttcaggagaagtcacctaaccgtaaagagcacctcaaagtggtcgtgatgtctgctacgatggaactggctaagctgagtgcatttttcggcaattgcccgatatttgacattcctgggcgtctctaccctgtgagagagaagttttgcaacctgattggcccccgcgatcgtgagaacacggcttacattcaggctatcgtgaaggtgacaatggacatccacttgaacgaaatggccggcgatatcctggtgttcctgactgggcagtttgagattgagaagagctgcgaactgctcttccagatggccgaatcggtcgactatgattatgacgtccaggacaccacgcttgacggacttctgatcctgccatgctacggaagcatgacaaccgatcagcaacggcggatcttcctgccaccgcctcctggaatcaggaaatgtgtgatatccactaacatctcggccacatctctgacaattgatgggataaggtacgtagtggatggcggatttgtaaagcagctcaaccataatccccggctaggactagacatattggaggtggtccccattagtaaatcagaagcattgcaaaggagtgggcgagctggtaggacatcatccggaaagtgcttccggatctattccaaagacttctggaaccaatgcatgccggaccatgtcattccagaaattaagaggacctctctcaccagcgtcgtcctgactctgaagtgcctggccatacatgacgtgatccggttcccatatttggatccccctaatgagaggctgattctggaggctctgaaacagttataccaatgtgatgctatcgaccggagtggtcatgtgactagactggggctcagtatggtggagttcccactgcctccacatcttacttgcgcagtcatcaaggccgcgtcattggattgcgaagatttgcttttgccgatagcagctatgcttagtgtggagaatgtgttcattcgccctgtggacccagagtatcagaaagaggccgaacagcggcaccgggagctggcagccaaggctggagggtttaacgactttgctaccctggctgtaattttcgagcagtgtaagtcatcaggcgccccagcctcatggtgtcagaaacattggattcattggcgatgtttgttctccgcctttcgagtcgaggcccagctgcgcgagctgatacgtaagctgaagcaacaatctgatttcccgaaggagacgttcgaggggcctaagcacgaagttctcagaaggtgcctgtgtgccggttacttcaagaatgtggcccgcaggtccgttggccgcaccttttgtaccatggacggccgggggtcccctgttcacattcatccttctagcgcacttcatgagcaggagactaagttggaatggatcatattccatgaggttctggtaaccactaaagtatacgcgagaatcgtgtgtcctatccgatacgagtgggtgcgagacctgttgcctaaactccacgagttcaacgcacacgacctgtcctccgtggccaggagagaggtgagcaagattaaacttttccagtag

SEQ ID NO: 184982 - DNA, 2196 bp, synthetic construct
  misc_feature 1..2196: note = Description of Artificial Sequence: Synthetic coding sequence
  source 1..2196: mol_type = other DNA
atgatcggcgtgacccagccccggaaggtggccgccatcagcgtggcccagcgagtggctgaggaaatgaagtgtaccctggggtctaaggtggggtatcaggttcggttcgacgattgttcctccaaagagacagctatcaaatatatgaccgatggatgtctgttaaaacatatccttggagaccctaacctgactaaattttcggtgattatccttgatgaggcacatgaacgtacactcactacggacattctgtttggcctgctgaagaagttattccaggaaaagagtcccaatcgaaaagagcacctgaaagttgtggtgatgagcgccactatggaattggcaaagctgtccgcctttttcggaaactgccccattttcgatataccaggccggctgtaccccgttcgcgaaaagttttgcaaccttatcggccctagagatcgggagaataccgcctatatccaagccatcgtaaaggtgaccatggacatccatctgaacgagatggccggagatatactggtcttcctgactgggcagttcgagattgaaaagagctgtgagctcctgttccagatggctgagtctgttgactatgattatgatgttcaggatactacgctagacggccttctaattcttccatgctatggctccatgactacagtgtctcagacatcgcttaccttcgtgacacatattcagatcatgaaacagattagcgagaatcagcacagcctgactggactgaccatcgccggcattacgggggtttcccatcacgcccgacctagaaatatgacttgcaacgaaaaactgaatcagcaaaggcggatctttctcccccccccgcccggcattcgaaagtgcgttatttcaacgaacataagcgccactagtctgactatcgatggcattcgatatgttgtcgacggggggttcgtgaagcagctgaaccataaccctcgtctcggtctggatatactggaagtggtgcccataagtaagagcgaggccctgcaacgttctggaagagctgggcggacctccagtggcaaatgctttaggatctattctaaggatttctggaaccagtgtatgccagatcacgtgataccagagatcaaaagaacaagtctcacatctgttgtgctcacactgaaatgtcttgccatccacgacgtcatccgatttccctacctggacccccctaacgaacgcctcatcctggaggcactgaagcagctataccagtgcgacgctatcgatagaagcgggcacgttacgagattagggctgtccatggttgagtttccactgccacctcacctgacctgtgcagtcataaaagctgcctcactcgattgcgaggatttgctgctgcccatcgccgcaatgttgagtgtcgagaatgtgttcattagaccagtggaccctgaataccagaaggaggcagaacagcggcatagggagcttgcggccaaggccgggggattcaacgacttcgctactttggctgttatattcgaacagtgcaaatcaagcggtgcccccgcgagctggtgtcagaagcactggattcactggaggtgcctctttagcgcctttcgggtggaggcgcagctacgggagcttattaggaaactcaagcagcaatccgattttcctaaggaaacattcgagggaccaaagcacgaggtccttcgaaggtgtctttgtgccggctattttaaaaacgtcgctagaaggtccgtgggtaggaccttctgtacaatggatggccgtggcagtcctgtgcacatccaccccagctcagctttacatgaacaggagacaaagctcgaatggattatctttcatgaggtgctggttacaacgaaagtgtatgcaaggattgtatgtcccatcagatacgagtgggtgagagaccttctgcctaaattacatgaattcaacgcgcatgacctgagctctgttgcccgaagagaggtgcgcgaggatgcccggaggcgatggacaaacaaagaaaatgtcaaacaactgaaagacgggatatccaaggatgtgcttaagaaaatgcagaggcggaacgacgacaagtccatttccgacgctcgcgccaggttcctggagcggaaacagcagcgtactcaggatcactctgacacgcgaaaggagacaggatag

SEQ ID NO: 184983 - DNA, 2109 bp, synthetic construct
  misc_feature 1..2109: note = Description of Artificial Sequence: Synthetic coding sequence
  source 1..2109: mol_type = other DNA
atgagccggttccccgccgtggccggccgggccccccggcggcaggaagagggcgaaaggtcacgcgatctccaggaggagcgactttcagctgtctgcattgccgacagagaggaaaagggctgtacctcacaagaaggaggtaccacccctaccttccccatccagaaacagcgaaagaagatcatacaggctgagaccgcgatcaaatacatgacggatggctgtctccttaagcacattctcggcgacccgaacttaactaagttcagtgttattatcctcgatgaggcccatgaacgcacacttaccaccgacattctgtttggtcttttgaagaaactcttccaagaaaaatctccaaataggaaagagcacctgaaggtggttgtcatgtcagctactatggagctggcaaagctgtcagctttctttgggaattgtcccattttcgatatccctggaaggctttatccagtccgtgagaagttctgtaacctgataggcccacgggaccgcgagaacaccgcttacatccaggccattgtcaaagtcacaatggatattcacctaaacgaaatggctggagatatccttgttttcctcaccggccagtttgagattgaaaagtcttgtgaactgctcttccagatggcggagtctgtggactatgattacgacgtacaggatactactttagatggactactcatccttccatgttacgggtcaatgacgacggaccagcagagaaggatatttctgccaccgcccccaggaattcgcaaatgtgttatctccacgaatatctcagcaacaagcttaacgatcgacgggatccgctatgtggtggatggagggtttgtgaaacagttgaaccacaatcccagactggggctggatattttggaggtcgtgcctatctcgaaaagcgaggccctccagagaagcggtcgcgccggcaggacttcatctgggaaatgttttagaatatatagcaaagatttttggaaccagtgtatgccagatcacgtgattccggagataaagaggacctctctgaccagtgtggtgctgacgttgaaatgtctggccatccacgacgtaattagattcccatatctcgatcccccgaatgaaaggctgatcctggaggccctaaagcaactctatcaatgtgacgccatcgaccgtagcggccatgtgactcggctagggcttagcatggtggagtttccccttccaccccacttgacctgcgccgtcataaaggctgccagcttggattgtgaggatctgctgctgcctatcgctgccatgctctctgtggaaaacgtgtttattcgaccagtggacccggagtaccagaaggaggcagagcagcgacatcgcgaattagccgctaaggctgggggattcaatgattttgcgaccctggcagtgatcttcgaacaatgtaaatcatccggagcaccagcctcctggtgccagaaacattggattcattggcgctgcttgttttccgcatttagggtggaagcgcagttgagggagctgatcaggaaactgaaacagcaaagtgactttcccaaggaaactttcgagggaccaaagcatgaagtcctgaggcggtgtctttgcgctggatactttaagaacgttgcgcgccgttcagtgggcaggactttttgcacaatggacggccgcgggagcccggttcatatccacccttcatccgctctacacgagcaggagaccaagctagaatggattatttttcacgaagtgctggtcacaaccaaggtttacgctaggatcgtatgcccaataagatatgaatgggtgcgcgatctgctgcccaaactgcacgagttcaacgcgcacgacctgtcttctgtggccagacgcgaggtcagggaagatgcccgtcggagatggacaaataaggagaatgtgaaacagctgaaggacggcatcagcaaggacgtccttaagaagatgcagagacggaacgatgataagtctatcagtgatgctcgagcaaggttcctggaacggaaacagcagcgtactcaggaccattctgacactcggaaagagaccggctag

SEQ ID NO: 184984 - DNA, 3663 bp, synthetic construct
  misc_feature 1..3663: note = Description of Artificial Sequence: Synthetic coding sequence
  source 1..3663: mol_type = other DNA
atggccgtggccgtggccatggccggcgccctgatcggcagcgagccaggcccagctgaggagcttgctaagttggaatacctaagcctagtgtctaaggtgtgtacggagctggataaccacttaggcatcaacgacaaggaccttgccgagtttgtgatcagccttgcggaaaagaataccacctttgacacttttaaggcatccctcgtcaagaacggtgctgagttcacagactcgctcatcagcaatctgctccgccttatccaaaccatgagacctcccgcgaagcccagcacttcgaaagatccggtagtaaaacccaaaactgagaaggaaaagctgaaggagctgttccctgttctgtgtcaacccgacaacccttccgtgcggaccatgctcgatgaggatgacgttaaggttgcggtggacgtgctcaaggagcttgaagcactgatgccatcagcggcaggccaggagaaacagagagatgcggagcacagggaccggacaaagaagaagaagcgctcacgttcacgtgaccgaaaccgcgatcgggatagagacagagagcgtaacagggatagagaccacaaacgcagacacagatctagatccaggtccagatcccgaactagggaaagaaacaaggtgaaaagccgctacagaagcaggtctaggtcgcagagccctcctaaagatagaaaggaccgcgacaaatatggggagcgaaacctagacaggtggagagacaaacacgtcgaccgccccccccctgaggagcccactattggcgatatatacaatggaaaagttaccagcatcatgcagtttgggtgttttgtgcagctagaagggctgagaaagcggtgggaagggctagtgcacatctccgagctgcggcgagaggggagagtcgctaatgttgccgacgtggtctcaaagggccagagagtaaaggtcaaagtgctctcctttacaggcacaaagacctctctgtccatgaaggatgtcgatcaggaaacaggcgaggatctgaaccccaatcgtcggcgaaatcttgtcggtgaaaccaatgaggagacctccatgagaaatcccgacaggcccacacacctaagcttggtcagtgcccctgaggtggaggacgacagcctggaacgaaaaagacttacacgaatttccgaccctgagaagtgggagatcaagcaaatgattgctgccaatgtcctcagcaaggaagaatttccagacttcgatgaagagaccgggattctgcccaaggttgacgatgaagaagatgaagatcttgagattgaacttgtcgaggaggagccgcctttcctgagaggacacacaaagcagtccatggacatgtctcccatcaagatcgtgaagaaccccgatggatctctgagccaggccgcaatgatgcagtctgccctggctaaagagagacgtgagctgaaacaagctcagcgagaggcagaaatggattccattcccatggggcttaataagcactgggtggaccccctccccgatgcggagggacgtcaaatagccgcgaacatgcggggaataggaatgatgcccaatgacatccccgagtggaagaaacacgcctttgggggtaacaaggcatcctacggcaaaaaaacacaaatgagcatcctggagcaaagagaaagcctgcccatctataaactgaaagagcaattagtacaagccgtgcatgataaccagattctaatcgtgataggggaaacagggtccggaaagacgacccagataacccagtacctggcggaggctggatacacaagcagaggcaagattggttgtactcagcccaggagggtggcggccatgagcgtggcgaagcgtgtcagtgaggagtttggttgctgcctgggccaggaggtcggatatacgatcaggtttgaggattgcacatctccggagaccgtcattaaatacatgacggacggaatgctgctgagagagtgcctgatcgatccagacttgacacagtatgccatcattatgctggatgaagcccacgagaggacgatacacaccgatgtgttgtttggcctcctgaagaagacagtccaaaagcgtcaggacatgaaacttatagttaccagcgcaacactagatgccgtaaagttcagccagtacttctacgaggcgcctatcttcactattccaggccgaacgtacccagtggaaatcctctataccaaggagcccgaaaccgactacctcgacgcctcactgattaccgtgatgcaaatacatctcactgagccgcctggagacatcctcgtgtttctaactggtcaggaagaaatcgatactgcctgcgaaattttgtacgagcgcatgaagtcactcggcccagacgtgcccgagctgattatcctgccagtttattccgcattgccgagcgagatgcagacaaggatatttgacccggccccacccggctccagaaaggtggtcatcgctacaaatatcgcagaaacctcattaacaatagacggcatctattacgttgtcgacccaggcttcgtcaaacagaaggtgtataactccaagaccggcatagatcagctcgtagtcactcctatttcccaagctcaagccaaacagagagcaggtcgtgccggtcggacaggacccggcaaatgctaccgcctctacaccgaacgggcttacagagacgaaatgctgacgaccaatgtgccggagattcagaggactaacttggcctctaccgttctgagccttaaggcaatgggcattaacgacctgctctctttcgatttcatggatgccccgcccatggagaccttaatcacggcgatggagcaattgtataccttaggagctctcgatgatgagggactcctgacccggcttggccgcagaatggcagagttccccttggaaccaatgctctgtaaaatgctgattatgagtgtacacctggggtgttcagaggagatgctgacgattgtctcaatgttatcagttcagaatgtgttttaccgtccaaaagataagcaagcactggcggatcagaagaaggcaaagttccaccagaccgagggggatcatctgacactgctggcggtttacaattcttggaaaaataacaagttctccaacccatggtgttacgaaaacttcatacaggcgcgttcactcagaagagctcaggacatccgtaagcaaatgctgggaattatggataggcacaaactagatgtcgtatcctgtggaaagtccacagtcagggttcagaaggcaatctgctctgggttttttaggaacgctgcaaagaaggacccacaggagggataccgcacactaatcgaccagcaggtcgtttatattcaccctagctcagccctcttcaacaggcagccagaatgggtagtgtatcacgaacttgttctgacaaccaaggaatacatgcgcgaggtcacaacaattgaccccagatggctcgtggagttcgctccagctttttttaaggtcagtgaccctactaagttgagcaagcaaaagaaacagcaacgactggaaccattgtataaccggtatgaggagcctaatgcttggcgcattagccgggcctttagacggcgctag

SEQ ID NO: 184985 - DNA, 3546 bp, synthetic construct
  misc_feature 1..3546: note = Description of Artificial Sequence: Synthetic coding sequence
  source 1..3546: mol_type = other DNA
atggccgtggccgtggccatggccggcgccctgatcggcagcgagcccggacctgccgaagagctcgctaaactggagtatcttagcctcgtatccaaggtgtgcactgaacttgacaatcacctgggtattaatgacaaagacctcgctgaatttgtgattagcctagcagagaaaaataccaccttcgatactttcaaagctagtctcgtgaaaaatggtgccgagtttactgacagcctcattagtaacctcctccggctaatccagacaatgcgacctccagccaaaccaagtacgtctaaagacccggtggttaaaccaaagacggagaaggaaaagctcaaggagttgttcccagtcctatgccagcctgacaatccgtccgttcgtactatgttggatgaagacgatgtcaaagtggccgtcgacgtactcaaagaactggaggctcttatgccctctgcggccggacaagaaaaacagcgcgatgctgagcatagggacagaacaaagaagaagaagaggtccagaagcagggatagaaatagggacagggacagagatagggaaaggaaccgcgaccgagaccacaaaaggagacatcgctcgaggagccgctcacggtccagaactagagagcgcaataaggtcaagagccgttatcggtctcgctccagatcccagtcgccgcccaaggaccggaaggacagagataagtatggagagcggaaccttgatagatggagggataagcatgtcgatcgcccccctcccgaagaacccacaatcggggacatctataatggcaaggtgacaagtatcatgcagtttggatgcttcgtccagctggaaggactgagaaagcggtgggagggacttgtacacatctccgagctacggagagagggacgcgtcgccaacgttgcagatgtggtttcaaagggccagcgtgtgaaagtgaaggtgctgtcctttaccgggacaaaaacttcgctctccatgaaggacgttgatcaggaaactggggaggacttgaatccaaatcgccgccgcaatttagtcggcgaaacaaatgaagagacctccatgaggaacccagataggccaacccatctgtctctggtgtccgctccggaagtcgaagacgactctctggagcgcaagcgccttacccggataagcgacccggaaaagtgggagattaagcaaatgatcgcagcaaatgtactgagtaaggaggaattcccggatttcgacgaagaaactggaatactccccaaagtcgatgatgaggaggatgaggaccttgagattgagttagtggaggaggaacccccatttctgaggggccacacaaaacaaagcatggacatgagccccatcaagatcgtgaagaatcctgacggatcactcagccaggcggctatgatgcagagtgcactggcaaaagaacgacgcgagcttaaacaggcccagcgtgaggcagagatggattctattcccatggggttgaataagcattgggtggatcctctgccagatgctgaaggacgtcagatagctgcaaatatgcgcggtattgggatgatgccaaatgatatacctgaatggaagaaacacgcctttggtggaaataaggccagctacggaaagaagacacagatgtccatcttggagcaacgagaatcgctgcctatatacaagttgaaagaacagcttgtacaagccgtgcatgacaaccagatcctgatagttataggtgaaacaggcagcggcaagacaacacaaatcactcagtacctggcagaagccgggtacaccagccgcggtaagatcgggtgcacccagccccgcagagtggctgccatgtcagtcgcaaagagggtaagtgaggagtttgggtgttgcctaggccaggaagtaggctataccataaggttcgaggactgcacctcccccgagacagtgatcaagtacatgacagatggcatgctgctgcgggaatgtcttatagatcctgatttaacccagtacgctatcatcatgcttgatgaagcacatgaacggacaattcatacagacgtgcttttcgggctgcttaagaagacggtgcaaaaaagacaagacatgaaacttatcgtgacttctgccactctggacgcagtaaagttcagccaatacttttacgaggcgcccatatttactatacccgggcgtacttaccccgtggagatactgtacaccaaggaaccagagaccgactatctcgatgcaagtctgatcacagtgatgcagattcatctgaccgaacctcctggcgatatcctggtcttcctgacagggcaggaagagatcgacacagcgtgtgaaattctgtacgagaggatgaagagcttaggccccgatgtgcctgagttgataatactgcccgtgtacagtgccttgcccagcgagatgcagacacgaatcttcgatcctgcccctccaggcagccggaaagtggttatcgcaactaatatcgcagagacatccctgactatcgatgggatctattacgtggtggatccaggctttgtgaaacagaaggtctacaatagcaagactggcattgatcagcttgttgtgacccctatttctcaggctcaagccaagcagagggcggggcgcgctggtcgcactggtcctggaaaatgttataggttatacacggagcgtgcttaccgcgacgaaatgctcactacgaatgtacccgagatccagcggactaatctcgcctctacagtgctgagtttgaaagccatgggcattaatgacctgctcagcttcgacttcatggatgctccacctatggagactctcatcacagctatggagcagctctacaccctgggagcgttggacgatgagggtttgttaacacggctcgggcggaggatggccgaatttcccttggaacctatgctgtgcaaaatgctgattatgtcggttcatcttgggtgcagcgaagaaatgctgacgattgtcagcatgctgtccgtgcaaaatgtattctatagacctaaagataaacaggcccttgccgatcagaagaaagcaaaattccaccagaccgagggagaccatctgaccctgctggcggtctacaactcttggaaaaataacaaattttcaaacccctggtgctatgaaaatttcatccaggcgcggagcttgcgccgcgcacaggacatccggaaacaaatgcttggaatcatggaccgacacaagctagacgtcgtgagttgcggtaaatcaacggtgcgagtccaaaaggccatctgttctggcttctttaggaatgccgcaaagaaagacccccaggaggggtaccggacactgattgatcagcaagtggtctacatccatcctagtagcgccttgttcaataggcagcccgagtgccctaaacattttttgcccgtcgtcgcagtcgctgttagcctggagcagtgcctgagcaaattcgaggacctcaacaaagagctgggcctggttacctgctag

SEQ ID NO: 184986 - DNA, 3813 bp, synthetic construct
  misc_feature 1..3813: note = Description of Artificial Sequence: Synthetic coding sequence
  source 1..3813: mol_type = other DNA
atgggcgacgtgaagaacttcctgtacgcctggtgcggcaagcggaagatgacaccatcgtatgaaattcgagccgtgggtaacaagaatcggcaaaagttcatgtgtgaggtgcaggtcgaagggtacaactacaccggaatgggaaattctaccaacaagaaagacgcccagagtaacgccgcccgcgacttcgtgaattacctcgtgcgcatcaacgagattaaaagtgaagaggtcccggcttttggcgtggcctcccctccccccttgactgacactccggacactacagctaatgctgaaggagacctgccgaccaccatgggcggccctcttccaccccatttggccctcaaggcggagaataactccgaagtcggtgccagcggttacggcgtgccagggcccacctgggatagaggtgctaacctgaaggactattacagcagaaaagaagagcaagaggtacaggcgaccctggaaagcgaggaggttgacttgaatgccgggcttcacggtaattggactttagaaaatgccaaggcccggttaaaccaatattttcagaaagaaaagatacagggggaatacaagtatactcaggtggggcctgatcacaaccgtagcttcatagccgaaatgaccatctatattaaacaactcggacgcaggatcttcgccagggagcacgggagtaacaagaagctggctgctcagagctgcgcactctccctggtgaggcagctgtaccatttgggcgttgtggaagcatactctggacttaccaaaaagaaagagggagaaacagtagagccctacaaagtaaatctcagtcaggacctcgaacatcagctacagaacattatccaagagctaaatctggaaattctcccacctcctgaggatcctagtgtgcccgttgccttgaacatcggcaagctggcccaatttgaaccttcacagagacaaaatcaggtgggggtggtgccctggagtccaccccaatccaattggaatccgtggacctcgagcaatatcgacgagggtcctcttgctttcgctacccctgaacagatatctatggatttgaagaacgagctcatgtatcaactggagcaggaccatgatttgcaagctatattacaggaacgagagcttttacccgtgaagaaattcgagtctgagatcctcgaggctatcagtcagaacagcgtggtcatcatcaggggtgcaactggctgtgggaagactacccaggtgccacaattcatcctggacgactttatacagaatgatcgggccgccgagtgtaacatcgtagtcacccagcccagacgaatctccgccgtgtctgtggctgagagagtcgcctttgagcgcggggaagaaccaggcaagtcatgtggttactccgttcgattcgaatctattttgccacggccccacgcgtccatcatgttctgcacagtaggggtgctgctcagaaaactggaagctggcattcgagggatcagccatgtcattgtagacgaaatccatgaaagggacatcaataccgactttctcctggtggtgcttcgagacgttgttcaggcttaccccgaagttcggatagtccttatgagcgcaacaatcgacacgtctatgttctgcgaatatttttttaactgtccaatcatcgaagtgtacggacggacatatcctgtgcaggagtacttcctggaagattgcatacagatgacacacttcgtccctccccccaaagataaaaagaagaaggacaaagatgacgacgggggagaggacgatgatgccaactgtaatcttatctgtggcgacgagtatgggcctgagaccagactcagcatgtctcagctgaatgaaaaagagacgccttttgagcttatagaggcactgctgaaatatattgagactctaaacgtcccaggtgccgtcctcgtttttctcccaggttggaatctgatttatacgatgcagaaacacttggagatgaaccctcacttcgggagtcaccggtaccaaatcctgccacttcactctcagattcctcgcgaggagcaacgaaaggtgtttgacccagttccagtaggggtgaccaaggtgatcctttcgaccaacatcgcagaaacctctattaccatcaatgatgttgtctatgtgatcgattcatgtaagcagaaagtgaaattgtttacagctcacaataacatgacaaactatgctaccgtgtgggccagcaagaccaacctagagcaacgaaaaggtagagccggcagagtccggcccggcttttgcttccacctgtgcagccgcgccagatttgaaagactcgagactcacatgacaccagagatgttcaggacccccctgcatgaaatagctctcagcatcaagctcctccggctgggagggatcggccagtttttggccaaggcgatcgagccaccgcccttggacgcagtgattgaagccgagcacactctaagagagcttgacgctctcgacgccaatgacgaactcactccgttggggaggatcttggcgaagttgcccattgagccccggtttggtaaaatgatgattatgggctgtatcttctacgtcggggatgctatatgtaccatcgctgccgcgacttgctttccggaaccctttatcaacgagggcaagcgactgggatacatccaccggaatttcgccggaaatagattctcggatcacgtggccctcctgtctgtgtttcaggcatgggacgatgcccgcatgggcggggaggaagccgaaatcagattctgtgaacacaaacgcctgaacatggctactctacgcatgacatgggaggccaaggtgcagctaaaggagatactcatcaactctggttttccagaggactgtctgctgacccaagtgttcaccaacacggggccagataacaacctcgacgttgttatttcattgctggcctttggcgtgtacccaaatgtgtgttatcataaggagaagaggaaaattctgacaacggaaggtcgaaacgcactcatacataagtcatccgtgaactgccctttttcgagccaggatatgaagtacccatctcctttttttgtgtttggcgagaagattcgaacccgagctatctccgccaagggcatgacactggtgacccctcttcagcttctcctgttcgcctccaagaaggtgcagagtgacggccaaattgttcttgtggatgattggatcaaactgcagatcagtcacgaagcagcagcctgtataacagggttacgagcagctatggaggccctcgtggtggaagtgacaaagcaacctgcgatcatttcccagctcgatccagtgaacgagagaatgcttaatatgatccggcaaatttcccgcccaagtgcggccggtataaacctcatgatcgggagcaccaggtatggagacggcccccggccacccaagatggcaagatacgacaacgggtccggataccggcgtggcggtagctcctactctggcggggggtacggcgggggatacagtagtggcggttatggtagcggtgggtatggcggatccgctaacagcttcagggctgggtatggggctggcgtgggtggtggataccgcggcgtgagccgtggaggatttcgaggcaattcgggtggtgattaccgtgggcctagcgggggctatcgaggttcaggaggcttccaacgcgggggaggtcgaggcgcctatggcaccggctactttggccaggggagaggtggtggggggtactag

SEQ ID NO: 184987 - DNA, 1800 bp, synthetic construct
  misc_feature 1..1800: note = Description of Artificial Sequence: Synthetic coding sequence
  source 1..1800: mol_type = other DNA
atgggcgacgtgaagaacttcctgtacgcctggtgcggcaagcggaagatgaccccttcctatgaaattagggccgtggggaataagaatagacagaagttcatgtgcgaagtccaggtggagggttacaattacacaggcatgggcaattctaccaacaagaaagacgcccagagcaacgcagcccgagatttcgtcaattatctggtccgcatcaatgaaataaagtcggaagaagtgcccgcctttggagtcgcctctcctcctccgctcactgacacaccagacacgaccgccaacgctgaaggggaccttcccactacaatggggggcccactgcccccacatttggcactaaaagccgaaaataactccgaagtcggggcatctggctacggggttccaggtcccacatgggaccgcggagcgaacctgaaggattactattccaggaaggaggaacaggaggtacaggccactctcgaaagtgaggaagtagacctcaacgcaggattgcacggaaattggactctcgaaaacgcgaaagctcgcctgaatcagtactttcagaaggagaaaatccaaggcgagtacaagtatactcaagtagggccagaccataatagaagctttattgccgaaatgacaatttacataaagcagctgggaaggcggatttttgccagggagcacggttcaaataagaaactggcagcccagtcgtgtgccttatcacttgtgcgccagctctaccacttgggggtagttgaagcgtacagtggcctcaccaagaaaaaggagggtgaaacggttgagccttacaaggtgaatcttagccaggatctggaacaccaactgcagaacattattcaggagctgaatctagagatcctccctcccccggaggacccctcggtaccagtggctctgaatatcggaaagctcgcacaattcgagccttctcagagacagaaccaggttggggttgttccctggtcccctccccagtctaactggaatccatggaccagctctaacattgacgagggaccacttgcatttgccacccccgagcagattagcatggatctgaagaatgaactaatgtaccagctcgaacaggatcatgacctccaggctatcctgcaggaacgagagctattgcccgtgaagaagttcgagagtgagatccttgaggctatcagtcagaactccgtcgtgatcataagaggtgctaccggatgcggcaagacgacacaagtgcctcagttcatcctggacgatttcattcagaatgatcgggctgccgaatgtaacattgtcgtcacgcaacctagacggatatccgccgtgtctgtggcggagcgcgttgctttcgaacgtggcgaggaacccggaaagtcatgcggttacagtgtacgcttcgaaagcatactcccgcgacctcacgcctctatcatgttctgtaccgtcggtgtgttgcttagaaagctcgaagctggtataaggggcattagccatgtcatcgtggacgaaattcatgaaagagatatcaatactgattttttgctggtggtcctgcgcgacgtggtgcaggcttatccagaggtgagaatagttctgatgtcagccacgatagatacatccatgttctgcgagtatttttttaattgtcccattatagaggtatacggtagaacctaccctgtccaggaatattttctggaagactgtattcagatgacccacttcgttccaccccccaaggataaaaagaaaaaagataaaaagaagaaatag

SEQ ID NO: 184988 - DNA, 1197 bp, synthetic construct
  misc_feature 1..1197: note = Description of Artificial Sequence: Synthetic coding sequence
  source 1..1197: mol_type = other DNA
atgatgctgaagggcatcacccggctgatcagccggatccacaagcttgaccctgggagatttctacacatggggacgcaagcgagacaatcaattgctgcccatctggataaccaagtcccagtggagtccccccgcgccatttcccggacaaacgaaaatgacccagcaaaacacggcgatcagcatgagggccaacattataacatctcaccccaggacctggagaccgtcttcccacacggactgcctcctcggtttgtcatgcaagtgaaaacgtttagcgaggcctgcctgatggtccgaaaaccagccttggagttgctgcactacctaaagaacacctccttcgcctatcccgcaatacgctatctgctctatggagagaagggtacaggaaaaactttatccctatgccacgtgattcacttttgtgctaaacaggattggcttatcctgcacattcccgatgcacacctgtgggttaaaaactgtcgtgatctgctccagtctagctacaacaaacagcgctttgatcaacccctggaagcatccacctggctgaagaacttcaagaccaccaatgagagatttctgaaccagatcaaagtacaagaaaagtacgtgtggaataaacgcgaaagtactgagaagggaagcccacttggcgaggtcgtggagcagggaattacaagggtccggaacgctaccgatgccgtcgggattgtgctgaaagaactgaagcgccagtcatcactgggcatgttccacttgctcgttgccgtagacggaattaacgctctttgggggagaactactctgaaacgtgaggacaagtcccccatcgcacctgaggagctcgcactggtacacaacctccgaaagatgatgaaaaatgactggcacggaggcgccatcgtttcagctttatcacaaacagggtcactctttaaacctcggaaggcctatctgccacaggagctgctgggtaaagagggcttcgacgccttggaccccttcatacccattttggtgagcaactacaacccaaaggaattcgaatcgtgcatccaatactacctcgagaataattggctgcagcatgaaaaggcccccactgaggagggaaagaaagagttgctcttcttgtccaacgctaatccatctctccttgaaaggcactgcgcctatctctag

SEQ ID NO: 184989 - DNA, 1197 bp, synthetic construct
  misc_feature 1..1197: note = Description of Artificial Sequence: Synthetic coding sequence
  source 1..1197: mol_type = other DNA
atgatgctgaagggcatcacccggctgatcagccggatccacaagctcgacccagggagatttcttcatatggggacacaggcacgccagtcgatcgctgctcacctcgataatcaggtgcccgtggagtcaccaagagccatctcgagaaccaatgagaatgaccccgctaagcatggggaccaacacgaaggtcagcattacaacataagcccacaagatctggaaacagtgttccctcacgggctgccgcctaggttcgtgatgcaggtcaagacgttctcagaggcatgtcttatggtacgtaagcccgcactagagctgcttcactaccttaagaacacttccttcgcctacccagccatccgatatttactgtacggagagaagggaacggggaaaaccctctcactttgccacgtaattcacttttgcgctaagcaggactggttaatcctacatattccagatgctcatctttgggtcaagaactgccgagacttgctgcaaagctcatataataagcagagattcgaccaacccttagaggcgagcacctggctgaaaaatttcaagacaacaaatgagagatttctgaaccaaataaaggtgcaggaaaagtacgtatggaacaagcgcgagtccaccgaaaaggggagcccccttggagaagtagtagaacaagggatcactcgagtccgcaacgcaaccgacgctgtggggattgtgctcaaggaattaaagcgccagagtagtctgggaatgttccacctactggttgccgtagatggcattaatgccctgtggggtagaaccacgctaaagagggaggacaaatcccctattgcaccagaggaactggcactcgttcataatctacggaagatgatgaaaaacgattggcatggtggggccatcgtgtcagcccttagccagaccggatcgctctttaagcccagaaaagcttatttgcctcaggagttactcggcaaagaaggcttcgatgcacttgatcctttcatcccaattctcgtgagtaattataatcctaaggagttcgagtcatgcattcagtactacctggagaacaattggttgcagcatgagaaggcacccaccgaggaaggtaaaaaggaacttctgttcctctccaatgctaaccccagtctcctggagcggcactgcgcctatctgtag

SEQ ID NO: 184990 - DNA, 1095 bp, synthetic construct
  misc_feature 1..1095: note = Description of Artificial Sequence: Synthetic coding sequence
  source 1..1095: mol_type = other DNA
atgatgctgaagggcatcacccggctgatcagccggatccacaagttagatcctggaagatttctgcatatgggcacccaggcccggcaaagcattgcagcccatctcgacaaccaggtgccagtggaaagcccaagagccattagcaggacaaatgagaatgacccggttaagacgttctctgaagcctgtctaatggtccggaaacctgctttagagcttctgcactaccttaaaaatacatcctttgcctatcccgctatccgctatctcctttacggtgagaaagggacaggtaaaaccctgtcactttgtcatgtgatccacttttgtgcgaagcaggactggttgatcctccacattcccgatgcccatctatgggtgaagaattgtcgtgaccttctacagtcctcttacaataagcagagattcgaccagcctctagaggctagtacgtggctaaaaaatttcaagactacaaatgaacgcttcctgaaccagattaaagtgcaagaaaagtatgtgtggaacaagcgggagagcacagaaaaagggtccccacttggagaagtcgtggaacaggggatcactcgagtaaggaacgcaactgatgccgtgggaatagttttgaaggagctgaagcgccaatcttcactgggaatgtttcacctgctcgtggccgtggatggcattaatgcattatgggggaggaccaccctgaaacgtgaggacaagtcccctatcgcccctgaagagctcgcactggtacacaatcttcgcaaaatgatgaagaacgattggcatgggggagccattgtatctgcactgtctcagacaggttccctgttcaaacctcgaaaggcttaccttcctcaggagttattgggcaaggagggatttgacgcactggaccccttcataccgatccttgttagcaattataaccccaaggaatttgagtcttgtatacagtactatctagaaaacaactggctccagcacgagaaagcacccacagaggaaggtaaaaaagaactcctgtttctttctaacgctaacccctcattgctggaacgccactgtgcttacctttag

SEQ ID NO: 184991 - DNA, 1074 bp, synthetic construct
  misc_feature 1..1074: note = Description of Artificial Sequence: Synthetic coding sequence
  source 1..1074: mol_type = other DNA
atgatgctgaagggcatcacccggctgatcagccggatccacaaggcgaaacatggggaccagcacgaaggccagcactataacattagtccacaagaccttgaaaccgtcttccctcatggactcccccctcggtttgttatgcaggtgaagaccttcagtgaagcctgcttgatggtgagaaagcccgccctagagctcctccactatctcaaaaacaccagcttcgcctaccccgccatccgatatctattgtacggcgagaaaggcacaggaaagaccctatcactgtgccacgtgattcatttttgcgctaaacaagactggctcatcctgcacatacccgatgcccacctctgggtgaagaattgcagagacctattgcagagctcttacaacaagcaacggtttgaccaacccctggaggcttccacgtggttgaagaattttaagacaacaaacgaacggttcttgaatcagatcaaggtccaggagaagtatgtctggaacaaaagagagagcacagagaagggatcccccctgggggaagtagtggaacaaggaatcactagggtccgaaacgcaacggacgcagtgggtatcgtgcttaaagaactgaaaaggcaaagctctttgggaatgtttcacttgctggtcgccgtggacggcattaatgccctttggggccggacgactctaaagcgggaagacaaaagccccatcgcccctgaggagttggcccttgtgcataacctgaggaaaatgatgaaaaatgactggcatggcggggctattgtgtctgccctatcacagacaggatcactgttcaagccacgtaaggcctacctgcctcaggagctgctcggtaaggaaggatttgacgccctggatccgttcatcccaattctcgtgtcaaattacaatccaaaagagtttgagtcatgcatccagtattacctcgagaataactggttacagcatgagaaggctcctactgaggagggcaagaaggagctcctttttctaagcaatgccaatccaagcctcttggagagacactgtgcctatctgtag

SEQ ID NO: 184992 - DNA, 1047 bp, synthetic construct
  misc_feature 1..1047: note = Description of Artificial Sequence: Synthetic coding sequence
  source 1..1047: mol_type = other DNA
atggccggcctgaagcggcgggccagccaggtgtggcccgaggagcacggggagcaagagcatggcctctattcactgcacaggatgttcgacatcgtgggcacccatctcactcaccgcgacgtccgcgtgctgtcatttctgttcgtagatgtgattgacgatcatgagagaggcctcataagaaatggtcgcgactttttactggccctggagcgccaggggcgatgcgatgagtccaacttccgacaggtgctgcagcttctgcggattataactcggcatgatcttctgccgtacgttactttgaagcggcggcgcgccgtgtgtcccgatctcgtcgataagtatcttgaagaaaccagcatcagatacgttacgccacgcgctctctcagacccggagccaaggcccccccagccttctaagaccgtccctccccactatccagtggtgtgctgtccaacctccggcccgcaaatgtgctctaagcgacccgcgcgagggcgagccactctgggttcccagcggaagcgcagaaagtctgtcacaccagaccccaaggagaagcagacatgcggggaagaggtgcaaggatttcagcgttggtctcgcctggagggggagtacaaagagttactggggcattgggctgtttatgctattcagtatatccgtctcagagtacgggcggagtattgtcagcacgagacagccctccagggcaacgtgttcagcaacaagcaggaccctctggagaggcagtttgaaaggttcaatcaggctaatactatcctcaagagcagagatctagggtctatcatctgtgatataaaattttcagagctgacatacctggatgccttttggcgggattacataaacggcagtttgctcgaagcattaaaaggagtctttatcaccgactctctcaaacaagccgtgggccacgaagctatcaaactgctcgtgaatgtcgatgaggaggattatgagctggggcgccagaagctgctgaggaatctcatgctacaggctttaccttag

SEQ ID NO: 184993 - DNA, 957 bp, synthetic construct
  misc_feature 1..957: note = Description of Artificial Sequence: Synthetic coding sequence
  source 1..957: mol_type = other DNA
atggccggcctgaagcggcgggccagccaggtgtggcccgaggagcatggagagcaggaacatggtctatacagcctacacagaatgttcgacatagtcggtacacatttaacacacagggacgtgcgcgtgctttcctttctgttcgtagatgtcattgacgaccatgagagagggctgatcagaaatggccgggatttcctgctggctcttgaacgccaggggagatgtgacgaatcaaacttccggcaggtgcttcagcttttgaggatcatcacacggcacgacctgttaccctacgttacccttaagagaaggcgagctgtgtgccccgacttagtcgataaatatctcgaggagacttccataaggtacgtcaccccacgagcactgtcagatcccgaaccacggccccctcagccgtctaaaaccgtccctccccattacccggtcgtgtgctgccccaccagtggtccccagatgtgttctaagcggcctgcacggggacgcgcaaccttggggagccagcggaagcgcagaaaatccgtgacacccgaccctaaagaaaaacagacctgcgatatccgattaagagtgagggcagagtattgtcagcacgagacagcactccagggaaatgtgttcagtaataaacaggacccacttgagaggcaattcgaacgattcaatcaggccaataccatactgaagtcccgggacctcggctcgatcatttgcgacattaagttcagcgaattaacctatcttgatgctttttggcgagattatatcaatggctcgttgttggaagccctaaaaggggtctttattactgatagcttgaagcaagccgtgggacacgaggcgattaaactacttgtaaacgtggatgaagaggactacgaactcggcagacagaaattgcttaggaacctgatgctgcaggccctgccttag

SEQ ID NO: 184994 - DNA, 1047 bp, synthetic construct
  misc_feature 1..1047: note = Description of Artificial Sequence: Synthetic coding sequence
  source 1..1047: mol_type = other DNA
atggccggcctgaagcggcgggccagccaggtgtggcccgaggagcacggtgaacaggaacatggactgtactctcttcaccgcatgttcgatatcgtgggtacccacctgacccatcgggacgttagagtgttgtctttcctgtttgtggacgtgattgacgatcatgaacgaggcctgatacgtaacggacgcgattttttgttagccctggaaagacaggggcgttgcgatgagagcaacttccgccaggttctgcaactgctaagaattatcactcgccatgacctccttccttacgtcacgctaaagagaaggcgcgccgtgtgtcccgatctcgtggataaatatttagaagaaacttctatcagatatgtcacccctcgcgcactgtccgaccccgagccgagacccccgcagccctccaagacggtcccaccacactaccccgttgtgtgctgtcccaccagcgggccccagatgtgctctaaaaggccagcccgcggccgggctacactgggatctcagcggaaacgcagaaagtccgttactccagatccgaaggaaaagcaaacctgcggggaagaagttcagggcttccagcggtggtctcggctggaaggcgaatataaagagctcctgggccactgggccgtgtacgctattcagtatattcgcttgcgggtgagggctgagtactgccaacacgaaaccgctctgcaaggcaatgtcttttccaacaagcaagaccccctggagcggcagtttgaaaggttcaaccaggcgaatacgattctgaagtctcgcgacctgggaagtataatttgcgatattaagttctctgagctgacttatttggacgctttttggcgcgattacattaacggtagtttgttggaagccctgaagggggtattcattactgactccctgaagcaggcggtcggacacgaggctatcaagctcctggtaaacgtcgacgaagaagactacgagttgggccgacaaaagcttttaaggaacctgatgctgcaggccctgccttag

SEQ ID NO: 184995 - DNA, 957 bp, synthetic construct
  misc_feature 1..957: note = Description of Artificial Sequence: Synthetic coding sequence
  source 1..957: mol_type = other DNA
atggccggcctgaagcggcgggccagccaggtgtggcccgaggagcacggggaacaggagcatgggttatattccctgcatcgcatgttcgatattgtggggacgcatctcacccatagggacgtccgggtacttagcttcttgttcgtcgacgtgatcgacgaccatgagaggggtctgatccgcaacggtcgggacttcctgcttgctctggagcgccagggtcgctgtgacgaatccaatttcagacaggttctacagttgctccgcattattacccgccatgatttactgccatacgtcacccttaaacggagaagagccgtatgtccagacctggtggataagtaccttgaggagacatccatccggtatgtcacccctcgagcactgagcgatcctgagccacggccgcctcagccttccaagacagtaccaccacattatccagtggtctgctgtccaacttctggaccgcagatgtgtagtaaacggccagctagagggagggccactcttggttcacagagaaaacgtcgaaagtccgtgacacctgatcctaaggaaaagcagacctgcgacatccgcctgcgggtcagggcggagtactgtcaacatgaaaccgccctgcagggaaatgttttttccaacaagcaagacccactggagcgacaattcgagcgattcaaccaggctaatacgatcctcaaatcccgggacctgggatcaatcatttgcgacattaaattttcagaactaacctatttagacgcattctggcgcgattacatcaacgggagtctgcttgaagctctgaaaggcgtgttcatcacagactcactcaagcaagccgtcgggcacgaagcaattaaattactcgtgaacgttgacgaagaagattatgagctcggcagacagaaactgttaaggaatctcatgctgcaggccctgccctag

SEQ ID NO: 184996 - DNA, 828 bp, synthetic construct
  misc_feature 1..828: note = Description of Artificial Sequence: Synthetic coding sequence
  source 1..828: mol_type = other DNA
atggccggcctgaagcggcgggccagccaggtgtggcccgaggagcatggggagcaggagcacggcttatacagtctgcatagaatgttcgacattgtgggaactcatctaacccaccgggatgtgcttcagctactccgcatcattactcgccacgatctactcccatacgtgacactcaagcggcggcgggccgtatgccctgatcttgtggataagtatctggaagaaacctctataagatatgtgacccctagggccctcagtgacccagaaccccggcctccccaaccttccaaaacagtgcctccacattacccagtggtgtgttgtccaacgtcagggccgcagatgtgctcgaagcgtcccgcacgtggccgtgctactctgggcagtcagaggaaacggaggaagtcggtaacccctgatcccaaagaaaaacaaacctgtgacatccgcctgcgtgtgcgcgctgagtactgccaacacgagacagccctgcagggtaatgtgtttagcaacaaacaggatccccttgagaggcagtttgagcggttcaatcaagccaatacaattttgaaaagtcgggatctcggctcgatcatttgcgatatcaaattttcagagctcacttacctggacgcattttggagagactatattaatggctctttactggaagccctgaaaggcgtgtttattaccgattcactaaaacaggctgtgggtcacgaagcaatcaaactgctcgtaaacgttgacgaggaggactatgaactgggtcggcaaaagttgctgcgcaacctaatgctgcaggcgctgccttag

SEQ ID NO: 184997 - DNA, 957 bp, synthetic construct
  misc_feature 1..957: note = Description of Artificial Sequence: Synthetic coding sequence
  source 1..957: mol_type = other DNA
atggccggcctgaagcggcgggccagccaggtgtggcccgaggagcatggggagcaggaacatggactgtacagtctgcatagaatgtttgacatcgtgggcacacatctgacccaccgagacgttagggtacttagctttttgtttgtggacgtgatagatgatcacgagcgcggactgattcggaacggacgcgatttccttctggcacttgagcgccaggggagatgcgatgagtccaacttcaggcaagttctacaactgctgcggattataactcgccatgacttgcttccgtacgtgaccctgaaacgcagacgcgctgtatgccctgacttggtggacaaatacctggaggagacctccatccgctacgtcacaccgcgcgccttgtcggatccggaacctagacctccacagccctctaaaacagtgcctccccactacccggtcgtctgttgccccacgtctgggcctcaaatgtgtagcaaaagacctgctcggggaagggctaccctgggatcccagaggaagagacgtaagtcggttacccctgatccaaaagagaaacagacctgtgacatccggctgagggttcgcgccgagtactgtcaacacgaaactgctctccagggcaatgtcttctctaataaacaagaccccctggaacgccaattcgagagatttaaccaggccaataccattctgaaatctagagacctaggctcaataatttgcgatattaaattctcggaactcacatacctggacgccttttggcgtgattatattaacggttcgctactcgaggcactcaagggcgtgttcattacggattcgctgaagcaagcagtcgggcacgaggctatcaagctgttagtgaacgttgatgaagaggattatgagctgggacgacagaagctgctgaggaatcttatgctgcaggccctgccatag

SEQ ID NO: 184998 - DNA, 957 bp, synthetic construct
  misc_feature 1..957: note = Description of Artificial Sequence: Synthetic coding sequence
  source 1..957: mol_type = other DNA
atggccggcctgaagcggcgggccagccaggtgtggcccgaggagcacggagagcaggagcatggtctctattcattgcaccggatgttcgatattgtaggaacccatttgacgcaccgggatgtgagggttttgagcttccttttcgttgacgttatagatgatcatgagcgcggactgatcaggaatggacgcgactttctgctggcccttgagcgtcaagggcgttgcgacgaatctaatttccgtcaagtgctccagttgttgcgcattataacccgccatgatctgctcccgtacgtgacactcaaacgccggagggctgtttgcccagacctggtggataaatatctcgaagaaactagcatcagatatgttacacctcgagcgttgtccgatccagaaccacggccaccccagccatcgaagaccgtcccgccacattacccggtggtgtgctgccctacatcaggtccacaaatgtgtagcaagagacctgcgcgggggcgagcgacgctaggctcacagcggaaacggaggaaaagtgtcacccccgatcccaaagaaaaacagacctgtgacattaggctgagggtgcgcgctgagtattgccagcacgaaacggccttgcagggcaacgtattttctaataaacaggacccactcgaacgtcagttcgagcggtttaatcaggccaacaccatcctgaagtcgcgcgatctcggctccataatttgcgatatcaagttctctgagctgacttacctcgatgccttttggcgggactacattaacggctccttattagaagccctgaagggagtcttcataacagatagcttgaaacaggctgtcggccacgaagctataaaacttctggtcaatgtagatgaagaagactacgaactgggtagacagaagctgctgagaaacctcatgcttcaggccctgccttag

SEQ ID NO: 184999 - DNA, 1917 bp, synthetic construct
  misc_feature 1..1917: note = Description of Artificial Sequence: Synthetic coding sequence
  source 1..1917: mol_type = other DNA
atggacctgtggcagctgctgctgaccctggccctggccggcagcagcgatgccttcagcggctctgaagccaccgcggccatcttgagccgcgctccttggtcactgcaatcagtcaatcccggacttaaaaccaattcttctaaggaacctaaattcaccaagtgccgcagccccgaaagagagacattctcttgtcattggacagacgaagtgcaccacggcactaagaatcttggaccaatacaactgttttacactagacgcaatacccaggaatggacacaagagtggaaggagtgtcccgattacgtgtccgccggggaaaatagctgctacttcaactcatcgtttactagcatctggattccctattgtatcaagcttacttcaaatggcggcactgtcgatgagaagtgtttttccgtggacgagatagtgcagcctgatccccccattgccttgaactggaccctgttaaatgtatcactgactggcattcatgccgatattcaggttcgatgggaagcaccgagaaacgccgatattcaaaaaggttggatggtgctggagtatgagcttcagtacaaggaagtgaatgagaccaaatggaaaatgatggatcccattctcactacatccgtgcctgtatactctcttaaggtggacaaggaatacgaagttcgagtcagatcaaaacagcgcaactctggtaattatggagagttttccgaagtcctgtacgttacacttccccagatgagccagttcacctgcgaggaggatttctactttccctggctcctcatcataatttttgggatctttggcctaacggtgatgttgttcgtgttcttattttccaagcagcagcggattaaaatgttgattctgcccccagtgcccgtacctaaaataaagggtattgatcctgacctgctgaaagaaggcaaattggaggaggttaacaccattctggccatccacgatagttacaagcccgagtttcatagcgacgacagttgggtcgaattcatcgagctggacatcgatgagccagacgaaaagacagaggaatctgacactgatcggctgctctcatcagaccatgaaaagagccactctaacctcggagtcaaagatggtgattccggtcgtacatcatgctgtgaaccggatattctcgaaactgacttcaatgctaacgatatccacgagggaacttcagaggtcgcccagccgcaaaggctgaagggtgaggctgatcttctgtgcctcgaccagaagaatcagaacaacagtccgtaccatgatgcgtgtccggccactcaacaaccttccgtcattcaggccgagaaaaacaaacctcagccattgcccaccgagggagcagagtcaacccaccaagcagcacatatccaactgtccaatcccagctccctctctaacatcgatttctacgctcaggtgagcgacatcacacctgctggaagtgtcgttttaagccctggtcaaaagaacaaagcaggaatgtctcagtgtgacatgcacccagaaatggtctctctgtgtcaagaaaacttcctgatggataatgcttacttttgcgaagcggacgccaagaagtgtattcccgtggctcctcacatcaaagtggaaagccatatccagccctctcttaaccaggaggatatctacataacaaccgaaagcctcactaccgcagctggacgcccaggtacaggcgagcatgtgcccgggtctgagatgcctgtgccagactacacgagcatccacattgtgcaatcccctcagggtctgatactgaacgcaacggcgctcccactgccagataaagagttcctgtcatcctgtggttacgtgtccacagaccagttaaataaaattatgccttag

SEQ ID NO: 185000 - DNA, 1113 bp, synthetic construct
  misc_feature 1..1113: note = Description of Artificial Sequence: Synthetic coding sequence
  source 1..1113: mol_type = other DNA
atgttccaggccagcatgcggagccccaacatggagcccttcaagcagcaaaaggtggaggatttttacgacatcggcgaagaactaggaagcggacaattcgctatcgtcaagaagtgtagagaaaagtctaccggcctagaatacgccgctaagttcataaaaaaaaggcaatccagggccagccgcagaggggtctcacgtgaagagatagagagagaagtatctatccttaggcaggtgctgcaccataacgtcataaccttgcatgacgtctacgagaaccgaaccgatgtggtcctgatccttgagctggtttcgggcggggagctgtttgactttttggctcagaaagagtccctttcggaggaggaggctacctcctttattaaacaaattctggacggtgtcaactatctgcacactaaaaagatcgcacactttgacctgaaaccagaaaatattatgctgcttgataagaatattcccatacctcatatcaaactgatagacttcggactcgcgcacgagattgaggatggagtggagttcaaaaacatcttcggcactcctgagtttgttgcaccagaaatcgtgaactatgaacccttggggcttgaagctgatatgtggtccatcggagtcattacttatatacttctgtcaggcgcttcacccttcttaggcgatacgaagcaagagaccctggccaatattaccgctgtttcttatgacttcgatgaggagttctttagccagacgagcgagctcgccaaggatttcatccgcaaattgctggtcaaagagacacggaaacggctcaccatacaggaggccttaagacatccctggattaccccagtagataaccagcaagctatggtccggagggagtcagtcgtcaacctggaaaacttcaggaagcaatacgtcagacgcagatggaaattgagcttttcaatcgtatcactgtgcaaccatctgacacggtcactgatgaagaaagtacatctccgccctgacgaggatcttaggaactgcgagagcgatactgaggaggatatcgccaggcgaaaggcgttgcatccccggagacgatcttcaacctcttag

SEQ ID NO: 185001 - DNA, 1113 bp, synthetic construct
  misc_feature 1..1113: note = Description of Artificial Sequence: Synthetic coding sequence
  source 1..1113: mol_type = other DNA
atgttccaggccagcatgcggagccccaacatggagcccttcaagcagcagaaggtagaggatttctacgacatcggagaagagcttgggtcaggtcaatttgcgatagtgaaaaagtgtagagaaaagagcacaggattagagtacgctgcaaaattcattaaaaagaggcagagtcgggcctctcgacgcggtgtttcccgggaggagattgagagagaagtctcgattctgagacaagtgcttcatcataacgtaattactctgcacgacgtttatgagaaccgtaccgatgtggttctaatcctggaactagtatcaggaggagaattatttgattttctggcccagaaagaaagtctctcagaggaagaagccacgtcattcataaaacagattctggacggcgtcaactatctgcataccaaaaaaatcgctcacttcgacctgaagcccgaaaatatcatgctgctcgataaaaacatacccatccctcacattaagctcatcgatttcgggcttgcccacgagatcgaagacggagtggagtttaagaatatcttcggtacgccagagtttgtcgccccagagatcgtgaactatgaacccctaggtctggaagctgatatgtggagtattggtgttatcacttatatactcctgtctggcgcctcgcccttcttgggcgatacaaagcaagagacactggcaaatataacagcggtgtcctacgactttgacgaggaattctttagccaaacttccgaactcgccaaagatttcattaggaagctgttggtgaaggaaacccgcaagcgtctcactatacaggaagcactgagacatccttggattacgcctgtagacaatcaacaggccatggtgcgacgtgaaagcgtggtgaatctcgagaattttcggaaacagtacgtacgacgtcgctggaaactctctttttctattgtttcactgtgcaatcatctcacgcgaagtctgatgaaaaaagtgcacctccgccctgacgaggacttgcgtaactgtgagtctgatacagaagaggacattgcacggcggaaggcactgcaccccagacgaaggtcctccacctcttag

SEQ ID NO: 185002 - DNA, 246 bp, synthetic construct
  misc_feature 1..246: note = Description of Artificial Sequence: Synthetic coding sequence
  source 1..246: mol_type = other DNA
atgttccaggccagcatgcggagccccaacatggagcccttcaagcaacaaaaggtcgaggatttctacgatattggtgaagagttgggatccggacagtttgcaattgtgaagaagtgcagagaaaaaagcactggcttagaatatgctgccaaatttattaagaagcggcagtcccgcgcctcaagaaggggcgtgtctagagaggagatagagcgcgaagtgagcattcttcgccaagtctag

SEQ ID NO: 185003 - DNA, 2223 bp, synthetic construct
  misc_feature 1..2223: note = Description of Artificial Sequence: Synthetic coding sequence
  source 1..2223: mol_type = other DNA
atggccaccgccaacagcatcatcgtgctggacgacgacgacgaggatgaggcagcggcgcaaccaggcccaagtcatcccttgccaaatgccgcatctcccggagcggaggcaccttccagtagcgagccccacggcgcccgcggctcatcttctagcggcgggaagaagtgttataagcttgagaacgaaaagctgttcgaggaattcctcgaactgtgcaagatgcagacagcagatcacccagaggtggtgccttttctgtacaatcgccaacaaagagcgcacagtctgtttcttgcttcagctgaattttgtaatatcctgtcacgtgtattgagtagggcaaggtctaggccagccaagttgtatgtttatattaacgagctttgcaccgtcctgaaggcgcactcggcaaagaagaagctcaatctcgcgccagcagcgactacttcaaacgaaccctcgggcaataaccctcccactcacctatcacttgacccgaccaatgcagagaataccgccagccagtcccccagaacacgtggatcacgccggcagattcagagacttgagcagttgctggcgctgtacgtggcagagattagacgcttgcaagagaaagaactggatctttcagaactggacgacccggactccgcttacctgcaggaggcgcgtttaaaaagaaagctgattcgcttgttcgggagactctgtgaactgaaagactgctcctccttgacagggcgggtcatcgagcagagaattccataccgaggtaccagatatcccgaagtgaacaggagaatcgagcgcctaattaacaagccgggccctgacaccttccctgactacggggatgtactgcgggccgttgaaaaagctgccgctaggcactccctggggttgccgcgccagcagctccagctgatggcccaagatgctttcagggatgttgggattcgtcttcaggaacggcgccacctcgacctgatctataacttcggctgtcacttgaccgatgattacaggcccggcgtagacccagcgctgagcgaccctgtgttagcccgacggctgagggagaatcgcagtctcgcaatgtcgcggctggatgaagtgattagtaaatatgctatgctgcaggacaaatcagaggaaggagaacggaagaagcgccgagctaggctccagggaacatcaagccattcagccgatactccagaagccagcctcgacagcggcgaaggcccaagtggtatggccagtcagggctgtccgtccgcctcccgggccgagacggatgatgaagacgatgaggaaagtgatgaagaggaggaggaggaagaggaggaggaggaagaagaggccaccgactctgaagaagaagaggatctcgaacagatgcaagaaggacaggaagatgatgaggaagaagatgaggaggaggaggctgccgccggcaaggatggagacaagagtcctatgtcttctttgcagatctccaacgagaagaatctggaaccagggaagcagatttccaggtccagcggcgagcaacagaacaagggtcgcattgtctccccctccttgctgagcgaagaacctctggccccatctagcatagatgcagaaagcaatggagagcagccagaggaactcacattggaggaggagtctcccgtctctcagttgttcgagctagaaatcgaggccctcccgcttgataccccgagctctgtggagaccgatatcagctccagtcggaagcagtcggaggagccgtttactacagtgctggaaaacggagccggcatggtctccagcaccagctttaatggtggtgtgtctccacacaactggggggactctggcccgccatgcaaaaagtcaagaaaggagaagaaacagaccggatccggtcccctggggaattcttatgtcgagcgccaaagatccgtgcatgaaaaaaatgggaaaaaaatctgcactctgccctctcctccctcacccctggcaagcctggcccccgtggctgactcgtccacccgtgtggattcaccatcacacggtctggtgacatccagcctgtgcatcccgagcccagcgcggcttagccaaaccccgcatagccagccacccaggcccggcacatgtaaaacatctgtggcaacacagtgtgaccctgaggagatcatagttcttagtgactccgactag

SEQ ID NO: 185004 - DNA, 2223 bp, synthetic construct
  misc_feature 1..2223: note = Description of Artificial Sequence: Synthetic coding sequence
  source 1..2223: mol_type = other DNA
atggccaccgccaacagcatcatcgtgctggacgacgacgacgaggacgaagcagccgctcaaccaggcccatcacaccctctgccgaacgcagcttcgccaggggcagaggctcccagctcctccgagcctcacggggctcgcgggagctcatcaagcggcggcaaaaagtgctacaagctagagaacgagaaactcttcgaggagtttttggagctgtgcaaaatgcagacagccgatcatcccgaggtggtgcccttcctgtataatcgacagcagagagcgcatagcctgtttttggctagcgctgaattttgtaatattctttccagagtccttagtcgtgcccggtcacggcctgcaaagctttacgtatatataaacgagctgtgtacggtgctgaaggcacacagcgccaaaaaaaagcttaacctcgcccccgccgcaaccacaagcaatgaaccttctggaaataaccctccaactcacttatccttggaccctacgaacgctgaaaacaccgccagccaaagcccccggacacgtggttctaggcggcaaattcagcgactggaacaattgctcgccctttacgttgccgaaattcgccggctccaggagaaagagctcgatttatccgagctggacgatcctgattccgcctatttgcaggaagccaggctgaaacgaaaactgatcagactcttcgggagactgtgtgagttgaaagactgcagttccttaactggaagggtgatcgaacagcgcataccatatagggggactcggtaccctgaggtaaaccggagaattgaaagactgattaataagcccggcccagacacttttcccgattacggcgatgttctgagagcagtggaaaaagctgctgcacgccattcccttggcttgccacgacagcagttgcaattaatggcccaagacgcttttcgcgatgtcggcatccgactccaggagcggcgtcatctagatctcatctataacttcggttgtcatttgactgatgactaccgcccaggtgtcgatcccgccctcagcgacccagtactcgcccgccggctgcgagaaaacagatctttagccatgtctcggcttgatgaagtgattagcaagtacgctatgttgcaagacaaatctgaagagggagagaggaaaaagcgaagagccaggctacaaggaacttcctcccacagcgctgatactcccgaggccagtcttgactccggcgaggggccctccggcatggcttcgcagggctgtccatcagccagtcgcgcggagactgacgatgaagatgatgaagagtccgacgaagaggaagaggaagaggaggaagaagaagaggaagaagccacagattccgaagaggaagaagaccttgagcaaatgcaggaggggcaggaggacgatgaagaggaggatgaagaggaggaggctgctgctgggaaggacggggacaaaagcccaatgagctctctgcagattagcaacgagaaaaaccttgagcccgggaagcagattagtcgcagctctggtgaacagcagaacaagggaaggattgtgtccccatctctcctaagcgaggagccgctggccccctcctccatagacgcagaaagtaatggtgagcagcctgaagagcttaccctcgaggaagagtctccagtcagtcaactattcgagttggagatagaggcattgccgctcgacacacccagctctgtggaaactgatatctcaagttctagaaagcagtcagaggaacccttcacaaccgtcctggaaaacggggctggaatggtctcaagcacaagcttcaacggtggggtgtcccctcataattggggagactccggtcctccatgcaagaagtctcggaaggaaaagaagcagacaggctctggacctttgggaaactcatacgtcgagcgccagcgatcagtgcatgaaaaaaacggaaagaaaatatgtaccctaccaagccctccttctcccctggccagcctcgcccccgtggctgactcgagcacacgagtcgatagcccctctcacggcctagtcactagttctctctgcatcccttcaccagctcgcttgagtcagacaccacattcccagccgccacgccctggcacctgtaagaccagcgttgctactcagtgtgaccctgaggagatcattgtcctgagtgattctgactag

SEQ ID NO: 185005 - DNA, 2223 bp, synthetic construct
  misc_feature 1..2223: note = Description of Artificial Sequence: Synthetic coding sequence
  source 1..2223: mol_type = other DNA
atggccaccgccaacagcatcatcgtgctggacgacgacgacgaggatgaggcagctgcgcaaccaggtccctcgcaccccctgccaaacgctgcatcaccgggcgccgaagctccttcttcatctgaaccacacggcgcccgagggagcagttcaagcggaggaaagaagtgctacaagctggagaacgagaagctgttcgaagaatttctggagctgtgcaaaatgcaaactgccgaccatccagaagtggttcctttcttgtacaatcgccagcagagagcacactcactgtttcttgcttccgccgaattctgcaacatcctttccagggtgctgtctagggccagaagccgcccggctaaactctacgtttacattaatgagttatgcaccgtgcttaaggcgcatagcgcaaaaaaaaaactaaatttggcccccgccgctaccacttctaacgagccgagcgggaataacccacccacacatctctccttggaccctacaaacgccgaaaatactgctagccagtcacctcggacacgcgggtctagaagacaaatccagcggctggagcaactgcttgcactctacgtggctgagatcagacggcttcaagaaaaagagctggacctctctgaactggatgatccggattccgcctatctgcaggaggcgcgccttaaaagaaaactgatacgcctgttcgggcgcctgtgcgaactgaaggactgctcttctcttacaggccgagtgatcgaacagcgcattccgtatcgtggcacccggtaccctgaggttaacagaaggatcgaacggctgatcaataaacccggaccagatacgttcccggattacggcgacgtccttagggccgttgagaaggccgcagcacgacattcattaggcctcccgagacagcagttgcagctcatggcccaagacgccttccgggacgtgggaatccgcttacaggagcggcgacacctggaccttatttacaactttggttgccatctgaccgacgattatagacctggcgtggaccctgccctttcggacccggtgctcgcaaggcggctcagggagaatcgttccctagctatgagcaggttagatgaggtcatctctaaatatgcgatgttacaggacaagtccgaagagggggagcggaagaaacggcgcgcccgcctgcagggtaccagttctcattccgctgacaccccagaggcttctctcgacagtggcgaaggcccgagcggcatggcctcacaaggttgtccctctgctagccgcgcagaaacggacgacgaggacgacgaggaaagtgacgaagaggaggaggaagaggaggaagaggaggaagaggaggccacagactcagaggaggaggaggacctggagcagatgcaggaagggcaagaggacgatgaggaagaagacgaagaggaggaagcagcagccggcaaggacggcgacaagagccctatgagctctcttcagataagcaatgaaaagaacttggagcccggcaaacagattagccgatcatctggagaacaacagaacaaaggcagaatagtgtcaccaagtctgctctcagaggaaccattggccccaagttccatcgacgcggagtcaaacggcgagcaacccgaagaactgacactcgaggaggagagccccgtgtcccagttgtttgagctcgagatcgaagctctccccttggatactccaagttcagtcgagaccgacatctcttcaagccgcaagcaatcagaggagcccttcaccactgtgcttgagaatggagctggaatggtgagctccactagtttcaacgggggggtttccccccataattggggcgatagcgggcctccgtgcaaaaaatctcgtaaggagaagaaacagaccgggtctggtcccctgggtaactcttacgttgaaaggcaacgctcagtgcatgaaaagaacgggaaaaagatttgcactctccctagtccaccctcacccctggcttcactggctccagtggcagactccagcacccgcgtggactcccccagtcacggcctagtgacttccagcttatgcatcccctctccggcgcggctgtctcagacacctcactctcagccacccaggccaggcacttgcaagacctctgtcgcgactcagtgcgaccccgaggaaatcattgtccttagtgatagcgactag

SEQ ID NO: 185006 - DNA, 2223 bp, synthetic construct
  misc_feature 1..2223: note = Description of Artificial Sequence: Synthetic coding sequence
  source 1..2223: mol_type = other DNA
atggccaccgccaacagcatcatcgtgctggacgacgacgacgaggatgaagccgctgcccagcccggacctagccaccccctgccaaatgcagcaagcccgggggcagaggccccgtcaagctccgagcctcacggggcccgcggatcatcctcctctggtggcaaaaagtgctacaaattggaaaatgagaagctgtttgaagagtttctggagttatgcaagatgcaaacagcagaccacccggaggtggtgccattcctatataatcggcagcaacgcgctcattccctgttcctcgcctcggccgaattctgtaatattctctcgagagtcctatccagagccagatcccgccccgctaaactgtatgtgtatataaatgagctgtgtactgtcctgaaggcccactccgcaaagaagaagctgaacctggctccagctgccaccacatcaaatgagcccagtggaaacaacccacctacccatcttagcttggacccaaccaacgcagaaaacacggctagccagtcgccacggactaggggttctaggcgccagatccagcgcctcgaacaactgctggccctttacgtcgctgagatacgacgcttgcaagagaaggagcttgacctatcggaactcgacgatcctgatagcgcatacctccaagaagcacgacttaaaagaaaactaatacgactttttggacgcctctgtgaactcaaggactgtagcagcctgaccggaagagtgattgagcagagaattccttatcgcgggacaaggtatcctgaggtcaaccggaggattgaaaggctgatcaacaaacctggacccgacaccttcccagactacggggacgtcctcagggctgtggaaaaggcagcagcccgccatagtctggggctgcccagacagcagctgcagttgatggcccaggacgcctttagagatgtgggcattaggttgcaggaaagaagacatttagatctcatatacaactttggctgtcatctgaccgatgattatcgacctggagttgatcctgccttgagcgatcccgtgctcgcccgccggctgagagagaaccgctcactcgccatgtcccggctggacgaggtgatttccaagtacgccatgctccaggataaaagtgaggaaggcgagagaaagaaaagacgcgctagactgcagggtacatcatcccatagcgccgatacccctgaggctagtctagactcaggagaaggcccttcaggcatggcatctcagggatgtccatccgccagtagagccgaaaccgacgatgaggacgatgaagaaagcgacgaggaggaagaagaggaagaagaggaggaggaggaggaggccaccgactctgaagaagaagaggacttagaacaaatgcaagagggacaggaggacgacgaggaggaggatgaagaggaagaggccgcggctggcaaagatggagacaaatcgcccatgagttccctgcagattagtaatgagaagaatctcgagcccgggaaacagatctctagatcttccggggagcagcagaataaaggacggatcgtctcaccctccctgctctcagaggaaccacttgcaccaagcagtatagacgccgagtccaatggagaacagccagaggagctgactcttgaggaagaatctccagtgagccagctttttgagctggagatcgaggcactaccgcttgataccccctcgtccgtggagactgacatatcctcctctagaaaacagtccgaagagccatttaccactgtcctcgaaaacggcgcgggcatggtatcctctacatcgtttaacggtggcgtttctccgcacaattggggggactcaggtcccccttgtaagaaatctcgcaaggagaagaagcagacaggctccggtccactgggcaattcctacgtagagcgacagcgatctgtgcacgagaagaatggcaaaaagatatgcacattaccttcccccccatcccccctcgcatccttggcccccgtagccgactcgagcaccagagttgattcaccttctcacggcctggtgacctcttcgctctgcataccatctcccgcaagacttagccaaacgccccactcacagccgcctcgccccggtacatgcaagacctctgttgccacacagtgcgatcctgaagagatcatagtcctgtccgatagcgactag

SEQ ID NO: 185007 - DNA, 393 bp, synthetic construct
  misc_feature 1..393: note = Description of Artificial Sequence: Synthetic coding sequence
  source 1..393: mol_type = other DNA
atggccaccgccaacagcatcatcgtgctggacgacgacgacgaggatgaagccgctgcacagcctgggcccagccacccgctcccgaatgcagcttcccctggtgcggaagccccatcttcttctgagccacacggcgcaaggggcagcagttctagtggggggaagaaatgttacaagctggagaacgagaaattgtttgaagagttcctcgagctctgcaagatgcagactgctgatcaccccgaagtagtccccttcttatacaaccgccagcaaagagctcacagtctgttcctggcaagcgctgagttttgtaacatcctctcccgcgtcctttctagggctagatccaggccagccaagctctatgtatacatcaacgaattatag

SEQ ID NO: 185008 - DNA, 147 bp, synthetic construct
  misc_feature 1..147: note = Description of Artificial Sequence: Synthetic coding sequence
  source 1..147: mol_type = other DNA
atggccaccgccaacagcatcatcgtgctggacgacgacgacgaggatgaggctgcagcccagccagggccttctcatcccctgccgaatgcagcgtcacccggggccgaggcaccaagcagctcagaaccgcacggggctcggtag

SEQ ID NO: 185009 - DNA, 393 bp, synthetic construct
  misc_feature 1..393: note = Description of Artificial Sequence: Synthetic coding sequence
  source 1..393: mol_type = other DNA
atggccaccgccaacagcatcatcgtgctggacgacgacgacgaggatgaggccgccgcccagcctggtccatctcatccgttgccaaatgccgccagcccaggcgcggaggcgccgtcttcctctgagccgcacggggcacgcggctcctcgtcctccggcgggaaaaaatgttacaaacttgagaatgagaagcttttcgaggaattcctggaactgtgcaagatgcagaccgcagatcacccggaggttgttcctttcctctacaacaggcaacaacgcgcccacagtctgttcctggctagtgcagagttctgtaacattcttagcagagttctctcacgcgcaagaagccggcctgcaaagctgtatgtctatataaatgagctctag

SEQ ID NO: 185010 - DNA, 147 bp, synthetic construct
  misc_feature 1..147: note = Description of Artificial Sequence: Synthetic coding sequence
  source 1..147: mol_type = other DNA
atggccaccgccaacagcatcatcgtgctggacgacgacgacgaggatgaggccgctgctcaaccaggtccaagccaccccctaccaaacgctgcgtctcctggagcagaggccccttcttcaagcgagccacatggagcgagatag

SEQ ID NO: 185011 - DNA, 537 bp, synthetic construct
  misc_feature 1..537: note = Description of Artificial Sequence: Synthetic coding sequence
  source 1..537: mol_type = other DNA
atggccaccgccaacagcatcatcgtgctggacgacgacgacgaggacgaagcagctgcccagccaggccctagccatccgctacccaatgccgcttcacccggggccgaggctccgagctctagtgaaccgcacggcgctcgtggcagcagtagcagcggcggcaagaaatgttacaaactggagaatgagaaattattcgaggagtttctagagttgtgcaaaatgcaaacagccgatcatcccgaggtggtcccctttctgtataatcggcaacaacgcgcccactctctgtttttggcctctgctgagttttgcaatatcctgtcaagagtgctgtcacgggccagatcgagacctgctaagctgtacgtatatatcaatgagctgtgtacggtgctgaaagctcactctgctaagaaaaagctcaacctggcacctgctgctacaaccagtaatgagccaagcggaaacaacccgccaacgcacctcagtctggatcccacaaacgccgaaaataccgctagtcagagctag

SEQ ID NO: 185012 - DNA, 537 bp, synthetic construct
  misc_feature 1..537: note = Description of Artificial Sequence: Synthetic coding sequence
  source 1..537: mol_type = other DNA
atggccaccgccaacagcatcatcgtgctggacgacgacgacgaggacgaggctgccgcccagccaggcccaagtcaccccctaccaaacgctgcctctcccggggcggaagccccaagctcctccgaaccccatggcgcccggggcagttcttcctccggagggaagaagtgttacaaactggagaacgagaagcttttcgaggagttcctagagctctgtaaaatgcagaccgccgaccaccccgaggtcgtgcccttcctatacaatcggcaacaacgtgcacattctctgttcctagcctccgccgaattctgcaatattctgagtagggtgttgtcccgtgcccgaagtaggcccgccaaactctatgtgtatattaacgaactgtgcactgtgctgaaggcccactctgccaagaaaaagctgaacttggctccagccgccaccacatcaaacgaaccaagcgggaacaatccccctacccatctcagtttggaccccacgaatgcagagaacacggcctcccaatcatag

SEQ ID NO: 185013 - DNA, 2223 bp, synthetic construct
  misc_feature 1..2223: note = Description of Artificial Sequence: Synthetic coding sequence
  source 1..2223: mol_type = other DNA
atggccaccgccaacagcatcatcgtgctggacgacgacgacgaggacgaagcagcggcccaaccaggaccaagccaccccctcccgaatgcggccagccctggtgcagaagcaccgtcctctagtgagcctcatggtgcccgggggtcttcaagctcgggcggaaagaagtgctataagctagagaatgagaagctatttgaggaatttcttgagctatgtaaaatgcagactgccgaccaccccgaagtagtccctttcctgtacaaccgccagcagagagctcactcactcttcctggcctcggccgagttctgcaatattctttctcgagtgctctctagggctcggtcccgccccgcaaagctgtacgtgtacattaatgagctgtgcaccgttctgaaggcacactcagccaaaaaaaagctcaacctggcccctgccgcaacaaccagtaacgaaccttccggcaacaacccccccacccacctctctctggacccaactaacgccgagaatacggcgtctcagagtcctaggactagaggcagccgtcgacagattcagcgcctcgaacagctgttggccctttatgtcgcggaaattcgaaggctgcaagagaaagaacttgatctttccgaacttgacgatccggactctgcatatttgcaggaggctaggctcaagagaaagctcattaggctgtttggccgtctgtgcgaactgaaggactgttccagtctaaccgggagggttatagagcagcgtatcccttacagagggacgcgctatcctgaggttaataggcgcatcgagaggctgatcaataagcctggcccagatacgttccctgactatggcgacgtgctgagagcggtcgaaaaggctgcagctcgtcactcacttgggctgcctcggcagcagctgcagctgatggcacaagacgcctttagggacgtaggcattcgtctccaggagagaagacacctggatttgatctacaatttcgggtgccacctgacggatgactatcgccccggtgtagatccagctctctctgatcctgttcttgcacgaaggctgagagagaaccgcagtttggctatgtctcgccttgacgaagttatcagtaagtatgcgatgttgcaggacaaatcagaagaaggcgaaagaaaaaagcgccgggctcggctgcaggggacgagctcccatagcgcggacacgcccgaggcatcactcgacagtggtgagggcccgagtggcatggcaagtcaggggtgtcccagtgcctcaagagctgagacagatgacgaagacgatgaagaatcggatgaggaagaggaagaagaggaggaagaagaggaagaggaggccacggatagcgaggaagaagaggacctagagcagatgcaagagggccaggaagacgacgaagaagaggacgaggaggaagaggccgctgcggggaaagacggggataaaagcccgatgtcgtccctccaaatctcaaacgagaagaatctcgaacctggcaaacagatctcacgctcatcaggcgaacaacagaacaaaggtcgcatcgtctccccgtctctgctttctgaggagccactcgcaccctcctcaatcgacgctgaaagcaatggggagcagcctgaagagctgacccttgaagaagagagccccgtgtcccaactgttcgaattggagatagaagcactaccactagatacccctagcagcgtcgaaacagacatatctagcagtagaaagcagagcgaggaaccatttacaacagtgcttgagaacggggcaggcatggtcagttcgacctccttcaatggaggcgtcagcccacacaattggggtgactctgggcctccttgtaaaaagagccgtaaggaaaagaagcagactggttccggtccactggggaactcttatgtagaaagacagcggagcgtgcacgagaaaaacgggaaaaagatttgtactctgcctagtccaccctcccccttggcgagccttgccccagtcgcggattcatccaccagagtggatagcccatcacacggcctcgtcacaagctccctctgtatcccctcacctgcacgattaagtcaaacaccacattcacaaccaccgaggcccggcacttgcaagacaagcgtggccactcagtgtgacccagaggaaatcatcgttctgtccgactctgactag

SEQ ID NO: 185014 - DNA, 2223 bp, synthetic construct
  misc_feature 1..2223: note = Description of Artificial Sequence: Synthetic coding sequence
  source 1..2223: mol_type = other DNA
atggccaccgccaacagcatcatcgtgctggacgacgacgacgaggacgaggcagccgctcaacccggaccgagtcaccctctgcccaatgcagccagccccggcgctgaagctccctcctctagcgagcctcatggcgctagggggtcttcctccagcggcggcaagaaatgctacaagctggagaatgaaaaattatttgaggagttcctggagctgtgtaaaatgcagactgctgaccacccagaggtggtccctttcttgtacaacagacagcagagagctcacagcctgttcctggccagtgcagaattttgtaatattttgagtagggtcttgtctcgggcccggtcgaggccagcaaagctttacgtctacataaacgaattgtgcacagttctgaaagcgcactctgcaaaaaaaaagctcaatctagcaccagcagcaaccacttccaatgagccctcaggcaataacccccccacccacttgagccttgaccccactaatgcagagaacaccgcatcacaaagcccacgcacaagaggtagccggcgccagattcagcggcttgagcagctcttggctctctatgtcgccgagattaggcgcctgcaagaaaaggagctggatctgtctgagttagatgacccagactcagcctacttacaggaagcccgcctgaagcgtaagctcatccgcctcttcgggaggctgtgcgaactgaaggactgttccagcctgacgggccgggtgatcgagcagaggattccatacagaggcacccgataccccgaagtcaaccgaaggatcgaacggctgatcaacaagcctggtcccgatacgttcccggactatggggacgttctgcgcgcagtggagaaagccgctgcccgtcactctttaggcctgcctcgacagcagctccaactgatggctcaggacgccttccgggacgtgggcattaggcttcaggaacgcaggcatttggatttaatatataacttcggatgccatctgactgacgactacagaccgggggtggatcctgctctgagtgaccctgtgttggcccggagactgcgtgaaaatcgatcactcgctatgtcacggctcgatgaggttatctccaaatatgccatgctccaagataagagtgaggagggagagcgcaaaaagcggagagcccggttacagggcacatccagtcacagcgcagacactccggaggcatctctggacagtggggagggtcccagtggcatggctagccaggggtgcccttcagcaagtcgcgccgagacagatgatgaggacgatgaagagtcagatgaagaagaagaggaagaggaggaagaggaagaagaggaggcgaccgactcagaggaggaagaggatctcgaacagatgcaggagggccaagaagacgacgaagaagaagacgaggaagaagaagcggccgccggcaaggatggcgataagtcccctatgtcatccctgcagatctctaacgagaaaaacctcgagcctggcaagcagatctccagatcttccggtgaacagcagaataaggggcgcatcgtttccccatccctgctgtccgaggaacctttagctccctcttcaatagacgctgagagcaatggggagcaacccgaggagctcacactggaagaggaaagtcctgtcagccagctattcgaactggaaatagaggccctgccccttgacacccctagctccgtggagaccgatatctcgagtagtcgcaagcagtcagaggaaccctttaccacagtgctcgagaatggggctggaatggtgtcatccacctctttcaatggtggagtctccccacacaactggggagatagcgggccgccttgcaaaaaaagtagaaaagagaagaagcagacagggtccgggcctctgggcaatagctatgtggaaaggcagagatcggtccatgagaagaacggaaaaaagatttgtactctcccttctcccccatcaccactggcctctcttgctcctgtggctgatagttcaactagggttgactctccaagccatggactggtaaccagttctctgtgcattcccagtccagctaggctgagtcagaccccacattctcagcctcctcggcccgggacttgtaaaacctcagttgctactcagtgtgacccagaggagattatagtccttagcgattcagactag

SEQ ID NO: 185015 - DNA, 393 bp, synthetic construct
  misc_feature 1..393: note = Description of Artificial Sequence: Synthetic coding sequence
  source 1..393: mol_type = other DNA
atggccaccgccaacagcatcatcgtgctggacgacgacgacgaggatgaggccgcagcccagccaggcccatcacacccgctgcctaatgctgcaagtcccggcgccgaggctccatcatcctccgaacctcacggggcacgggggagttccagcagcggcggcaaaaagtgttataaacttgagaacgagaagttatttgaggaatttctagagctgtgtaagatgcagaccgccgaccatcccgaagtggtgccatttctctacaacagacagcaacgggcacattcactgttcctcgccagcgccgaattttgcaatattctgagtagagtactatcgcgcgctcgatcccgcccagctaagctgtacgtgtacatcaatgagctgtag

SEQ ID NO: 185016 - DNA, 537 bp, synthetic construct
  misc_feature 1..537: note = Description of Artificial Sequence: Synthetic coding sequence
  source 1..537: mol_type = other DNA
atggccaccgccaacagcatcatcgtgctggacgacgacgacgaggacgaagcggctgcccagcctgggccctctcaccctcttcccaacgcagcttcaccaggagctgaggcccctagttcctctgaacctcacggtgctcgcggctctagcagtagtggcggtaaaaaatgttacaagctggagaatgagaaattattcgaagagttcttggaactctgcaagatgcagaccgccgatcaccccgaagttgtgccattcttatataacagacagcaaagagctcatagcctctttctcgcctctgcggagttttgtaatatactctcccgagtcctgagccgcgcacgatctagaccagcgaaactgtatgtctacataaatgagctgtgtaccgtactgaaggcccattctgctaagaagaagctaaatctcgctcctgcagcaacaacatctaatgaacccagcggtaataacccacccactcaccttagcctggatccaaccaatgcggagaatacggcgtcgcagagctag

SEQ ID NO: 185017 - DNA, 2223 bp, synthetic construct
  misc_feature 1..2223: note = Description of Artificial Sequence: Synthetic coding sequence
  source 1..2223: mol_type = other DNA
atggccaccgccaacagcatcatcgtgctggacgacgacgacgaggatgaagctgctgctcaaccaggtcccagccaccctctccctaacgccgcgagtccaggggcggaggctccctcctcttctgagccccatggagcccgggggtcttcttcaagtggcgggaaaaagtgttataaactggagaacgagaaactcttcgaggaatttctggagttgtgcaagatgcaaacagccgaccaccccgaagtggtgccgttcctgtacaaccgccagcaacgtgcacactccctttttttggcatcggctgagttctgcaacatacttagccgcgtcctctcacgagccaggtcaagacccgccaaactctatgtgtatattaatgagctctgtaccgtcttaaaagcccacagcgcaaagaagaaacttaatctcgctcctgcagccaccacttcgaacgagccctcaggcaataaccccccaacccacctgagcctcgatccaacaaatgccgagaacacagcgtcccagtctcctcgtacccgggggtctaggaggcagatccagcgactggagcaactactcgcattgtatgtcgcagagattcgcagacttcaagagaaggagctggatctgtccgagctggacgacccggactctgcataccttcaggaggccagattaaagaggaaattgatcaggctgttcgggagactatgcgagctcaaagactgtagctctctgacaggacgggtgatagaacaacgcataccctacagaggtactaggtatcctgaggtgaaccgaagaatagagaggctgatcaacaaaccaggaccagatactttcccagattacggagacgttctgcgggccgtagaaaaggccgctgctagacattccctcggactgcctcgacagcagctccagcttatggcccaagatgcattccgcgatgttggtatccggctgcaggaacgccgacatctcgatttgatttacaacttcggatgccacctgacagacgactacagaccaggcgttgatcccgccctctccgatcccgtgctggcacgacgcctcagagaaaaccggtctctagccatgagtaggctggacgaggtcatttccaagtatgccatgctgcaagataagtctgaagaaggagaaagaaaaaagcgcagggccagactgcaaggtacaagcagtcactctgctgatacacccgaagcctccctcgacagtggcgagggaccctcaggtatggcgagccaagggtgtccctcagcatccagagctgaaaccgacgatgaggacgacgaggaaagcgacgaggaggaagaggaggaagaagaagaggaagaggaggaagccacagactccgaggaggaggaggatctcgagcagatgcaagaaggtcaggaggacgacgaggaagaggacgaagaggaagaagctgccgctggtaaagacggagataagtctccgatgtccagcttgcagatttccaacgagaagaatctcgaaccggggaaacagatcagtcgtagcagtggtgagcagcaaaataagggaagaatcgtttcccccagccttctttccgaggaacctctggcgccctcgagcattgatgccgagtctaatggagagcagcctgaggagctcactctggaggaggaatccccggttagccagctattcgagctggagattgaagcactgccgttagacacaccttcttctgttgagactgatatctcttcgagccgcaagcagtcagaagagccatttacgaccgtgcttgaaaacggggccggcatggttagttccacctcatttaatggcggtgtgagcccccataattggggagattccggccccccttgcaaaaagagccgaaaggagaagaaacagacaggctccgggcctctgggcaattcctacgtggaaaggcagcgatccgtccatgagaaaaacggaaagaaaatctgtactttgccaagccctccaagccctcttgccagcctggcccccgtcgcggactcaagcacgcgagtggacagtccatcccacggcctggttacttcctccctctgtattcctagtccagcgaggctgtcgcagaccccccactcgcaaccaccccgcccgggtacctgcaagacgtctgtcgctacccagtgcgatcccgaagagatcatcgtgctcagtgattcagattag

SEQ ID NO: 185018 - DNA, 147 bp, synthetic construct
  misc_feature 1..147: note = Description of Artificial Sequence: Synthetic coding sequence
  source 1..147: mol_type = other DNA
atggccaccgccaacagcatcatcgtgctggacgacgacgacgaggacgaggcggctgcccagcccggccctagtcacccacttccaaatgcagcgtcacccggggctgaggccccctctagctcagagccccatggagctaggtag

SEQ ID NO: 185019 - DNA, 393 bp, synthetic construct
  misc_feature 1..393: note = Description of Artificial Sequence: Synthetic coding sequence
  source 1..393: mol_type = other DNA
atggccaccgccaacagcatcatcgtgctggacgacgacgacgaggacgaagccgccgcccagcctggccccagccaccctttacctaacgctgctagcccaggagcagaggccccttctagctcagaacctcacggagccagaggatcaagtagcagcggcggcaagaaatgctacaagttagagaacgagaagctgttcgaagaattccttgaactatgcaagatgcaaacagcagaccaccccgaagtggtgcctttcctgtataacaggcaacagcgcgcccactctttgttcctggcttccgctgagttttgcaacatcctctccagagttctgtcccgggcgagatcgcggcccgccaagctctatgtctacattaatgagctgtag

SEQ ID NO: 185020 - DNA, 537 bp, synthetic construct
  misc_feature 1..537: note = Description of Artificial Sequence: Synthetic coding sequence
  source 1..537: mol_type = other DNA
atggccaccgccaacagcatcatcgtgctggacgacgacgacgaggacgaggccgcggcccagccaggaccttcacacccattacctaacgcggcaagtcccggagctgaggctccatcgagctcagaaccacacggggcgagggggagtagtagctctggaggcaagaagtgctacaaactggaaaacgagaaactgttcgaagaatttctggagctgtgtaaaatgcagaccgctgatcaccctgaggttgtcccgttcctctataaccgccagcagcgggcccactcactgtttctggcctccgctgaattttgtaacatactgagcagagtactatccagagccagatctagacccgcaaagttgtatgtgtacataaatgaactgtgtactgtcctcaaagctcatagtgcaaagaaaaaactgaatctcgcccccgctgccaccaccagcaatgagccttcaggcaacaaccctccaacacacttgtccctggacccaaccaacgccgaaaacactgccagtcagagctag

SEQ ID NO: 185021 - DNA, 2223 bp, synthetic construct
  misc_feature 1..2223: note = Description of Artificial Sequence: Synthetic coding sequence
  source 1..2223: mol_type = other DNA
atggccaccgccaacagcatcatcgtgctggacgacgacgacgaggacgaggcagccgcccaaccaggcccatctcacccactgccaaatgccgcatctcccggcgctgaagccccgtcaagctctgagccccacggcgccagaggttcctctagttccggaggcaagaagtgttacaaactggaaaacgaaaaactcttcgaagagttcctggagttatgtaaaatgcagactgccgaccaccccgaggtggtccccttcctctataaccggcagcagagagctcatagtctgttcctggcatccgccgaattttgcaatatcctctcgcgagtgctgtcccgggccaggtcacgcccggccaaactctatgtttacattaatgagctgtgtacagtactgaaggcccactcagccaagaagaaattgaacctggcccctgcagccaccacatcgaatgagccatctggaaataatcccccaacgcatctgtccctcgatcccactaacgctgaaaataccgcgagccagtcacccaggacacggggatccaggcggcagatacaacgcctggaacaactgcttgcactctacgttgcagagatacggcggctgcaggaaaaagaactggatctgtctgagctggacgatccggactctgcttacctccaagaggccagattgaagaggaaacttataaggctcttcggccggctttgcgagttgaaggattgttccagcctgaccgggagggtgatcgaacagcggatcccctatcgaggtactcgttaccccgaggttaatagacgtatcgaaagactgattaacaaaccagggccggatacttttcccgattacggggacgttctgagagcagttgaaaaggctgccgcccgccatagtctaggacttccccgccagcaactacaactgatggcccaggacgcctttagagacgttggtatcagactgcaggaaagaagacatctggatctaatatacaacttcggctgccatctcacagatgattacaggcctggagtggatcccgctctcagtgatccagtgcttgccaggcgcctgcgcgaaaaccgcagtttagcaatgagccgccttgatgaggttataagtaagtacgccatgctgcaggataagtccgaagagggcgaacggaagaagaggcgcgcccggctgcaaggaacctcaagccattcagctgacacccctgaggctagcctcgatagcggggagggaccatctggcatggcctcacaaggatgcccaagtgcaagccgtgccgagaccgatgatgaagatgacgaggaatctgatgaggaagaggaggaggaggaagaagaagaagaggaggaggctactgactccgaagaggaggaggatctagaacaaatgcaagaagggcaagaggacgatgaggaagaggatgaagaggaggaggccgcagcaggcaaagatggcgacaagtctcctatgagttccctgcagatctctaacgaaaagaatcttgagcctggtaaacagatatcccggagctctggagaacaacagaacaagggccgcatcgtttccccctctctgctgtccgaggaacctctcgctccctcatcgatcgacgctgagtcaaacggagagcaacctgaggagctgaccctggaggaagagtctccggtctcccagctgtttgagttagaaatcgaggctttgcccctggatacccccagttccgtggagactgatatttcctcaagtcggaaacagtcagaggaaccgttcacgaccgtgttggagaatggcgcgggcatggtctccagtacaagttttaatggcggcgtgtcccctcataactggggggatagcggtcccccctgtaagaagtctaggaaagagaaaaaacagaccgggagcggtccactggggaatagttacgtagagcgacaacgatccgttcatgagaagaacgggaagaagatatgcaccctcccctcgcccccgagcccccttgcaagtttggcaccagtcgctgacagcagcacgcgcgtggattccccctcacatggattggtaacttcttccctgtgcatccccagtcccgcccggctctctcaaactccgcattcccagccccccaggccagggacttgtaagacttccgtggccacccagtgtgacccagaggaaatcattgtcttaagtgattcagactag

SEQ ID NO: 185022 - DNA, 147 bp, synthetic construct
  misc_feature 1..147: note = Description of Artificial Sequence: Synthetic coding sequence
  source 1..147: mol_type = other DNA
atggccaccgccaacagcatcatcgtgctggacgacgacgacgaggatgaggccgccgcccagcctggaccttcccacccattaccaaacgctgcctctccaggggcggaggcaccctctagcagcgagcctcatggtgcacgatag

SEQ ID NO: 185023 - DNA, 1998 bp, synthetic construct
  misc_feature 1..1998: note = Description of Artificial Sequence: Synthetic coding sequence
  source 1..1998: mol_type = other DNA
atgcagaccgccgaccaccccgaggtggtgcccttcctgtacaacagacagcagcgtgcacacagtctgttcctcgcctcggcagaattctgcaacatcttatctagagtactcagccgggccagatccaggcccgcgaaactctatgtgtatatcaatgaactgtgtacggtgcttaaagcacactctgcaaagaaaaagctgaacctggccccagcagcaacaactagcaatgaaccatcaggtaacaaccctcccactcacttaagcctcgaccccaccaacgctgaaaacaccgctagccagtcacctcgaacgaggggaagcagaagacagattcagcgactagaacagttgctggcactgtatgttgccgagatccgccgcttacaagagaaggagctggatctgtctgagctggacgatcctgatagcgcttacctgcaggaggcaagacttaagcgcaagctgatcaggttgttcgggaggctgtgtgagctcaaggactgttctagtctgacaggcagagtaattgaacagcggatcccttaccgcggtaccagatatcctgaggtcaaccgccgtatcgagcgattgatcaacaaacctggccctgatacattccctgattacggcgatgtgctgagagccgtggaaaaggccgctgctagacatagtctcgggttgcctcgccagcagttacagttgatggcccaggacgcctttagggacgtgggaattcgactccaggagcgaagacatctggacctgatttataacttcggatgtcatctgactgatgactacaggcctggagtggacccagccctaagcgacccagtgctggctcgccggctacgcgagaacagaagcctggccatgtctcgcttggatgaagtaatttcgaaatacgcgatgttacaagataagtccgaagagggggagcggaagaagcggagggccagactccagggaacctcttctcattcagcagacacaccagaggctagtctggatagtggagagggtccaagtggtatggccagtcaaggatgcccctcagcctcccgagctgaaacagatgatgaggatgacgaagaatcagatgaagaggaggaggaggaggaggaggaggaggaggaggaagcaacagactccgaagaggaggaggatctggaacagatgcaagagggacaagaggatgatgaggaagaggacgaagaggaggaagctgctgccggtaaggacggtgacaaatcaccaatgagcagtcttcaaatcagcaatgagaagaacctcgagcctgggaagcaaatttctagatcatccggcgaacagcagaataaggggcgcatcgtcagcccatcactgctttccgaggagcctttggctccctccagcatcgacgctgaatctaatggagaacagcctgaggaattaacactcgaggaggagtcgcctgtgagtcagttatttgagctcgagatcgaggctttgcccttggacacaccatcgtccgtggaaacagacattagcagcagcagaaaacagagcgaagagccattcacaacggttctggagaatggggccggcatggtttccagtaccagttttaatgggggggttagtccccataactggggagattctgggcccccctgcaagaaatcgcggaaggaaaaaaaacaaacaggaagtggaccactgggtaattcttacgtggagcgccagcggagcgtgcatgaaaagaacggtaagaaaatttgcactttaccctcccccccgagcccccttgccagcctcgcgccagtagcagactccagcactagagttgatagtccctctcatgggcttgtcacttcaagtttgtgcatcccgtcccctgcaaggctttcgcagaccccccatagtcagcctcccaggccagggacttgtaaaacttccgtcgccacacaatgtgaccccgaagagatcatcgttctgtcagattctgattag

SEQ ID NO: 185024 - DNA, 1998 bp, synthetic construct
  misc_feature 1..1998: note = Description of Artificial Sequence: Synthetic coding sequence
  source 1..1998: mol_type = other DNA
atgcagaccgccgaccaccccgaggtggtgcccttcctgtacaaccggcagcaaagagcgcacagcctgttcttggcatccgcagagttctgcaacatcctgtctcgggtgctctcaagagcacgctcgagacccgcaaagctatatgtgtatatcaacgaactttgtaccgttctgaaggcccacagcgcaaaaaagaaactgaacctggccccagcagccacaacaagtaacgaaccttcaggaaacaatccccccactcatcttagtctggatccgactaatgcggaaaataccgcatcacagtctcccaggacccgaggtagtcgtaggcaaatccagaggctggaacaattacttgccctctatgtggccgaaattcgacgccttcaagagaaggaactcgaccttagtgaacttgatgaccctgactccgcctacctgcaagaagcccgcctcaaacgaaagttgatcagactgttcgggcgactctgtgagcttaaagattgttccagcctcacgggccgcgtgatagagcagcgcatcccctatcgagggacacgttacccagaggtgaaccgcagaattgagcggctgatcaataagcccggcccggataccttcccggattacggggatgtgctgcgggcagttgagaaggccgcggcacgacatagcctcggcctcccccggcaacagctgcagctgatggctcaggacgcctttagagacgtcgggatacgtttacaggagagacggcacctggacctgatttataactttggctgccatcttaccgacgactatcgcccaggcgtagaccctgctctttcagatccagtcctcgccaggagattgcgtgagaaccgctctttggctatgagccggttagacgaagtgatctcaaagtacgccatgcttcaagataaatccgaggagggggagagaaaaaagcggagagcgcgtctgcagggcacctcgtcacacagtgcagacacccccgaggcatctctcgatagcggggaaggccccagtggcatggcgtctcagggttgtccaagcgccagtcgagccgagactgatgacgaagatgacgaagagtcggacgaggaggaagaagaggaggaagaggaggaggaggaagaagccacagactccgaggaggaggaagacctggagcagatgcaagaaggacaggaggatgacgaggaggaggatgaagaggaggaggccgcagcaggcaaggacggggacaaatctcctatgtcttcgttacaaataagcaatgagaaaaatctggagcccggtaagcagatctccagatcttctggggagcagcagaataagggccggatcgtcagcccctcacttctctcagaagagccgctggctccaagcagcattgatgccgaaagtaacggtgagcagcccgaagagctgaccctggaagaggagtcccccgtgtcccagctcttcgagctcgaaattgaggcactgcctctggatacgccatcatccgtggaaaccgacattagctcctcacgaaaacaatctgaagagcctttcacaaccgtgctcgagaatggggctggaatggtgagctctaccagctttaatggcggcgtgagtccccataattggggcgatagcgggcccccttgtaagaaaagccgaaaggagaaaaaacagacaggaagcggaccactcgggaattcctatgttgaacgccagagatctgtccacgaaaagaacggtaaaaagatctgtacgctcccgtctccccctagtcccctggcttcccttgctcctgtagctgacagctctactagggttgattcaccatcacacggacttgttactagctccctttgtatcccatctcccgctaggctgagtcagaccccgcactcccagccacctcgccctggcacttgcaagacatccgtggctacacaatgcgatccagaagagatcattgtgctgtcagattctgattag

SEQ ID NO: 185025 - DNA, 1998 bp, synthetic construct
  misc_feature 1..1998: note = Description of Artificial Sequence: Synthetic coding sequence
  source 1..1998: mol_type = other DNA
atgcagaccgccgaccaccccgaggtggtgcccttcctgtacaacagacagcagcgagcccactcgctgttcttggccagtgcagagttttgcaacatcctatcccgcgtcctgtctcgcgctaggagcagacctgccaagctgtacgtttacattaatgagctttgtactgtcctcaaagctcacagtgctaaaaaaaaactgaatcttgccccagctgccactaccagtaacgagccatctggcaataatcccccaactcatctgtcgctcgatccaaccaacgcagagaatactgccagccagtcgcccaggacacggggatcaagacggcagatccagagactggagcagctgctagctttgtatgttgccgagatccgtcgcctccaggaaaaggagcttgaccttagcgaactggatgaccccgactccgcatatctgcaagaagcacgcctgaagcggaagctcatcaggcttttcggccgtttgtgcgaattgaaagactgttcaagcctgactggacgagtcattgaacagaggattccctaccgggggacacgctatccagaagttaaccggcggattgagaggcttattaataaaccaggcccagacacgtttcccgactatggggacgtgctgcgagccgtggaaaaggctgctgcaaggcactccctgggtctccctagacaacagctacaacttatggcccaggatgcctttagggacgtcgggatacggttgcaggagaggagacatctcgaccttatctacaactttggatgccaccttacggacgattaccgacccggtgtggatccagcactttccgaccccgtgctcgcccgacggctacgcgaaaataggtccttggccatgagtagactggatgaggtgatctctaagtatgccatgctgcaagacaaatccgaagagggggagcgcaagaagcgcagagcgaggctgcagggcacaagtagccactcagccgacactcctgaagcgagcctagactctggcgaggggcctagcggcatggcttctcagggatgtccatccgcctctagagcagagacagacgacgaggacgatgaggagagcgatgaggaagaggaggaagaggaggaagaagaggaggaagaggccacagactccgaagaggaggaggaccttgaacaaatgcaggaagggcaagaagatgacgaggaagaggacgaggaagaggaggctgcagcgggaaaagatggggacaaatctcccatgtccagtctgcagatttccaacgaaaaaaaccttgagccaggcaagcagatctctcgctcctccggcgagcaacaaaacaaaggccgcatcgtttcaccatcgctcctctctgaagagccgctggccccgtcaagtattgatgcagagagcaacggggagcagcccgaggaactcacccttgaggaggagagccccgtgagtcagctgtttgagttagaaattgaggcgttacctttagacaccccctctagcgtggagacggatatttctagcagtcgcaaacagagcgaagagccttttacgacggtgctagagaatggtgccggaatggtgtctagcaccagctttaatggaggggttagtccacacaattggggagactcaggtcccccatgcaagaagagtaggaaagagaagaaacaaactgggtcaggtcccttaggcaactcatacgtcgaaagacagcgatccgtacacgagaagaatggcaagaagatctgtactctgccatctccaccttcaccgctggcaagcctggctccggtcgccgactcctctacgcgcgtcgattctccttctcatggcctggtaacttcctctctgtgtataccctcccctgccaggttgtctcagactccacattcccagccacctaggcccgggacttgtaagacctcggtggctacccagtgcgatcctgaggaaatcattgtgctgtctgattcagattag

SEQ ID NO: 185026 - DNA, 1998 bp, synthetic construct
  misc_feature 1..1998: note = Description of Artificial Sequence: Synthetic coding sequence
  source 1..1998: mol_type = other DNA
atgcagaccgccgaccaccccgaggtggtgcccttcctgtacaaccgtcaacagagagcccactccctgttcctcgcttcggcggagttctgtaacatcttgagccgagtcctgtccagggctcggtcccgccccgcgaaactgtatgtgtacataaacgaactctgtactgttctgaaggctcactcagctaagaaaaaactgaacctcgcccccgcggccacgacttctaatgagccgagtggcaataatcctccaactcacttgagtctcgaccccaccaacgcagaaaacacggcctcccagtctcctagaactagagggtcccgccgccaaatacagcgtctcgagcagctgcttgccctgtacgtcgcagaaatcaggcgtcttcaggaaaaagagttagacctttccgagctcgacgacccagattccgcctacctgcaggaagcaagactgaagagaaaactcatcaggttatttgggagattgtgtgaactaaaggactgttcatcactcacagggagggtgattgaacagaggataccataccgcgggactcgctacccagaagtaaacagacggattgaaaggctcattaataagcctggtcctgacacattccctgactacggtgatgttctccgtgccgtggaaaaggccgctgcacgccactcacttgggctgcctcgacaacagctgcaactgatggctcaagacgcgtttagagatgtcgggataagactccaggaacgacgccatttggatctcatttataactttggttgtcatctcaccgatgactatcggcctggggtcgatcccgcccttagcgatcctgtgctcgcacgcaggctaagggagaatcgatctttggctatgagccgactcgatgaagtcatttctaaatacgccatgctccaggataagagtgaggagggggagaggaagaaacggagggccagactgcagggaacctcttcccacagcgccgacacccccgaggcaagcctggacagtggcgaaggccccagtggtatggcatctcagggatgcccaagcgcaagccgcgcggaaacggacgacgaggacgatgaagagagcgacgaggaagaggaagaagaagaagaggaagaagaggaagaagcaacagattccgaagaagaggaggatcttgaacagatgcaggagggtcaggaagatgatgaggaggaggatgaggaggaggaagcagccgcaggcaaggatggcgataaaagccctatgagttctctccaaatctctaacgagaaaaatctagaaccgggaaaacagatctctcggtcatccggcgagcagcaaaacaagggcaggattgtgagcccctccttactttcagaagaacctctggctccttcttcaattgacgcagaatcaaacggcgaacagccagaggagttaacattagaagaggagtcaccagtgtctcagctgttcgagctcgaaatcgaagcactccctctggacacccccagctctgtcgagactgacatttcctcttcccgtaaacagtccgaggagcccttcaccactgtccttgaaaatggcgctggcatggtgtcaagtacctcctttaatggtggcgtctcgccacacaactggggggacagcggacctccttgcaaaaaaagccggaaggaaaagaaacaaacaggaagtggacctttagggaactcatacgttgaacggcagagatctgtccatgagaaaaatggtaaaaagatctgtacactccctagccccccctcccccctagcttcactggctcctgttgcggacagttctacacgtgtggatagtccttctcacggattagtgacctcatctctctgtattccttctccggctcggctgtctcagaccccacattctcaacctccacgacccggaacttgcaaaacttccgtggctacccagtgcgaccctgaagaaattatcgtcctcagcgacagcgattag

SEQ ID NO: 185027 - DNA, 1080 bp, synthetic construct
  misc_feature 1..1080: note = Description of Artificial Sequence: Synthetic coding sequence
  source 1..1080: mol_type = other DNA
atgaaggccaccatcatcctgctgctgctggcccaggtgagctgggcagggccattccagcagaggggtctcttcgatttcatgctggaggacgaagcttctggaattgggcctgaggttccagatgatcgggacttcgaacccagcttgggacctgtgtgcccattccgatgtcagtgccatttacgcgttgtgcaatgcagcgacctaggcctcgataaggtccctaaggatctgccccctgataccactctgttagatttacagaataacaaaattacagagataaaagacggcgatttcaaaaatctcaaaaatctgcatgctctgatcctggtcaataacaaaatttctaaagtgtctcccggcgctttcactcctttggtaaagctcgaacggctctatctctccaagaaccagttgaaagagttgcccgaaaagatgcccaagacacttcaggagttgcgggcccacgaaaatgaaattactaaagtcagaaaggtcacctttaatggcctgaatcagatgatcgtgatcgaattaggtaccaaccccctaaagagcagcggcatagaaaatggagccttccaagggatgaaaaagctgagttacatccgcatcgccgatacaaatattacaagtataccacaagggttgccccccagtttgacagagctccatttagacgggaacaagatctcgcgggtggatgccgcaagcctgaaaggactgaataacttagcaaagctcggtctttcttttaatagtatctctgccgtggacaatgggtcactggccaacaccccacacttacgtgagctgcacctggataataataagctgactcgggtacctggaggcctggccgagcacaagtacattcaggtggtgtatcttcataacaataacatatccgtggtaggttctagcgatttttgcccaccagggcacaacacaaaaaaggcttcttactccggagtttccctattctccaatccggtccagtattgggaaatccagccttccacattcaggtgcgtgtacgtccgcagcgcaatacagctcggcaactataagtag

SEQ ID NO: 185028 - DNA, 7092 bp, synthetic construct
  misc_feature 1..7092: note = Description of Artificial Sequence: Synthetic coding sequence
  source 1..7092: mol_type = other DNA
atgcccgtgctgggcgtggccagcaagctgcggcagcccgccgtgggctccaagcccgtccacaccgcactccccattccaaatctgggaacaaccggctcacagcattgctcatctcgcccgttggagctgacagagacagaatcttcgatgctgagctgccaacttgctctgaaatccacctgtgagttcggagaaaaaaagcctctgcaggggaaagccaaggagaaggaggatagcaaaatttatacagactgggcaaaccactacctggccaaaagcggacacaagagactaattaaagatctccagcaggacatcgcagacggggtcctcctagcagaaatcatccagatcatcgccaacgaaaaagtagaggacataaatggctgtccgcgcagccagtcacagatgatcgagaacgtggacgtctgccttagtttcctggctgccagaggggtgaatgtgcagggcctcagtgccgaagaaattaggaacggaaatctgaaggcaatacttggactattcttctctctgtccaggtacaagcagcaacagcatcatcagcagcagtactaccaatccctcgtggagctgcaacagagagtgacccatgctagcccaccctctgaagcatcccaggccaaaacgcagcaggacatgcagtcatccctggctgcaagatacgccacccaatcgaaccattctggaattgctacaagccaaaagaaacccacacgtttgccaggaccatcccgagtcccagcagcgggtagctccagcaaagtccagggagcttcaaatctgaatagaagatctcaaagcttcaatagtatcgacaaaaataaaccacctaattatgccaatggcaacgagaaagattcatccaaggggcctcagtcatcaagcggcgtcaatggaaatgtgcagccaccttcaacagccggacaacctccggcctcagctattccttccccttccgcctccaaaccatggcgctccaaaagcatgaacgtgaaacacagtgccacctctacgatgttgaccgttaaacagagctcgacagccacctccccaaccccttcgagcgatcgcctgaaaccacctgtcagcgagggggtgaagacagccccctccggccaaaaatctatgctggagaaatttaagctggttaacgcccgaacggctttgcgcccccctcagcctccttcatcagggccctcggatggcggtaaagatgacgatgccttctccgagtccggcgagatggaggggttcaatagcggtttgaattccggggggagcactaatagctcgcctaaggtgtcccccaagttagctcctcccaaggcggggtctaagaatctgtctaacaaaaagtcactactccaacccaaagagaaggaggaaaagaaccgcgataaaaacaaggtctgtacagagaagcctgtgaaggaagaaaaagatcaggtcacagagatggcaccaaagaagacaagcaagattgcctctctgatcccaaaaggtagtaagaccacggccgcgaagaaagagagcctgattccctcttctagcgggattccaaagccaggttcaaaagtgccaacagtcaaacaaaccatctcgccagggtccactgcttctaaggaatctgaaaagtttagaaccacaaaaggcagtcccagtcaaagtttgagcaagcccatcacgatggagaaggcaagcgcttctagctgccccgctcctctcgaaggtcgcgaagccggacaagcttccccaagcggaagctgtactatgaccgttgctcaaagctccggccagtctaccgggaacggcgcagtgcaattaccccaacaacaacaacatagccacccaaataccgcaaccgtggcaccctttatatatcgagcccattccgaaaacgagggcactgccttgccttccgccgacagctgtaccagcccaacgaagatggacctgagctactctaaaaccgcaaaacagtgcttagaagaaatatcgggggaagacccagagacacgcaggatgcgcaccgtaaagaatatcgccgacctccggcaaaatttggaggaaacaatgtcctccctgcgcggcactcaaatatcccattccaccctggagaccacattcgactccacagtcacgacggaggtaaatggcagaaccatacctaatctgacctcccggccaacgccgatgacctggcgcttaggtcaggcttgcccccggctccaagcaggcgatgcaccatctttgggcgccggctatccacggagcggcacaagtcgattcatacataccgatccctcacgtttcatgtacaccacccctctccggagggctgccgtctcccgactcggcaatatgtcccagattgacatgtctgaaaaggcctcttctgacctggacatgtccagcgaagtcgacgtgggcggttatatgtcagacggcgacatcctgggaaagtccctacgtaccgacgacattaactccggttatatgacagatggtggactgaacctctataccaggagtctgaatagaattcccgacactgctaccagccgcgatatcatccaacgaggcgtacacgacgtcaccgtggatgctgactcctgggatgattccagctcagtaagtagcggcctaagcgacaccttggacaacatctcaactgatgacctgaatactacttcttcagtgagctcttactcgaacatcactgttcccagcagaaagaatacacagttgcgcactgacagtgagaaaagaagtaccacagacgaaacttgggactcgcccgaggaactgaagaaacccgaagaagatttcgacagccacggcgacgctggcggaaagtggaaaaccgtatcctcgggcctgccagaggatcccgagaaagccgggcagaaagctagcctttcagtgtctcagacgggctcctggagaaggggcatgtctgctcagggcggcgccccaagtagacagaaggccgggactagcgcactgaagacacctgggaaaacggatgatgcgaaagcttccgagaagggcaaggccccccttaaaggtagtagcctgcagcggtcgcctagtgatgccggtaagtccagcggagatgaagggaagaagcctccatccgggataggaaggtccacagccacatcctccttcggattcaagaagccatccggagtaggcagtagcgccatgattacgagcagcggcgcgacaatcacttccggtagcgctaccttggggaaaatccctaagtcagccgccatcggcggcaaatccaatgcagggcgcaaaacaagcctcgacggttcacagaatcaggatgatgtcgtgctgcacgttagctctaaaacaactcttcagtataggagcctgccacgaccatctaaaagctcaaccagcgggattcctggccggggcggtcataggtctagtacgagcagtatcgattccaacgtgtcttccaaatcggccggcgcaaccacaagcaaactgcgtgagcctaccaagattgggtcaggtcggagtagccccgttacagtcaaccagacagataaagagaaggaaaaagtagcagtttccgactccgagtcagtgagcctttctgggtctccaaagagctcccctacatcagccagcgcctgtggtgcacagggactgagacagccaggttcaaagtaccctgacatcgcgagcccaacatttcgcaggttgttcggtgcaaaagccggggggaagtccgccagcgccccaaatacagaaggtgtgaagtcttccagtgttatgccctcccctagcaccacattggctcgacagggatccctcgagtctccgtcatctggcactggcagcatgggctccgccgggggtctgagcggatcttcctcaccattgttcaacaaaccatctgacctgaccaccgatgtgatatcactgtcccatagcctggcgtcgtccccagcttcggtccattcgttcacatctggcggcttagtgtgggctgccaacatgtcgagctcttcagcgggctccaaagataccccatcctaccagtcaatgaccagcctgcacactagcagcgaatcgatcgatctgcccctttcccatcacgggtcactctccgggctcaccaccggaacgcacgaggttcagtctctcctgatgcgtaccgggagcgtacggtccacactctcggaaagcatgcagctcgaccggaacactctgcctaagaaagggttgcgctacacgccatctagtaggcaggccaatcaggaggaaggaaaagagtggctgaggagccactctaccggtgggctccaggacaccgggaaccaaagccctctcgtgtccccctccgccatgagcagttccgctgccggcaagtatcatttctctaatctggtgtcacccacaaacctatcccagtttaacctgcctggaccatctatgatgcgctcaaacagtatcccggcccaagattcctcatttgacctctatgatgactcacagctgtgtggatccgccacaagtctggaggaacgaccgcgagccatctcacatagtggcagtttcagggactcgatggaagaagtccatggatctagtctctcccttgtgtcctcaacaagtagtctatattcaacagctgaggccgggggcagcctggagcagattcacaagctccggcgggagctggttgcttcccaagagaaagtggcgactttgacatcccagctcagcgccaatgcgcacctcgtcgcagcctttgagaagagtttgggaaacatgactggccgcttgcagtccctgactatgacagccgagcagaaggaatctgaactgatagaactcagggaaacaattgaaatgctgaaggcacaaaactctgctgctcaggctgccatacagggggcactgaatgggccggaccatccaccgaaagacctaagaatacggcgccagcactctagtgaatccgtgagcagcattaactctgcgacctcacacagctcaatcggaagtggaaacgacgccgactctaaaaaaaagaaaaaaaagaattgggtgaatagccggggtagtgagcttcgcagttcatttaaacaggcattcggtaaaaaaaagtcgaccaagcccccaagctctcacagcgatattgaggagttaaccgatagcagcctccccgcgagcccaaaactgccacacaacgctggggattgcgggtcagcatctatgaagccatctcaaagtgcctctgccatttgtgagtgcaccgaagctgaagcagagatcattctgcagctcaagtccgaactcagagaaaaggaattaaaactgacagacatccgactggaggcgctctctagcgcgcatcacctggaccaaataagggaagccatgaaccgtatgcagaacgaaattgaaattttaaaagccgaaaatgaccgactgaaggccgagactggcaacactgccaaaccaactcgacctccgtccgagtcttctagcagtaccagcagcagttccagccgacaatctctcggcttaagcttaaacaacttgaacataaccgaggcggtgtcaagcgacattctgctagatgacgctggagatgctactgggcacaaggacggtcggagcgtgaagatcatcgtgtccattagcaaaggttatgggcgggctaaagatcaaaaaagtcaggcatacctcatcggatctatcggagtatctggcaagacaaaatgggatgtcctcgacggggttatacgacggctgtttaaggaatatgtatttagaatcgacacatctacctctctgggactgtcgagcgattgcatcgcctcttactgcatcggcgacctcatcagaagtcacaacctagaggtgccggaacttctgccttgcgggtatctggtaggggacaacaacatcattaccgttaatctaaaaggcgtcgaggagaacagccttgattcttttgtattcgacaccctgattccgaagccaattacacaaaggtatttcaatttactgatggagcaccataggatcatcctgagtgggccgtccggcactggtaagacttatttggcaaataagctcgctgagtatgttattactaaatccggccggaaaaaaaccgaagacgcgatagctacattcaacgtcgaccacaaaagcagcaaagaattgcagcagtatttggccaacctggccgagcagtgttcagcagataataatggcgtggaactgcctgtagtgatcatcttggataacctgcaccacgttgggtcactctccgatatctttaatgggtttctgaattgtaagtacaacaagtgcccttacattattgggaccatgaatcagggcgtgagcagcagccccaatcttgagctgcaccataattttagatgggtgctatgcgctaaccacaccgagccagtgaagggttttctcggcagataccttcggagaaagctgatagagatcgagatagaacgtaatattaggaacaacgatctagtcaagatcattgactggattcccaaaacgtggcatcatttaaattctttcttagagacgcactcctctagcgacgtgaccattggacctagattatttctcccttgtccaatggacgtggaggggagtcgagtctggtttatggatctctggaactattcccttgtaccttacatcctggaggccgtgcgcgaaggactacaaatgtacgggaaaaggactccctgggaggacccaagcaagtgggttttggatacctatccctggtcatcggcaacactcccacaggagtcgccagccctgctgcagcttcggcccgaagatgtagggtatgagtcctgtacctccaccaaggaggccacaacatcgaagcacatcccgcagactgataccgagggcgacccactcatgaatatgctcatgaaactgcaggaggccgctaattatagttccacccagagctgtgattctgagagcacaagccaccatgaggatattttagattctagtttggaatctacactgtag

SEQ ID NO: 185029 - DNA, 519 bp, synthetic construct
  misc_feature 1..519: note = Description of Artificial Sequence: Synthetic coding sequence
  source 1..519: mol_type = other DNA
atgaaggccaccatcatcctgctgctgctggcccaggtgagctgggccggaccattccagcagcggggactgttcgacttcatgcttgaggatgaggcttctgggattggacctgaggtgccagacgatagggatttcgaaccatctcttgggccggtgtgtccatttaggtgccagtgtcacttgcgagtcgtgcaatgctctgatctgggcctcgacaaggttccaaaagacttgcctcccgatacaaccttgctggaccttcagaataacaaaattacggaaataaaagacggtgactttaagaacttgaagaacctccatgtggtctatctacataataataatatttccgtggttggcagttctgatttctgtccccccggacacaacaccaaaaaggcaagctactccggtgtgagtctgttcagtaaccctgtccaatactgggaaattcagccttcaacttttcggtgcgtctatgttaggagcgcaattcagctcgggaattacaagtag

SEQ ID NO: 185030 - DNA, 1080 bp, synthetic construct
  misc_feature 1..1080: note = Description of Artificial Sequence: Synthetic coding sequence
  source 1..1080: mol_type = other DNA
atgaaggccaccatcatcctgctgctgctggcccaggtgagctgggctggcccatttcagcaacggggcctgtttgacttcatgttggaagatgaggccagcggcattgggcctgaagtgcccgacgatagggattttgagccttccctggggccagtgtgcccattccggtgtcagtgtcacctgagagttgttcagtgttcggatctcggcctagacaaagtgcccaaagacctgccccctgacactaccctgcttgacctacagaataacaagataactgaaatcaaggacggggatttcaagaatctcaagaacttgcatgccttaatcctcgtgaataacaaaattagtaaggtttctccaggcgcatttactcccctcgtgaagttggagcgactctacctgagcaaaaaccaattgaaggaactgcccgaaaagatgcccaagactcttcaggagttaagagcccatgagaatgaaatcactaaggtgcggaaagtgactttcaacgggctaaatcagatgattgtgattgagctgggtacaaacccgctcaaaagcagtggaatagagaatggagcctttcaggggatgaagaagttgtcatacatccgtattgcagataccaacataacaagtatcccccaaggcctccctccctctctgactgagctgcacctcgacggtaataaaatttctcgcgtggatgccgcttctctcaagggtctcaataacctggctaaactgggactgtccttcaattccatttccgcagttgataacggctccctagccaatacaccccacctgcgtgagctgcatctcgataacaacaagttaacgcgagttcctggcggattggcagaacataaatacatccaggtagtgtatctccataataacaacatatctgttgtgggatccagtgacttctgcccaccaggtcacaataccaagaaagcttcctactcaggcgtttctttgtttagcaaccctgttcagtactgggaaatccaaccatccacctttagatgtgtttatgtgcggagcgcgattcagctgggtaactacaagtag

SEQ ID NO: 185031 - DNA, 753 bp, synthetic construct
  misc_feature 1..753: note = Description of Artificial Sequence: Synthetic coding sequence
  source 1..753: mol_type = other DNA
atgaaggccaccatcatcctgctgctgctggcccaggtgagctgggctggcccatttcaacagcgagggctgtttgacttcatgttggaggacgaggcaagcggaattggtcctgaggttcccgatgaccgcgattttgagccttctctggggcccgtgtgccccttccgatgccagtgtcacctacgcgtcgttcagtgttctgacctggaactcggcacgaatcctctcaaatcctcaggcatcgaaaatggcgccttccaaggcatgaagaagctgtcatatatccgaattgccgacaccaacatcacttccatacctcaggggttgccccctagccttactgagctgcatttggatggcaacaaaattagccgcgtggacgctgcatcactaaaaggactgaataacctggctaagctgggactgtccttcaatagcatttctgccgtcgacaacggaagtcttgcgaacaccccccacctgagggagctgcacctcgacaacaacaagcttaccagggttcccggggggctggcggagcacaagtacatccaggtcgtttacctgcataataacaacatttctgttgtagggtccagtgacttttgtccacctggacacaataccaagaaggcctcatactctggtgtttccctcttcagcaatcccgtacaatactgggaaatccagcccagtacgttccggtgcgtgtatgttcggagtgccattcaactgggcaattacaaatag

SEQ ID NO: 185032 - DNA, 639 bp, synthetic construct
  misc_feature 1..639: note = Description of Artificial Sequence: Synthetic coding sequence
  source 1..639: mol_type = other DNA
atgaaggccaccatcatcctgctgctgctggcccaggtgagctgggcaggcccatttcagcaacgcgggctcttcgactttatgctggaagacgaggcctccggcatcgggccggaggtcccagatgaccgcgactttgagcctagcctcggtccggtctgccctttccgatgccagtgccacctacgagtcgtacagtgtagtgacctgggcctgcccccgtccctgactgagctgcatcttgacggaaataagattagccgcgtggacgctgctagcctgaaggggctgaacaatctagccaagcttgggcttagcttcaatagcatcagtgctgtcgacaatggcagcctcgccaacacgccgcaccttcgtgagttgcacctggacaacaacaaattaactagagtgccggggggtctcgcggagcacaagtatatccaggtggtgtatctccacaacaacaatatctctgtggtaggctcgagtgatttctgcccccccgggcataacacaaagaaagcaagctacagcggggtgtcattgttttccaaccctgtacagtactgggagatacagcctagtaccttcagatgtgtgtacgtcaggtccgccatacagctcgggaactacaagtag

SEQ ID NO: 185033 - DNA, 519 bp, synthetic construct
  misc_feature 1..519: note = Description of Artificial Sequence: Synthetic coding sequence
  source 1..519: mol_type = other DNA
atgaaggccaccatcatcctgctgctgctggcccaggtgagctgggccggccctttccaacagaggggtttgtttgattttatgttagaagacgaggcctctggtatcgggcccgaggttccggacgaccgagatttcgaacctagcctaggacccgtgtgccccttccgatgccagtgccacctccgggtcgtgcagtgctccgacttaggcctcgacaaggtccctaaggacctgccacctgacacaacgctactggatctgcagaacaacaagattacggagattaaagacggagattttaagaacttaaagaatctccacgtcgtttacctgcataacaacaacatatcagtggtcggatcatcagatttctgtcccccgggacacaacacgaagaaggccagctactctggggtttctctgttttccaatccagtccagtactgggagatccaacccagcacatttcgatgtgtgtacgttaggtctgccatccagttgggtaactataagtag

SEQ ID NO: 185034 - DNA, 228 bp, synthetic construct
  misc_feature 1..228: note = Description of Artificial Sequence: Synthetic coding sequence
  source 1..228: mol_type = other DNA
atgaaggccaccatcatcctgctgctgctggcccaggtgagctgggcaggaccttttcagcagcgcggcctgtttgatttcatgctagaagacgaagccagcggcatcgggccggaggtgcccgacgacagagattttgagccatcgctgggccctgtatgtccctttcggtgtcagtgccatcttcgcgtcgtccaatgcagcgacttggggtgtctgccatcatag

SEQ ID NO: 185035 - DNA, 639 bp, synthetic construct
  misc_feature 1..639: note = Description of Artificial Sequence: Synthetic coding sequence
  source 1..639: mol_type = other DNA
atgaaggccaccatcatcctgctgctgctggcccaggtgagctgggcaggacccttccaacaaaggggtctgtttgattttatgctggaagacgaggcatctggcattgggccagaagtgccagatgatcgggattttgaaccctcccttgggcccgtgtgtcccttcagatgccagtgccatttgcgcgtcgtgcagtgcagtgatctgggactacctccttccctgactgaactccacctggacggtaataagatcagtagggttgacgccgcctcactgaagggacttaataacctagcaaaattaggattgagttttaattcaattagcgccgttgataacgggtcactcgccaacacacctcacctccgagagttacatctggacaataacaagttgactagggtgccaggtggactggctgaacacaagtacatacaggtggtatatctacacaataacaacattagcgtggtcggtagtagtgacttttgtccccccggacataataccaagaaagcttcctactctggtgtgtctcttttctcaaatcccgttcagtactgggaaatccagcctagcaccttcaggtgcgtgtacgtgcgttctgccatccagctgggcaactataagtag

SEQ ID NO: 185036 - DNA, 540 bp, synthetic construct
  misc_feature 1..540: note = Description of Artificial Sequence: Synthetic coding sequence
  source 1..540: mol_type = other DNA
atgaaggccaccatcatcctgctgctgctggcccaggtgagctgggccgggcctttccagcagaggggcctttttgattttatgctggaggacgaggccagcggaataggacctgaagtgccagacgaccgcgacttcgagccttcgctgggtccagtgtgcccctttaggtgccagtgtcacctgagagttgtacagtgttctgatttgggactggataaagtacccaaggatttgcctccagataccacccttctcgacctgcagaataacaaaatcaccgagataaaggatggcgatttcaagaatcttaaaaatcttcacgcgctgatacttgtgaacaacaagatcagcaaagtcagtcccggtgcatttacaccccttgtgaaactagagaggctttacctgtctaaaaatcagctgaaggaactgcctgaaaaaatgccaaagacactgcaggaactgcgggcccacgaaaacgaaatcaccaaggtgagaaaggtcacttttaacggactgaatcagatgattgtaatctag

SEQ ID NO: 185037 - DNA, 360 bp, synthetic construct
  misc_feature 1..360: note = Description of Artificial Sequence: Synthetic coding sequence
  source 1..360: mol_type = other DNA
atgaaggccaccatcatcctgctgctgctggcccaggtgagctgggctggacctttccagcagcgcggcctctttgacttcatgctggaagatgaagcctcaggcatcggcccggaggttccggatgatagggacttcgaacctagcttagggccagtgtgtccatttaggtgccagtgtcacttacgagtggtccagtgttccgatcttggactagacaaagtacccaaagacctgcctcccgacaccacattactcgatctgcagaacaataaaatcactgaaataaaagacggtgacttcaagaaccttaagaacctacacgccctcatcctggtcaataataagataagcaagtag

SEQ ID NO: 185038 - DNA, 525 bp, synthetic construct
  misc_feature 1..525: note = Description of Artificial Sequence: Synthetic coding sequence
  source 1..525: mol_type = other DNA
atgaaggccaccatcatcctgctgctgctggcccaggtgagctgggccggtcctttccagcagcgtggattgtttgacttcatgttggaggatgaggctagtggcataggaccggaagtgcctgacgatagagattttgagccttccctagggccagtgtgtccctttcggtgccagtgccacctgcgtgtggtgcaatgttctgacctcgggctcgataaggtgccaaaagaccttccccccgacaccaccctcctggatctgcaaaacaataaaattaccgaaataaaagacggggatttcaagaacctgaagaaccttcacgcactgatactggttaataataagatcagcaaggtgtctcccggtgctttcacccccctggtgaaacttgagaggctttacctgtccaaaaaccaactgaaggaactccccgagaagatgcccaaaacacttcaggagctgcgagcacatgaaaacgagatcaccaaggtgagaaaggtgactttcaatggcctgaactag

SEQ ID NO: 185039 - DNA, 537 bp, synthetic construct
  misc_feature 1..537: note = Description of Artificial Sequence: Synthetic coding sequence
  source 1..537: mol_type = other DNA
atgaaggccaccatcatcctgctgctgctggcccaggtgagctgggcaggccccttccaacagagggggcttttcgattttatgctggaggatgaagcttcaggcattggacccgaggtcccggacgacagggattttgagcccagtctgggccctgtgtgtccctttcggtgtcagtgtcacctcagggtggtccagtgcagcgacctgggcctcgacaaagttcccaaggatcttccacctgacacaactttactggaccttcaaaacaacaagatcactgaaatcaaggatggtgatttcaaaaatctgaagaatctgcatgcccttatcctcgtgaacaataaaatctcaaaggtctcccctggggcctttaccccgctcgtaaagctcgaaaggctgtatcttagcaaaaatcagttgaaggagctccccgaaaaaatgcccaaaactctgcaggagctgcgggcccacgagaacgaaataactaaagttcgcaaggtcactttcaacgggcttaatcagatgatcgtctag

SEQ ID NO: 185040 - DNA, 1080 bp, synthetic construct
  misc_feature 1..1080: note = Description of Artificial Sequence: Synthetic coding sequence
  source 1..1080: mol_type = other DNA
atgaaggccaccatcatcctgctgctgctggcccaggtgagctgggccggaccgtttcagcaacgcgggcttttcgacttcatgcttgaagatgaggctagcggcataggccctgaagtgcccgatgatagagactttgagcccagtctgggccctgtgtgccctttcaggtgccaatgccacctgcgagtggtacagtgctccgatctcgggctggataaggttcccaaggacctcccaccggataccacccttctggacctccaaaataataagatcaccgagatcaaagacggagattttaaaaacctgaaaaacctacacgcccttatcctggttaataacaagatttcaaaggtctctccaggtgcgtttacgcctctggttaaactggaaaggctctatttgtcaaagaatcagcttaaggagctccctgagaagatgcctaagacgctgcaggagttgcgcgcccatgagaacgagatcaccaaagttaggaaagtgacgttcaacgggctgaaccagatgattgtgatcgagcttgggacgaacccactgaaatccagcggcatcgagaatggagccttccagggaatgaagaaactttcttacatccggatcgccgatactaatatcacatccatcccccagggattgcccccttctctcactgaacttcacttggatggaaacaagattagtcgggtcgatgctgcaagcctgaaagggttgaataatctcgccaagctgggcctcagcttcaactctatctcagccgtcgacaacggctctcttgccaacacaccccacttgagagagctccacctggataacaataagcttacacgagtgcctggcggattagccgaacataaatacattcaggttgtatacctgcataataacaacatcagcgtcgtaggctccagcgacttttgtccccctggtcacaacactaagaaggcttcgtactctggcgtgagtctgttctccaacccggtccagtattgggagatccagccttccacgttccggtgcgtgtacgtaaggtctgccattcaactcggcaactacaagtag

SEQ ID NO: 185041 - DNA, 5598 bp, synthetic construct
  misc_feature 1..5598: note = Description of Artificial Sequence: Synthetic coding sequence
  source 1..5598: mol_type = other DNA
atgacccggtgggtgcccaccaagcgggaggagaagtacggcgtggcattttataattacgacgcccgtggtgccgacgagctgagcctgcaaataggggatacagtccatattctggaaacctatgaagggtggtacagaggctacacacttcgcaagaaatccaaaaagggaatcttccccgccagttacattcacctcaaggaggccattgtcgagggcaaaggccaacatgagactgtgatccctggggacctgcctctaattcaggaagtaacgacgactctgcgcgaatggtcaactatttggcgtcaactgtacgtccaggacaaccgcgagatgtttaggtctgttaggcatatgatatacgacctgatcgaatggcggagtcagatccttagcggaacattaccacaggatgaattgaaagagctcaaaaagaaggtcaccgcaaaaattgattacggcaacaggatcttagatttggacctggtcgtccgagatgaagatgggaacatactggatccagagctgacaagcaccatcagtctctttcgcgctcatgagatagcatccaaacaagtggaagagagattacaagaagagaagagccaaaaacagaatatagatatcaacaggcaggccaaattcgcagcaactcccagtctcgccttgttcgttaacctgaaaaatgtggtttgcaaaatcggtgaggacgcagaggtgcttatgtctctgtatgatccagtggaaagcaagttcatttccgaaaactacctcgtcagatggtcttcatcaggcctgccaaaagacatcgatcgactccataacttacgagccgtattcacagatctcggttctaaagacctgaaacgggaaaaaatttccttcgtgtgccaaatcgttagggttggacggatggaactgcgcgacaacaacactcgcaaacttacgagcggtctgcggcgcccctttggcgtggccgtgatggacgtgaccgacatcatcaatggcaaagtcgatgacgaagataaacaacactttattccatttcagcccgtggccggagagaatgacttccttcagactgtcatcaataaggtgatagcggctaaagaggtcaatcataaagggcaaggcttgtgggtcacgcttaagctcctacccggcgacattcatcagatccgaaaggaattcccccatctggtagaccgaacaacagccgtcgcgcgcaagacaggatttcctgagataataatgccaggtgatgtcaggaacgatatatacgtcaccctggtccagggcgacttcgataaggggagtaaaaccacggcaaagaatgtggaggtgactgtgagtgtgtatgacgaggacggcaagcgacttgagcacgtcatattccctggcgccggggacgaggccatctcagaatacaagtcagtgatctattaccaggtgaaacagccccgctggtttgagaccgtcaaagttgcgattcccattgaggatgtgaaccgatctcaccttagatttacatttagacaccggagttcccaagactcaaaggacaaaagcgaaaagatattcgccctagcttttgtcaaattgatgcgatatgacgggaccactcttcgagacggagagcatgacctgattgtttataaggctgaagctaaaaagctggaagatgccgccacctacctgtccctacctagcaccaaagctgagctggaagagaaagggcatagcgcaacaggcaagagcatgcagagcctggggtcatgcaccatttccaaagactcatttcagatctcaacactggtttgttccactaagctcactcagaatgtggacctcctcggacttctgaaatggaggtccaacacatcactgctgcagcagaatttgcgtcagctcatgaaagtagatggcggtgaagtggttaaatttctccaagacactcttgatgctctgttcaatattatgatggagaattcagagtccgaaacatttgacacactggtgtttgacgccctggtctttattatcggactcattgctgacaggaaattccaacactttaatccagtacttgagacatacattaaaaaacacttcagtgccactttggcttacaccaagttgaccaaagtgttgaaaaattacgtcgacggtgccgaaaagccgggggtgaacgaacaattgtataaagccatgaaagctcttgaatctatcttcaagtttatcgtccggagccggattctgtttaatcagctgtacgagaacaagggggaggccgactttgttgagtctctcttgcaattgtttagatctattaatgacatgatgagctctatgtcagaccagaccgtccgggttaaaggggccgcgctgaagtacttgccgaccatagtcaatgatgtcaaactggttttcgaccccaaagagctatccaagatgtttacagagttcatcctgaatgtccccatgggcctcctgacgatccaaaaactctattgcctgattgagatcgtgcatagcgacttgtttactcagcacgattgtcgtgagatcctgctgcctatgatgactgaccagctgaagtaccacctcgaaaggcaggaggatttagaagcctgctgtcaactcctgtctcacattctcgaggtgctatatcgcaaggatgtgggacccactcagcgccatgtccagatcatcatggaaaagctgttaaggactgtgaacaggaccgtcattagcatgggacgcgacagtgaactcataggaaatttcgtagcctgcatgactgctatcctgcggcagatggaagactaccactatgcccacttaattaagacatttggcaaaatgcggactgatgtggtcgacttcctgatggagacctttattatgtttaaaaatcttatcggaaaaaatgtctacccattcgattgggttatcatgaacatggtccaaaataaggtgttcctgagagcaattaaccagtatgctgacatgctgaataagaaatttttagatcaggccaatttcgaattacagctttggaataattacttccacctagccgtggccttccttactcaggaatcactccagctggaaaacttttcttccgcaaaacgtgctaagattctcaataagtatggggacatgcggaggcagatcggctttgagatccgcgacatgtggtataacctcggccagcataagatcaaattcatccctgagatggtcggacccatcctggagatgactcttattcctgaaactgagctgcgtaaggccacaatcccaatattttttgatatgatgcagtgcgagtttcactcaacgagatcctttcaaatgttcgagaacgagattattaccaagctggatcatgaagtggagggcgggcgcggcgacgagcagtataaggtgctcttcgataagatcttactggagcactgccgtaaacacaagtaccttgcgaagacaggcgagaccttcgtcaagcttgttgtccgtctaatggagcgcctgcttgattataggacgatcatgcacgacgagaataaagagaatcgcatgagttgcaccgtcaacgtgcttaacttctataaggagatagagcgagaggaaatgtacatacgctacttatacaaattatgtgatctgcacaaggagtgcgataattacaccgaggccgcctatacattacttttgcatgccaaactgttgaaatggtccgaagatgtgtgcgttgcccatctgacccagagagacggttaccaggctaccacccaagggcaattgaaagaacagttgtaccaagagatcattcattattttgataaggggaaaatgtgggaagaagctatcgccttaggcaaagaactggccgagcaatatgaaaacgaaatgtttgattacgagcagcttagtgaacttttgaaaaagcaagcgcagttttacgaaaatattgtcaaagtaattcgcccaaaaccagattacttcgcagtaggatattacggacagggctttcctaccttcttaaggggcaaggtgttcatctatcgcggcaaagaatacgagagacgagaagattttgaggccagactgctgactcagtttcccaatgcagaaaagatgaaaacgacttcccctcccggagatgacatcaaaaattccccaggccaatacattcagtgcttcacagtcaaaccaaagttggacctgcccccgaaatttcaccgcccagtgagtgagcaaatcgtgagcttttaccgggtgaatgaggtccagcggtttgaatactctcgtcccattagaaagggtgagaaaaaccctgacaacgaatttgcaaatatgtggatcgagagaaccatttatacaacggcctacaagctccccggcattttgagatggtttgaggttaagtcggttttcatggtcgagattagccccttggagaatgccatcgaaaccatgcagttgaccaacgataagattaactccatggttcagcaacacctagacgaccccagcctcccaattaaccccttgagcatgctccttaacggaatcgtcgatcctgccgtcatgggcgggtttgccaattatgagaaggccttttttacagaccggtatctccaggagcatcccgaggctcacgagaaaatcgaaaagctgaaagatctcatcgcatggcaaataccatttcttgctgaaggtataaggatccacggtgacaaagtcacagaagctttgaggccatttcacgagcgcatggaggcctgctttaagcaactgaaagagaaggtggagaaggaatatggtgtgcggattatgccgtcaagcctcgatgacagaagaggcagccgcccccgatcaatggttcgaagcttcactatgcctagctcatccaggccactgagtgtggcttcagtatcatccttgagtagcgactctactccttccaggcccgggagcgatggattcgctctggagcctcttctaccaaaaaagatgcactcccggtcccaggacaaactggataaggatgacttagaaaaggaaaaaaaagataaaaaaaaagaaaagagaaactctaagcatcaggaaatctttgaaaaggaatttaagccaaccgatattagtctccaacaatcggaagctgtgattttgtcagaaaccatctccccactgaggcctcagagacccaaaagccaggtgatgaatgtcatcggctctgaacgacgttttagcgttagtcccagtagtccttcatctcaacagactccaccccctgttacaccgagggctaaactatcattctccatgcagtcctccttggaattgaatggaatgacaggggctgacgtagctgacgtgccacccccgcttccccttaagggctccgtcgctgattatggaaacctgatggagaatcaggacttgttgggcagtcccactcctcctcctccgcctccccaccagagacacttaccgccccccttgccttccaagacccctcctccacctccaccaaaaacaacgagaaaacaggcatcagtcgatagtggaatcgtgcagtag

SEQ ID NO: 185042 - DNA, 6561 bp, synthetic construct
  misc_feature 1..6561: note = Description of Artificial Sequence: Synthetic coding sequence
  source 1..6561: mol_type = other DNA
atggccggcgagcggacccggcggttcacccggagcctgctgcggcccggccaggccgccgagttgaggcacagtgccgcttcggcggcagccgtcgccgtgtcaagcagacagcagcagcgtcaagagaaaccaaggctcctcgaaccgctggactacgagaccgtcatcgaagagctggagaagacatacagaaacgaccccctgcaggacctgctcttctttccctcagacgacttttctgccgccacagtgtcttgggacattcgcacgctgtacagcactgtgcccgaagacgccgaacataaggcggaaaacctgctggttaaagaagcttgcaaattctactcatcacagtggcacgtggtgaattacaagtacgaacaatacagcggcgacattcgacagctgcctcgtgcggagtacaagcccgagaaacttcccagccatagctttgagattgatcatgaggacgcagacaaagatgaagacaccacttctcacagcagttctaagggtggagggggcgccggaggaacaggcgtgtttaaaagcggatggctctacaaggggaacttcaatagcacagtcaacaacacagttactgttcgaagctttaaaaaacgctacttccagttgacacagctgcctgacaattcttacataatgaacttctataaggacgagaaaatatcaaaagagccaaagggttgcatcttcctcgattcgtgtaccggggtggtacagaataatagactccgaaagtacgcctttgagctcaagatgaatgacttgacctatttcgtccttgccgccgagacagaaagcgatatggatgaatggatccacaccctgaatcggattctgcagatctcacctgagggcccactgcaaggtaggagatctactgagctgacggatttgggcctggactcattagataattccgtgacctgcgaatgcaccccagaagaaaccgacagctctgagaataacctccatgcagattttgctaaatacctcacagagacagaagacactgtaaaaacgacaagaaacatggaacgtctaaacctcttttcactggacccagatatcgacactctgaaattacagaagaaggatctcttggaacccgagagtgtaataaaacccttcgaagagaaggctgcaaaaaggattatgattatttgcaaggcattgaacagtaatctgcagggctgtgtgactgagaacgagaacgaccccattacaaatattgaaccattttttgtttcagtcgccttgtacgatctaagggacagtaggaaaatctccgcagacttccatgtggacctcaaccatgccgcggtccgccaaatgttgctgggggccagtgtcgcactggaaaatggaaacattgacaccatcaccccgcgacagtcggaggaacctcacatcaagggcttgcctgaagaatggttaaaattccccaagcaggctgtgttctcagtttccaaccctcactccgagattgtgctcgtcgccaagatcgagaaggtcttaatgggcaacatcgcctctggggcagaaccttatataaagaaccctgactctaacaaatacgcccagaagatcctcaagtctaatagacagttctgcagcaaactcggcaaatatcggatgcccttcgcgtgggcagtacgtagcgtgttcaaagataatcagggcaatgtggaccgagattcacgtttctcccccctgtttcgccaggagtcatccaagataagcacagaagacctagtcaagctggtgtccgattacaggcgcgcagataggatttctaagatgcagactatacctgggtccttggatatcgcggtggacaatgtcccactcgagcaccccaattgtgtgacctctagtttcatccctgttaagcctttcaatatgatggcacaaactgagcctaccgtggaggtcgaagagttcgtgtacgattcaacaaagtactgccggccataccgggtatacaagaatcagatatatatctatcccaaacaccttaagtacgatagccagaagtgtttcaacaaagcccggaatatcactgtatgtattgagtttaagaatagcgatgaggagagcgccaagccgctgaaatgcatttacggtaagcctgggggccccctgttcacttctgccgcttacactgctgtgctgcatcactcccagaaccctgatttcagtgacgaggtcaagatagagctacctactcagctgcacgagaaacaccatatcttattctcattttatcacgtcacttgcgacattaacgccaaggcgaacgcaaaaaaaaaggaggctctggagaccagtgtgggttacgcttggctccctttgatgaaacacgaccagatagcatctcaagaatataatatacccatcgccacgtccctccctccgaactatctgtccttccaggattccgctagcgggaaacacggcggctccgatattaaatgggtggatgggggcaagcccctgtttaaagtgtcaactttcgtggtgagcacagtgaacacccaggacccgcacgtgaatgcctttttccaggagtgccagaagcgtgagaaagatatgagccagtcacccacctctaacttcattcgcagttgcaagaatctgctcaacgtcgaaaagattcacgccataatgagttttcttcctattattttgaaccaattgttcaaggtcttagtgcagaacgaagaggatgaaattaccaccactgtaactcgagttctaacagacatagtggccaagtgtcacgaggaacagttggatcactccgttcaaagctacattaaattcgtgttcaaaaccagagcgtgtaaggaaaggacagtgcatgaggagcttgctaaaaatgtcaccgggctactgaaatcaaacgacagcactaccgtgaagcatgtgctgaaacattcctggttttttttcgccataattttgaaatcgatggctcagcacttaatcgacactaataagatccagcttcccagacctcagcgctttcctgagtcctatcagaatgaattggataacctggttatggttctgagcgatcacgttatctggaagtacaaagacgctctagaagaaactcggagagccaaccacagcgttgcccgattcctcaagcggtgtttcacgtttatggatcggggatatgtgtttaagatggtgaacaactatatttccatgttcagcagcggagatctgaaaacactgtgccaatataagttcgactttctgcaagaggtgtgtcaacatgagcattttattccactctgtctgcccattcgctccgccaatattcctgacccactgactccttctgaatccactcaggaactgcacgctagcgacatgcccgaatactccgtgactaacgagttctgtagaaaacacttcctaattggaatattgctgcgcgaagtcggtttcgcactccaggaagaccaggatgttagacacctcgccctggctgtcctcaagaatctgatggccaagcactcttttgatgaccggtatcgcgaacctaggaaacaggctcagatcgcaagtctctatatgccgctctacggtatgctccttgacaatatgcctcggatctacttgaaagatctctatcccttcacagtgaacacttccaatcagggcagccgggatgatctatctaccaatggcggttttcagagtcagaccgcgatcaaacacgcaaattctgtcgatacctccttctcaaaggacgtattaaatagtatagccgccttctctagtattgcaattagcacagtcaaccacgcagattccagggcatctttagcgtcactcgactcgaatccttctactaacgagaagtccagtgagaaaacagataactgcgaaaaaatcccccgtcccctctctttgatcggatcgacattgcggttcgataaactagatcaggcagaaaccagatcacttctaatgtgttttctgcacatcatgaagaccattagctacgaaacgctcattgcttactggcagcgcgccccatcacccgaagtgtcagacttcttcagtatcctggatgtctgcctgcagaactttagatatttgggcaaaaggaatataatcaggaagattgctgcagcctttaaatttgtccaaagtacccagaataacgggaccctcaagggatccaacccgagctgccagacaagtgggttgttgagccagtggatgcattccacaagtagtcatgaaggacacaagcagcataggagtcagacactgcccattatcagaggcaagaatgccctgagcaacccaaagctcttgcagatgctggacaacaccatgacaagcaactctaacgaaattgatattgtacatcatgtggacaccgaggcgaatatagccacagaggtgtgcctgaccattctcgatctgctaagcctttttactcagacacaccagcggcaattgcagcagtgtgattgtcagaactcactgatgaagagagtctttgacacttacatgctgtttttccaggtaaatcaatctgctaccgcactgaaacatgtttttgcaagtttgaggttattcgtgtgtaaattcccatcagcatttttccaggggccagctgacctctgtggcagcttctgctatgaggtcctcaagtgctgtaaccaccgctccaggagtacccaaacagaggcctcggctctcttgtatttctttatgcgcaagaacttcgagtttaacaaacagaaaagcatcgtgcgatcccacctccaactcatcaaggctgtaagtcaactgatcgctgacgccggcatcggggggtccagattccaacatagtcttgccatcaccaacaactttgccaacggagacaaacaaatgaagaactccaatttccctgccgaggtgaaggacctgacgaaacgcattcgaaccgtgcttatggcgactgcgcagatgaaggaacatgaaaaggatcccgagatgctcgtcgatctgcaatacagccttgccaactcgtacgcttcaacgcctgagctgcggagaacgtggctggaatcaatggctaagatccacgcccgaaatggcgatctgtcagaggcagctatgtgttatatacacatcgcagcccttatcgccgaatatcttaagcggaaggggtactggaaagtcgagaagatatgcacagccagtttgttatctgaggacactcatccctgtgacagcaatagcctgctcacgacaccatccgggggcagcatgtttagcatggggtggccagcattcctctctattacaccaaacattaaggaagagggggcgatgaaggaggatagtggtatgcaggacactccatataatgaaaacattctcgtggagcagctgtacatgtgcgttgagtttttgtggaaaagtgagcggtatgaactgatcgcggacgtcaataagcccatcatcgccgtattcgagaagcaacgggatttcaagaaactcagtgacttgtactatgacattcataggagctatttgaaggttgcggaggtagtgaatagcgaaaagcgcctctttggcaggtactaccgcgttgccttttatggccagggtttctttgaagaagaggaaggaaaagaatatatctataaagaaccgaagttgaccggactctctgaaattagtcagcgtctcctgaagttgtacgcagataagttcggcgcagacaacgttaagatcattcaggattcaaacaaagtgaaccctaaagatctggacccaaagtatgcctacatccaggtgacttatgttaccccttttttcgaagagaaggagatagaggaccgaaaaacagattttgagatgcaccacaacatcaaccgcttcgtctttgaaaccccctttacgctgagtggtaaaaaacacgggggcgtggcggaacaatgtaagaggagaacaatactgaccactagccacctgttcccatacgtcaaaaagcgcatacaggttatttctcagagctccacagagctgaatcctattgaggtggccattgacgagatgtcaaagaaagtatcagagctgaaccagttgtgcaccatggaggaggtagatatgataaggcttcagctgaagctacagggcagcgtcagcgtcaaagtgaacgcggggcccatggcctacgcaagagcctttcttgaggaaactaacgcaaagaagtacccagataaccaggtgaagttactcaaggaaatattcaggcagttcgcagatgcttgcggacaggccttggacgtgaatgaaaggctaataaaggaggatcaactagaataccaggaggagctgcggagccattataaagatatgctgagcgaactctcgaccgtgatgaacgaacagatcaccggcagagatgacttgtctaagcgtggagtagaccaaacatgtacccgtgtgattagtaaagctactccagcgttaccaaccgtgtcaatctcttcctcagcggaagtgtag

SEQ ID NO: 185043 - DNA, 2103 bp, synthetic construct
  misc_feature 1..2103: note = Description of Artificial Sequence: Synthetic coding sequence
  source 1..2103: mol_type = other DNA
atgaccagcaacagcaacgagatcgacatcgtgcaccacgtggacaccgaggctaacatcgcaaccgaagtctgtctgactatcttagatctgctaagtctgtttacccagacacatcagcgccagttgcagcagtgcgactgtcagaactcactgatgaagagagtctttgatacatatatgctgttctttcaggtgaatcaaagcgccaccgcattgaagcacgtgttcgcgagtctcaggctgtttgtctgcaaatttccatcagcattcttccaggggcccgccgacctgtgtggctccttctgctacgaagtcctgaagtgctgcaaccacagatctaggagcacccagacagaggcttcggccctcctatatttttttatgagaaagaattttgaatttaataagcagaagagtatcgtgagatcccacctgcaactgatcaaagctgtctctcaactgattgccgacgccggcatcggaggttctcgattccagcatagtttagccatcaccaacaactttgctaacggagacaaacaaatgaaaaatagtaactttccagccgaggtgaaggatttaaccaaaaggatacggacggttctgatggccaccgctcaaatgaaggagcatgaaaaggatccggagatgctggttgatctgcagtactctctggcaaactcatacgcatccactcccgaattacgcaggacatggctagaaagtatggccaagatccacgcgcgcaacggagatctgtcagaagccgctatgtgttatattcacattgcagccctcatagctgagtacctgaagcgtaaaggcatgtttagcatggggtggcccgctttcttgtcaatcacgcctaatatcaaagaagaaggagctatgaaagaagatagcggaatgcaagacaccccttacaatgaaaatatcctcgtcgagcaactttacatgtgtgtggagttcctttggaaaagcgagaggtatgaactgattgccgacgtgaataagccaatcatcgccgtctttgaaaaacaacgcgacttcaagaagttgtccgatctctattacgatatccatcgcagttacctcaaggtggctgaggtcgtcaactctgagaaaaggctttttgggcggtactaccgcgtagctttttatggccagggagtcgggtttttcgaagaagaggagggcaaggaatacatttacaaggaaccgaagctgaccggcctgtccgaaatatctcagcgtttgttgaagttatatgcagataaatttggcgcagataacgtgaaaattattcaggattccaataaagttaatccaaaggatttagacccgaaatacgcatatatccaggtgacgtacgtcacacctttctttgaagagaaggagatcgaggatcgtaagactgattttgaaatgcaccacaatattaatagattcgtgtttgagacgccttttacattgtccggtaagaagcatggcggagtggccgagcagtgcaaaagaaggacaattctgactacaagtcacctgtttccctacgtcaagaagcgcatacaggttatctcccagtctagcaccgaactcaatcccatcgaggtcgccatcgacgagatgagtaagaaggtctccgagcttaaccagctctgcaccatggaggaagtcgatatgatcagactacagcttaagctccaggggagcgtgagcgttaaggtgaacgctggtcctatggcctatgcacgcgctttcttggaagagaccaatgcgaagaaataccccgacaatcaggtgaaactgctgaaggagattttccgccagtttgccgacgcatgtggtcaggctctggacgtgaacgagaggctgattaaggaagatcagttagagtatcaagaggaactccggagtcattataaagacatgttgtcggaattgagtacagtgatgaacgagcaactgtgtaggggcccatgcttgtactcgttctgctctagtgtgtcctccataagcctcagcaccgtcagcaaatctgattacggtcagggcagacctgtgaaagccagaagtggtcctaatctgcacagttctaactag

SEQ ID NO: 185044 - DNA, 6543 bp, synthetic construct
  misc_feature 1..6543: note = Description of Artificial Sequence: Synthetic coding sequence
  source 1..6543: mol_type = other DNA
atgagcttccggggcaaggtgttcaagcgggagcccagcgagttctggaaaaagcgtcgtacagtccgaagagtgaaccaagaggagatccatcgcttctcttctcaggagaagcctcgactgctcgagccattggattatgagaccgtgatcgaagagcttgaaaagacctatagaaacgacccgctgcaggacctcttgtttttccctagtgacgacttttccgccgccacagtgtcatgggatattcgtacgctgtatagcaccgttcctgaggacgctgaacacaaggccgagaacttgctcgtgaaagaagcctgtaagttctactcatcccagtggcacgtagttaactataagtacgaacaatacagtggggacatcagacagttaccgcgcgccgaatataaacccgagaaactgccatctcactctttcgagatcgaccacgaagatgcagacaaggatgaagacaccacttctcactcctcctccaaaggcggaggtggggccggcggaaccggcgtatttaagtccggatggctgtataaggggaacttcaactctacagtgaataacacagtcactgtgaggtcttttaagaaacgctactttcagttaacacagctccccgataactcatacatcatgaacttctacaaagacgagaaaatatccaaagagcctaagggctgtatattcttggactcctgcacaggagtggtacagaacaaccgcctgaggaagtacgcatttgagctgaagatgaatgacttgacatacttcgtcctcgccgctgaaacagaatccgacatggatgagtggatccacaccctcaatcggattctccagataagtccagagggcccactccagggaaggaggtctaccgaattgacagatctgggcttagactcattggataacagtgtgacctgcgagtgtaccccggaggaaaccgattcatccgagaacaacttacacgcagatttcgctaaatatcttacagaaaccgaggacaccgttaagaccacacgcaatatggaacggttgaatctgttctcccttgatcctgacatcgacacactcaagctacaaaaaaaagatctgcttgagccagaatccgtgatcaagcccttcgaggagaaagcagccaagcggattatgatcatctgcaaagccctgaattcaaacctgcagggatgcgtcaccgaaaacgagaatgaccccatcacaaacatcgagcctttctttgttagcgtcgcactgtatgacctgcgcgacagtagaaagatctccgccgattttcatgtggatttgaatcatgcagccgtgcgacagatgctcctcggggcctctgtcgccctcgaaaatggtaacatcgacaccatcactccacggcaatccgaagaacctcacatcaaggggttgcccgaagagtggttaaaatttcccaagcaagctgtgttttcagtgtccaacccccatagcgagatcgtgctggtcgccaaaatcgaaaaagtgcttatggggaatatcgcatctggcgccgaaccatacatcaagaaccccgactctaacaagtacgcacaaaaaatactcaagtcaaaccggcagttctgctccaaattagggaagtacaggatgcctttcgcctgggccgttcgttccgtttttaaggacaaccagggcaacgtggatcgcgatagcagattttcacccctatttcggcaagaaagcagtaagatttcaaccgaagatctggtgaagctagtgagcgactaccggcgcgctgaccgcattagcaagatgcaaaccattccaggctccttggatatcgccgtcgataacgtgccccttgagcatccaaattgcgttactagcagtttcatccccgtgaagccctttaacatgatggcccaaaccgagcccactgttgaagtggaggaatttgtatatgattctacaaagtactgtcgcccctatagagtctacaaaaatcagatatatatttaccctaaacaccttaagtacgatagccagaagtgttttaataaagcacgcaatataacggtttgtatcgaattcaagaacagtgacgaagagagcgcgaaaccccttaagtgtatctacgggaaacctggcggtccactcttcaccagtgcagcctacaccgctgtgctgcatcattctcagaaccctgacttctctgacgaggtgaaaatcgagttgcccacacaactccacgaaaagcatcacatattgttctccttttaccacgtgacgtgcgacattaatgctaaggccaacgcgaagaaaaaggaggccttagagacgagtgtcggatacgcctggctacccctcatgaagcatgaccagattgccagccaggagtataatatcccaatcgctacatcgttaccccccaactatttgtcatttcaagatagtgctagcggaaaacacggtgggtcagatatcaagtgggtagacggtggcaagcctttgtttaaagtgagcacctttgtagtgtcgaccgtaaatactcaggaccctcacgttaacgccttcttccaagagtgccagaaacgcgagaaggacatgtctcagtcccccaccagcaattttatcaggtcttgtaagaatttattgaatgtcgagaagatccacgccattatgtctttcctaccaattatcctgaaccagctatttaaagttctcgttcagaacgaggaggacgagatcaccactacggttactcgcgtcctgaccgatatcgtggccaaatgccacgaagaacagttggaccactctgtccagtcttacataaaattcgtgtttaagacccgggcatgcaaggaaagaaccgtgcacgaagaactcgcaaaaaatgttacaggactgttgaagtctaatgactcaacaaccgtgaaacatgtactgaagcattcatggttcttttttgccatcattttgaagtccatggctcagcatctcatcgataccaataagatacagctacccagaccccagaggttcccagaaagttatcagaacgagctcgacaacctggtgatggtgctgtcagaccacgtgatctggaaatacaaggacgcccttgaggaaacaaggcgcgccaatcactccgtggcccgatttttaaagcgttgcttcacgttcatggacaggggctacgttttcaagatggtaaacaattatatttcaatgttttcgagcggggatttgaaaaccttatgtcagtacaaattcgacttcctccaagaagtgtgccagcatgagcactttatcccactgtgcctgcccatccgatcagccaatattccagaccccctcacaccatcggagagcacccaggagcttcacgcctccgacatgcccgagtattccgtcacgaacgaattttgcaggaaacactttctaatcggaatcctgctgcgagaagtgggctttgccttgcaagaagatcaggacgttcgccatctggccctagctgtgcttaaaaatcttatggctaagcatagttttgacgacagatatcgggagccaaggaagcaggcgcagattgcctctctctacatgccattgtatggcatgctgctggataacatgccacgcatctacctgaaagatttgtatccgttcacagtaaatacgtcgaaccagggttctcgcgatgatttaagcactaatggcggtttccagtcacagaccgcaatcaagcacgctaattcagtcgacacctctttcagtaaagacgttttaaattccatagccgcatttagcagcatagcgatatctactgtgaatcatgctgactcgcgagctagcctggcaagtttggattccaatcccagcaccaacgagaagtctagcgaaaaaaccgataattgtgagaagattcctaggccactgtccctgatcgggagcaccctcagattcgataagcttgatcaggcagaaactcgttccctacttatgtgttttctgcacattatgaaaacgatatcatacgaaacacttattgcatattggcaacgagcccccagtccggaggtgtctgacttcttctccatcctggacgtgtgtcttcagaactttcggtatttagggaagaggaatatcatccggaagatcgccgctgcatttaagttcgtgcagagcacccaaaataacggaacgctgaaaggttcaaacccctcatgccagacatcagggctgttgagtcagtggatgcactctacttcttctcacgaaggccataagcaacatcgttcccagacactgccaatcattagaggcaaaaatgcgctgagcaatcccaaacttctgcagatgctggataacaccatgacctctaattccaacgagatagatatcgttcaccacgtggatacagaagcaaacatagctacagaagtgtgtctgacgatcttggatctgctgtccctgttcacgcagacccaccagaggcagttgcagcagtgtgattgccagaatagtttaatgaagcgagttttcgacacctacatgctcttttttcaggtgaatcaaagcgctaccgcgctaaagcatgtcttcgctagcttaaggcttttcgtatgtaaatttccatccgcattttttcaaggtcccgctgacctctgcggcagtttctgctacgaggtgctgaagtgttgcaaccatcggagccggtctacacagaccgaagcctctgctctgctgtacttctttatgcgcaagaactttgaatttaataaacagaagtccattgtgaggtctcacctgcagctgataaaagccgtctcccagctaatcgcagatgctggaattggaggtagtagatttcagcacagcctagccataacgaacaatttcgcaaatggcgataaacagatgaagaattccaacttccccgccgaggttaaagacttaacgaaacgcatccggacagttctaatggctaccgctcaaatgaaagaacatgaaaaagatccggaaatgctcgttgatctccagtattcgctggctaatagctacgcctctacgcctgagctgagaaggacatggctggagagcatggctaagatccatgcccgcaatggcgaccttagcgaagcggccatgtgttacattcatatcgctgccctcatcgccgaatacctaaagcgcaaaggttattggaaggttgagaaaatctgtactgccagtctactcagcgaggatactcacccctgtgactctaattctctgttgacaacaccaagcgggggaagcatgttcagtatgggttggccagccttcctcagcatcacacctaacattaaggaggagggagcaatgaaggaggattccgggatgcaggacacaccatataatgagaatattctcgtggaacaactgtacatgtgtgttgagttcctttggaagtccgagagatacgagttgattgccgacgttaacaaacccattatcgccgtctttgagaagcagcgagattttaaaaaactcagtgatctgtattatgatatacatcgatcgtacctgaaagtggccgaggtggtaaatagtgagaaacggttgtttggtcggtactatcgggtggctttttatggacaagggttcttcgaggaggaggagggtaaagaatatatctacaaggaacctaagctgacaggcctgagtgagatctcacaacgacttctgaaactgtacgcggacaaatttggcgctgataacgttaagatcattcaggattccaacaaggtcaatccaaaggacttggaccccaagtacgcatacatccaggtgacttacgtgacgccatttttcgaagaaaaggaaattgaggatcgcaaaaccgatttcgagatgcaccacaatatcaaccggttcgtgtttgagaccccattcaccctgagcggtaagaagcacggcggagtggctgaacaatgtaagcgccgaacaattttaacgaccagccatctgtttccatatgtcaagaagaggatccaggttatatcacaatcgtcgaccgaacttaacccaatcgaggtcgcaatcgacgaaatgtcaaaaaaggtcagcgagttaaaccagctgtgcactatggaggaagtggacatgattaggttacagctgaagctgcaaggctccgtaagtgtaaaggtgaatgcaggtccaatggcctacgcccgagccttcctcgaagagacaaatgcaaagaaatatccagataaccaggtgaagctccttaaagaaatctttcggcagttcgccgatgcctgcggacaggccctggatgtgaacgaaagactgatcaaggaggatcagctggagtatcaggaagagctgaggtcacattataaggacatgctgtccgaactctctaccgtcatgaacgagcagataaccgggcgggacgatctctccaagcggggggttgaccaaacctgcacacgtgtcatctccaaagctacccctgctctacctacagtcagcatttcttcctccgctgaggtgtag

SEQ ID NO: 185045 - DNA, 5493 bp, synthetic construct
  misc_feature 1..5493: note = Description of Artificial Sequence: Synthetic coding sequence
  source 1..5493: mol_type = other DNA
atggccccctggcggaaggccgacaaggagcggcacggcgtggccatttacaactttcagggcagcggcgctccacagctctcattgcagataggtgacgtggtgcgtatccaagagacttgcggagactggtatcgcggttacctcatcaaacataagatgctacagggcatctttccgaaatcattcatccacatcaaggaagtcacggtagagaagagaaggaataccgagaacattatccccgcggagatccccctcgcacaggaagtgaccactaccctatgggagtggggcagtatttggaaacagttgtacgtggctagcaagaaggaacggttcctgcaggtccagtccatgatgtatgatctgatggagtggcgatcacagttgttgtccgggaccctcccgaaggacgaactgaaggaactgaaacagaaggtaacgtcaaagattgattacggcaacaaaatcctcgagctggacttaattgtccgggacgaggatggcaatatcctggaccccgataatacgtcagttatttccctcttccatgcccatgaggaagcgaccgacaaaatcactgagaggatcaaagaagaaatgtccaaagaccagcctgattacgctatgtactcgcgtatttcctccagccctacacactctctctatgtgttcgtgcgcaactttgtgtgcaggattggcgaagatgctgaactgttcatgtccctgtatgacccaaacaaacagacagttatttcagagaactacctggtgcgttggggaagcagaggtttccccaaggagatagagatgctgaataatcttaaggtggtgttcactgatttggggaataaagatttgaaccgcgacaagatctacttgatttgtcagatcgtgagagtggggaagatggacttgaaagacacaggcgcgaagaagtgtacacagggactgaggcgtcctttcggagtggcagtaatggatattactgacatcattaaaggcaaggccgaatcagacgaggagaagcagcatttcatcccatttcatcctgttacagccgaaaatgatttcttacacagtctgctgggaaaggtgattgccagtaagggggattctggcggacagggcctctgggtcaccatgaagatgctggtcggagatataattcagattcgaaaggactatccacacctcgtggaccgtacgaccgtagttgcgcggaaactgggcttccctgaaatcatcatgcccggcgacgtacgcaacgatatttatatcactttgctgcagggcgatttcgataaatacaacaaaaccactcagagaaatgttgaggtgatcatgtgcgtgtgtgctgaggacgggaagactcttccaaatgccatctgtgttggcgccggcgacaaaccaatgaatgagtaccggtccgtggtgtattaccaggtgaagcaaccccggtggatggaaaccgttaaagtggccgtccctatcgaagatatgcagcgcatacatctgcgctttatgttcagacaccgctcaagcctcgagtccaaggataagggagaaaagaacttcgcaatgagctacgtgaaactgatgaaagaggatggcaccaccttacacgacggatttcacgacttggttgtgcttaagggagacagcaagaagatggaagatgcatctgcttacctcaccttaccctcgtatcgacaccacgtggaaaataagggagctacactgtcccggtcttcctcgtcagtcggggggctgagcgtgagctcccgggacgtgttttctatctcaaccctcgtttgttccactaaactgactcagaacgtgggcctgctcggcctgctaaaatggcgcatgaagccccaactcctgcaggaaaacctcgagaaactgaagatcgttgatggtgaagaggtagtgaaatttttgcaagatacactggatgctctgttcaatatcatgatggagcatagtcagtctgatgaatacgacatcctggttttcgacgcccttatctatattatcgggctcatcgccgaccgtaagttccaacacttcaatactgtgctcgaggcttacatccagcagcactttagtgcaactctagcctacaaaaagttgatgacggtgctcaagacctaccttgatacctcttccaggggcgagcagtgtgagccaattttaaggaccctgaaggcactcgagtacgtgttcaaattcattgtgcgctccagaactctattcagccagctttacgaaggcaaagaacagatggagtttgaggagtctatgcggaggttgttcgagagtataaacaatctcatgaaaagccagtacaagaccaccattcttttgcaggtggcggcactgaaatatatcccgtctgtgctgcatgatgtggaaatggtgtttgatgctaagctactgtcccagcttctttacgagttctatacctgtataccccctgtgaagctgcaaaaacaaaaggtccagtcaatgaacgagatcgtccagagtaaccttttcaagaaacaagaatgcagggacattctacttcccgtcatcactaaagagctgaaggaactgctagagcagaaggatgacatgcagcatcaggtgttagaaaggaaatactgtgtggaactgctgaactctattcttgaggtcctttcataccaggatgcagccttcacctatcaccatatccaagaaattatggtgcagttgcttaggaccgtcaaccgtaccgtgatcacaatgggcagggatcacatcttgatttcacactttgtggcttgtatgactgcaattctgaaccaaatgggggaccagcactattctttttacatagagacatttcagacttcaagcgagcttgtagacttcctcatggagacatttattatgttcaaagacctgatcgggaaaaatgtctacccaggagactggatggccatgagcatggtgcagaacagagtgtttctaagggccattaacaagttcgccgaaacaatgaaccagaagtttctggaacacacaaatttcgagtttcaactatggaataattattttcatctggcagtcgccttcattacccaggatagcctccagctggaacagtttagtcatgcaaagtataacaagatactaaacaaatatggggatatgaggcgccttataggtttttctattcgcgatatgtggtataagctcgggcagaataagatctgcttcattcccggtatggtcggcccaatactcgaaatgaccctgataccagaagctgaactgcggaaagccaccatcccaatcttctttgacatgatgctttgcgagtaccagaggagtggcgatttcaagaagttcgagaacgaaatcatccttaaactggaccacgaagttgagggcggccgcggtgacgaacagtacatgcagctgcttgagtctattctgatggaatgtgcggcagagcatcccacaattgcaaagtctgtagaaaattttgtcaatttggtgaaggggctgttagagaaactgctcgactatcgcggtgtaatgacagacgagtccaaagacaatcgaatgtcttgtacagtaaatctgctgaacttctacaaggacaacaatcgggaggagatgtacatccggtacctgtataagttgagggacctgcacctggattgtgataactataccgaggctgcttataccttgctcctccatacttggctgctaaaatggtcggatgaacagtgtgcctcccaggtcatgcagactggccaacaacacccgcaaacacacagacagctaaaggagacactctatgaaaccattatcggctatttcgacaagggtaagatgtgggaggaagccatttcactttgcaaagagctcgctgaacaatacgagatggagatctttgattacgagctgctgagtcaaaacctgatacagcaggcaaaattttacgaatctattatgaaaattctgaggccaaaaccagactatttcgcagtgggttactacggtcaggggttcccctctttcctgcgtaataaagttttcatatatcggggaaaagaatacgagcgcagggaggactttcagatgcaactcatgacacagttcccaaatgccgagaaaatgaatacaaccagtgcccctggggatgatgtcaaaaatgcccccggtcagtatattcagtgctttactgtccagcctgtgctggatgaacacccgagatttaagaataagccagttcctgatcagattattaacttttacaaaagcaattacgtgcagcggtttcattacagtagaccagtgcgtcgtggaacagtggaccccgagaatgagtttgcatcaatgtggatcgagcgaacctcattcgtgactgcctataaacttccaggaatacttagatggttcgaagtcgtgcatatgtctcaaacaaccatcagtcctctggagaatgcaatcgaaactatgagtacagcaaatgaaaagatccttatgatgataaaccagtaccagagcgacgaaaccttacccatcaaccccttgtcaatgcttctgaacggaatcgtggacccggccgtaatgggtggatttgctaagtacgagaaggccttttttaccgaggagtatgtccgggaccatcccgaagaccaggataaactgacccatctcaaggatttgatcgcttggcaaatccccttccttggtgccggtatcaagattcatgaaaagagagtctcagataacctaaggccctttcatgaccggatggaggaatgtttcaagaacctgaaaatgaaagtcgagaaagaatatggtgtgagagaaatgccagacttcgacgacagaagagtgggacgcccgagaagcatgttgaggagctacaggcagatgtccatcataagtctggcgtctatgaactctgattgcagcacccccagtaagcctaccagcgagtctttcgatctggagctggcaagcccaaagactcccagagtagaacaggaagagccaattagcccgggtagcaccctgccggaggtcaaactcaggcgaagcaagaagcgaactaagagaagctcagtagttttcgcggatgaaaaggctgcagctgagagtgacctcaagaggctgtcaagaaagcatgagttcatgtcagacaccaacctcagcgagcatgctgctatcccactaaaggcctcagtgctgtctcagatgagtttcgcaagccagtccatgcctactatccctgcacttgctctcagcgtggctggtatccccggcttggatgaggctaacacaagccccaggctgagccaaacatttctccaactatccgatggcgataagaaaacactgacacggaaaaaagttaatcagttttttaagacaatgctcgccagtaaaagcgccgaggagggtaagcaaattccagattcactgtccaccgacctctag

SEQ ID NO: 185046 - DNA, 1011 bp, synthetic construct
  misc_feature 1..1011: note = Description of Artificial Sequence: Synthetic coding sequence
  source 1..1011: mol_type = other DNA
atgtgcgtgtgcgccgaggacggcaagaccctgcccgtggccgtgccaatagaggatatgcagagaatacacctgagattcatgtttagacatagatcaagccttgaatccaaggataagggagagaagaactttgcaatgtcatacgtgaagctgatgaaagaagacggtaccaccctccatgacgggtttcatgacctagtcgtgttaaaaggcgactccaagaagatggaggacgcctctgcctatcttacattacccagctacagacaccatgtagagaacaaaggggccactctgtcacgatcgtcctctagtgttggaggccttagcgtcagctccagagacgttttctccatttctacccttgtatgcagcacaaaacttacccagaacgtaggtctccttggtctgctgaaatggcggatgaagccacagctggaagagtccatgcggcgtctcttcgaatctattaacaacttgatgaaatcccagtataagacaacaatcctgctgcaggtagcggctttaaagtatatcccatccgtactccacgacgtcgagatggtgttcgatgccaaacttctgtcccagcttctctacgagttctatacctgcatccctcccgtgaagctgcagaaacagaaggttcaaagcatgaatgagattgtgcaatctaatctgtttaagaagcaggagtgcagggacattttgctgcccgtcatcacgaaagagctgaaagagctgctcgagcaaaaggacgacatgcagcaccaggtcctggagcggaagtattgcgtcgagctgctgaatagtatcctagaggttctctcttaccaggatgcggctttcacgtatcatcacatccaagaaataatggtgcaactgctgaggacagtgaaccggaccgtgatcacaatgggcagggaccatatcttgattggcgcttgttgcaattgtggattcccctcatctaccccgcattcacttatacaatggctgtgggggtag

SEQ ID NO: 185047 - DNA, 2676 bp, synthetic construct
  misc_feature 1..2676: note = Description of Artificial Sequence: Synthetic coding sequence
  source 1..2676: mol_type = other DNA
atgaccgccatcctgaaccagatgggcgaccagcactacagcttctacattgagaccttccagacgtcttcagagcttgtggacttcctcatggagaccttcattatgtttaaagatctcatagggaagaatgtctatccaggcgactggatggcaatgagtatggtccaaaatagagtgttcctccgtgcgatcaacaagtttgccgagaccatgaaccagaagttccttgaacacaccaacttcgaattccagctgtggaataactacttccacttggctgtggccttcatcacacaggactccttacagctcgagcagtttagtcatgcaaaatacaacaagattctgaataaatacggcgatatgcggaggttgattggattttccattcgtgacatgtggtataaactgggacagaacaagatctgctttataccggggatggtggggcccattctcgaaatgaccttaattccagaggccgagcttcggaaagccacgattccgatcttcttcgatatgatgctgtgcgagtatcagcggtctggcgacttcaagaagtttgagaacgagatcattctgaagctggaccatgaggtcgaaggaggacgcggagatgagcagtatatgcaattgcttgaaagcattctcatggaatgtgcagcagagcaccctaccattgcaaaatctgttgagaattttgttaatctggttaaaggtctcctggaaaagttgcttgactatcgcggagttatgacagacgagtccaaggataatcgcatgtcctgcaccgttaatcttttgaatttctacaaagacaacaatcgcgaggaaatgtatatccgctacctctataaactgagggaccttcatctggactgcgataattataccgaggcagcctacactctgctccttcatacgtggctgcttaaatggagcgatgagcaatgcgcctctcaggttatgcagaccggtcaacagcaccctcagacccacaggcagctgaaagagactctgtatgagacaattattgggtatttcgataagggaaagatgtgggaggaggccatatctttgtgtaaggaattagctgagcagtatgagatggagattttcgactacgaactgctgagccagaacctgatccagcaggctaaattttatgaatccatcatgaagatcttgcgccctaaaccagattacttcgcagtgggttactacggccagggctttccttcgtttctccgtaataaggtgtttatatatagaggaaaagagtatgagagaagggaggatttccagatgcagcttatgacacagttcccgaacgctgaaaagatgaatacaaccagcgcccccggagatgatgtgaaaaacgcccctggacagtacattcagtgctttaccgtgcagcccgtcctggatgagcacccgcgctttaaaaacaagcccgttcccgatcagatcatcaatttctacaagtcaaattacgtccagagattccattactcccgccccgtgcgtcgtggaacagtggaccctgaaaatgaatttgcttcgatgtggatagagaggacttcattcgtcaccgcttacaagctgccgggcattctccggtggtttgaagtcgttcatatgtctcagaccaccatctctccgctggagaatgccatagagacaatgtctaccgcgaacgaaaagattctgatgatgattaatcagtatcagtctgatgagaccctcccaataaaccctttgtctatgcttttgaacggaatcgtcgatcccgccgtgatgggcggttttgctaaatacgagaaggccttcttcaccgaagaatatgtgagggaccatcccgaggatcaggataaactgacccacctaaaagacctgatcgcctggcagattccgttccttggagcggggataaagatacatgagaagagagtctctgacaatctgcgtcccttccatgatcgaatggaagagtgctttaaaaatctgaagatgaaagttgagaaggagtatggggttcgggaaatgcctgacttcgatgaccggcgagtgggaaggcctcggagcatgctaagaagctatcgccaaatgtccatcatttctctggcttcaatgaattcggattgctcaacacctagcaaaccaacatcagagtcatttgatttggagctcgcctcaccgaaaaccccccgcgtggagcaggaggagcctattagtccaggcagcacgctgccagaggtgaaattaagacgttccaaaaaacggacaaaacgatcatcagtggttttcgcagacgagaaagctgccgccgagtctgaccttaagaggctatcccgcaaacatgagttcatgtccgacaccaacctgtcggagcacgccgccattccactgaaagcgagtgtcttgtcccagatgagcttcgcaagccagagtatgcccacgatacccgctcttgccctaagtgtcgccggaatacccggtcttgatgaagccaatacaagcccacgcctgtcacagaccttcctgcagctgtccgacggtgataaaaagaccctcactcggaaaaaggtaaaccagttctttaagaccatgcttgcctcgaagagtgctgaagagggcaagcaaatccctgactctttgtcgaccgatctgtag

SEQ ID NO: 185048 - DNA, 6093 bp, synthetic construct
  misc_feature 1..6093: note = Description of Artificial Sequence: Synthetic coding sequence
  source 1..6093: mol_type = other DNA
atgtggacccccaccgaggaggagaagtacggcgtggtgatctgctcctttcgtggcagcgtgccccaaggtctggttttagagatcggggagactgtacaaattctggaaaaatgcgaaggatggtacaggggagtctcaacaaagaaaccgaacgtaaaaggcatttttcccgccaactacattcacctcaagaaagctatcgtgagtaatcgaggtcaatatgaaacagttgtgccattggaagattccatcgtgactgaagtcacagcaactctacaggagtgggcctcactgtggaaacagctgtacgtgaagcacaaggttgacctgttttacaagctacggcacgtgatgaatgagttgatcgatctacggcggcagctgcttagcggacacctcactcaagaccaggttagggaggtgaagagacatataacagtgcggctagactgggggaacgagcacctcggactcgacctggtcccacgaaaggacttcgaagtagtggactcagatcaaatctcagtgtcggacctttataagatgcacctgagcagtcgacagtcagttcagcagtccactagtcaagttgacactatgaggcctcgccatggagagacgtgcagaatgcccgtgcctcatcatttttttctatccctgaagtcattcacgtacaatacaataggtgaggacacagacgtcttcttcagcctgtatgacatgcgcgagggcaaacaaatatcagagcgctttctcgttcggttgaacaaaaatggaggcccgaggaatccagaaaagattgaaaggatgtgtgccctgtttaccgacctttcttccaaagacatgaaaagggacctgtacattgttgcccatgtgatacgaataggaagaatgttgttgaatgacagcaaaaaggggccaccacacctacattataggaggccctacggctgtgctgttctatccattctggacgtccttcagagtctgacagaagtgaaggaggaaaaggatttcgtgctgaaagtatacacctgcaataatgagtccgaatggagccagatccacgaaaacataataagaaagtccagcgccaaatactccgctcctagtgccagccatgggctgatcatcagcctgcaactcctgagaggcgacatggaacagattcggcgagaaaacccaatgatatttaataggggactggctataactagaaagctcggttttccagatgtcattatgccaggcgacatcaggaacgacttatacctgactctcgagaagggtgatttcgagaggggcggaaaatctgtgcagaagaacatagaagtgaccatgtatgtgctgtacgcggacggagagatactgaaggattgcatctctctgggttcaggtgaaccgaaccgctccagctatcactctttcgtactgtatcatagtaactccccccgttggggcgaaataatcaagctgcctatccctattgacaggtttaggggttcccatttgcgatttgaatttaggcattgctcaacaaaggacaagggcgaaaagaagttgtttggttttgcattctctacacttatgagagacgatggcaccaccctcagcgatgacattcatgaactctacgtttacaagtgtgacgaaaactctactttcaataaccacgcgctatacctcggactgccatgctgcaaggaggattacaacggatgtccaaacattccgtcctcactgatctttcagaggtccaccaaggagtcgttctttatcagtactcagctctcatcaacgaagttaactcagaacgtggacctcttggctcttctcaagtggaaggcctttccagatcggattatggacgttctcggaagactgagacacgtgtcaggcgaggagattgtcaagtttctgcaggatatcctggatacactattcgtgattctggacgacaacacagaaaagtacgggctgctggtgtttcagagcctggtgttcatcattaacctgctaagagacatcaaatattttcacttccgccccgtgatggatacctacatacaaaagcatttcgcaggcgcgctggcttataaggaactcattcgctgcttgaagtggtacatggattgcagcgccgagctgattcgacaggatcacatccaggaggcaatgcgggcactggaatatcttttcaaatttattgttcagtcacggatcctgtactcccgagctacctgtgggatggaggaggagcaattcagaagcagcattcaagaactctttcagtccatccgattcgtgttaagcctcgatagcagaaattctgaaacactcctattcacacaggccgcactacttaactcctttcctaccatctttgatgaactcctccaaatgtttacggtgcaagaggtcgccgagtttgttagaggaacactcggcagcatgccatccactgtgcatatcggtcagtctatggacgtggtgaaactgcaaagcattgctcgtaccgttgactcacggctgtttagcttctcagaaagtcggcgtatcctgttgcccgtggtgctccatcacattcatctccatctgcggcagcaaaaggagctcctgatctgctccggcattctgggaagtatcttttcaattgttaagacgagttcattggaagccgacgtgatggaggaagtggagatgatggtcgagtcgctgcttgatgtgctcctgcagactttgctcacaatcatgtccaagagccatgctcaggaagcagtcaggggtcagcggtgcccacaatgtaccgctgagataaccggggagtacgtcagttgtctgctgagtctgctccgacaaatgtgtgacacacactttcagcatctgctggataattttcagtctaaggatgagctgaaggagtttctgctgaaaatcttctgtgtctttagaaatttaatgaaaatgagcgtgttccctcgtgactggatggttatgagactgttaacttccaacattattgtaaccaccgtgcagtatctctcttctgccctgcataaaaacttcactgaaacggacttcgactttaaggtttggaattcctacttttctctcgccgtgctgttcatcaatcagccatcattgcagctcgagattatcacaagcgctaagcgtaagaaaatcctagataagtacggcgatatgcgagtcatgatggcatacgagttatttagcatgtggcagaatttgggagagcacaagatccactttatacccgggatgatcgggccttttctcggcgtaacgcttgttccacagcccgaggtccggaacattatgattcctatttttcacgatatgatggactgggaacaacgcaagaatggaaattttaagcaggtggaagcagagcttatagacaaattggattctatggtctctgaaggcaaaggcgacgaatcgtaccgtgaacttttcagtctgctgacacaactgttcgggccttacccttcactgctggagaaagttgaacaggagacatggagagagactggaatatccttcgtcaccagcgttacccgacttatggagcggctgctggattacagagactgcatgaaaggagaggaaactgagaacaaaaagatcggttgtactgtgaatctgatgaacttctacaagagcgagatcaataaagaggaaatgtacatacggtacatacacaaactttgtgatatgcacctccaagccgagaactacactgaggccgcgttcacattgcttttgtattgtgaactgcttcaatgggaagaccggcctctgcgcgaatttctccattatccgagccagacagagtggcagcgtaaagaggggctctgccgtaaaattattcactactttaataaggggaagtcgtgggaatttgggatcccactctgccgcgaactggcctgtcagtacgagtcactgtatgactaccagtccttaagctggatccgcaaaatggaagcgtcttactatgacaacatcatggagcagcagcggttggagcccgaattttttagagtaggcttttacgggcggaaatttcctttttttctgcgcaacaaagagtatgtctgccgcggacatgattatgaacgactcgaggcctttcagcagcggatgttgtccgaattcccacaagccgtggcaatgcaacacccgaaccatccagatgatgcaattttgcagtgtgacgctcagtacttgcaaatttacgccgttaccccgatcccagactacgtggacgtgcttcagatggatcgtgtgcctgaccgggtcaagtccttctacagagtgaataatgttcgaaagtttaggtatgatcgtccctttcacaagggtccgaaggacaaggagaacgagtttaagtccctttggatcgaacggactactctcacgctgacccactctctacccggcatcagcaggtggttcgaagtcgaacgccgcgagctggtagaggtgagtcctttggagaatgctatacaggtggtggaaaacaagaaccaggaactgagaagcctgatttctcagtatcagcataagcaggttcacggcaacatcaacctcctcagcatgtgcctgaacggagtcatcgatgcagctgttaacggcggcatcgctaggtatcaggaggctttctttgacaaagattatatcaataaacatcctggcgatgcagagaaaattactcagcttaaagagctgatgcaggaacaggtgcatgtgttaggcgtcggcctcgcagtgcatgagaagttcgtgcatcctgagatgcggccactacataaaaagcttattgatcaatttcagatgatgagggcctcactgtatcacgaatttcctgggctggacaagctgagtcctgcgtgcagcggaacctccacccctcggggcaacgtgctcgccagccacagccctatgtccccagaaagcatcaagatgacccacaggcacagcccaatgaatttaatgggcaccggacgacacagctcttctagtctgagttcccacgcgtcttcagaggctgggaacatggtgatgctcggcgatgggtccatgggggatgccccagaagatctctatcaccacatgcagcttgcctatccgaatcctaggtaccagggcagcgtgaccaacgtcagcgtcctgtcaagtagtcaggccagtccctctagtagtagcctttcctcgactcacagcgcaccttcccaaatgatcacgtcggctccttcaagtgcacgtggatccccaagccttcctgacaagtaccggcatgcccgtgagatgatgctacttctgccaacttatagggataggccatcatctgccatgtatcctgccgctattctcgagaacggccagcccccgaactttcagcgagcgctcttccagcaggtcgtcggcgcttgtaagccttgctctgatcctaacctgtccgtcgctgagaaaggtcactattcactgcattttgatgcatttcatcaccctttgggcgacacccctcccgctttaccagccaggacgctccggaaatcgcctctccatcctatccctgcgagcccgactagcccccagagcggactcgacggctcgaactccactctaagcggctccgcaagcagtggagtttccagtctcagtgaatccaactttggccacagttcagaagccccacccaggacagacacaatggacagcatgccgtcgcaggcctggaatgcagacgaggatctggagccaccataccttcccgtgcattatagcctcagcgagagcgcagttctcgactcgatcaaagcccagccctgtagaagccactctgcaccgggatgcgtaattccacaggaccctatggatccccctgccctgcccccgaagccataccatcctaggttgcctgcactcgagcacgacgagggcgtcctcctgcgtgaggagaccgaacgtccccgaggactccacaggaaagctccactgcctcctggctccgcgaaagaagaacaggcaaggatggcctgggagcatggaaggggagagcagtag

SEQ ID NO: 185049 - DNA, 1785 bp, synthetic construct
  misc_feature 1..1785: note = Description of Artificial Sequence: Synthetic coding sequence
  source 1..1785: mol_type = other DNA
atgcccaagtggctggaggagaccgagaacaagaagatcggctgcaccgtcaatctgatgaatttttataaaagcgagatcaacaaagaagagatgtatatacggtacatccacaagctctgtgatatgcacttgcaggccgaaaactatacagaagcagcgtttaccctgctgctgtactgcgagcttcttcaatgggaggatagaccgctccgagagttcttacactacccttctcagactgaatggcaaagaaaggaaggcctgtgccggaagatcatccactacttcaataagggaaagtcttgggagtttggcatcccactatgcagggagctggcatgtcagtatgaaagtctgtacgattatcagtcattaagctggattagaaaaatggaagctagctactatgacaacatcatggagcagcaacggctggaacccgagttcttcagggtgggcttctatggccggaaatttcctttctttctgagaaataaggaatatgtatgcaggggccacgattatgaacgcctcgaagctttccagcagcggatgctgagtgagtttccacaggccgtggctatgcaacatcctaatcatccagacgatgctatcctgcaatgtgatgcacagtaccttcagatttatgctgtaactcccataccggattacgtagacgttctccaaatggacagagtgccagaccgggtaaagagcttttatcgcgtaaacaatgtccgtaaattcagatatgaccggccttttcacaaaggacctaaagataaggaaaatgagttcaagagtttgtggattgagaggactacacttacactgacccattcactcccaggaatctcaaggtggttcgaagtagaaaggagagagttagtggaggtgtctcccttggaaaacgcgatccaggtggtggagaacaagaaccaggagctcagaagtctcataagtcagtatcagcacaagcaggtccacgggaatattaacttgctttctatgtgtcttaatggggttatcgacgcagccgttaacgggggaatcgcccgctatcaggaggcattttttgataaggattacataaataagcaccctggcgacgccgagaagatcacacagttaaaggagctcatgcaggaacaagtgcatgtcctcggcgtgggactggcggtgcatgagaagtttgtgcatcctgagatgaggcctctccacaagaaactcattgatcagtttcagatgatgcgcgcatctctgtaccacgagtttccgggactggataagctgagtcctgcttgttctggaactagcacaccccgggggaacgtgctcgcaagtcattcaccaatgagccccgagagcattaagatgacccaccggcattcacctatgaacctcatgggtacaggcagacactcatcctctagtctctcgagtcatgcatcaagtgaggccggcaatatggtgatgttaggcgacgggtctatgggtgatgctccagaggacctataccatcacatgcaactggcctacccgaaccctcggtaccaggggagcgtcactaatgtatcggtgctttctagttcccaagcgtccccctcaagttcctctctttcaagcactcatagcgcaccaagccagatgattacatcggctccctcctccgccagagggtctccatccctgcctgacaaatacagacacgcgcgggaaatgatgcttctgcttccaacttacagagacagaccttctagtgctatgtatcctgcggcatag

SEQ ID NO: 185050 - DNA, 5778 bp, synthetic construct
  misc_feature 1..5778: note = Description of Artificial Sequence: Synthetic coding sequence
  source 1..5778: mol_type = other DNA
gtgatcgccagcttccggggcaccgtgccctacggcctgagcctggaaatcggagatacagtgcagatcctggaaaaatgcgacggctggtacagagggtttgccctcaagaacccaaacatcaaaggcatctttccaagttcttacgtgcacctaaaaaacgcttgtgtcaagaataaagggcagttcgaaatggtcatcccgaccgaggattccgtaatcaccgaaatgacaagcacccttcgggattgggggacaatgtggaagcagctctacgtgagaaacgaaggggacttgttccaccgattgtggcatataatgaacgagattctcgacttacgacggcaggtgctcgtggggcatctgacacatgatcgtatgaaggacgttaagcgacacattacagctagactcgactgggggaatgaacagttgggattggacctggtgccgcgcaaagagtacgcgatggtagatccagaagatatctcaattaccgaactctaccggctaatggagcaccgccaccgcaagaaagacaccccagttcaggcctcttcacaccacctgttcgtccagatgaagagcctgatgtgtagtaacctgggcgaggaactggaggtaatattttcactatttgactcaaaggagaatcgtcctatttcggagaggttcttcttacgactgaacaggaacggactgcccaaagcccccgacaagcccgaaagacactgcagtctgttcgtcgacttaggatcgtctgagttgagaaaggatatctatattacagtgcacatcatccggatcggacggatgggtgccggggagaaaaaaaacgcctgctcggttcagtatagaagaccttttggctgcgcagtgctgtcaatcgccgatctcctgactggggagacaaaagatgatctgatccttaaggtatatatgtgcaacaccgagtcggagtggtaccagattcacgaaaacatcattaaaaagctgaatgccagatacaacctgaccggcagcaacgccggacttgctgtctctctccagctactacatggtgatattgaacagatccgtagagagtactctagtgtgttctcccatggagtgtccatcacacgcaaactcggtttttcgaatattattatgccaggcgagatgcgaaacgatttgtatattacaatagaaagaggggagtttgaaaaggggggaaagtcagttgcgcgcaatgtggaagtgaccatgttcatcgtggacagtagtggtcagactctgaaagatttcatttcctttgggtctggggaaccccccgcctccgagtaccactctttcgtgttgtaccataacaattcaccacggtggagcgagctgttgaagctgccaattccagttgacaagtttcggggcgcccacatccgttttgagtttaggcactgctccactaaggaaaaaggggaaaagaagctatttggtttctcatttgtgccgctgatgcaagaggacggtcggacactgcctgatggcactcacgagctaattgtgcataaatgcgaggaaaataccaatctgcaggatacgactaggtacctgaaactgcccttttccaagggcattttcctggggaataataatcaggccatgaaggcaaccaaagagagcttttgcattacatcgttcctgtgctccacaaagctcactcagaacggcgatatgctggatctgctcaaatggcggactcatcccgataagattacaggctgcttatccaagctgaaagaaattgacggatctgagattgtgaagtttctccaagatactctagatacactgtttggcatactggacgaaaattcccaaaaatatggcagcaaggttttcgatagcctcgtacacataatcaacctcctccaagattctaagttccatcacttcaaaccagttatggacacctacatagaatcgcacttcgctggtgctctcgcgtaccgggatctcatcaaggttcttaagtggtatgtggaccggattacagaggcagagaggcaagagcatatccaagaggtgctcaaggcacaggaatacatcttcaaatatatagtgcagtcccggcgtctctttagccttgccactggtggccagaatgaggaggagttccgttgttgtatccaggagcttttgatgagcgtccggttttttctgtcccaggagagtaagggcagtggcgccctgagtcagtctcaggccgtgtttctctccagcttcccggccgtctactccgaattgctgaaactatttgatgttagggaggtggcaaacctggtgcaggatacccttggatcgctgcccacaattttgcatgtggacgacagtttgcaggccattaagctgcagtgcatcggcaaaaccgtcgaatctcagctgtatacaaatcccgattcccgatatattctcctgccggtggtcttgcatcatttacacatccatttacaggaacagaaagacttgattatgtgtgctcggatcttgtcaaacgtcttctgccttatcaagaaaaactcttctgaaaagtcagtgttggaagagattgatgtgattgtggcgtcactgctcgatatccttctgcgcaccattctggagatcacgtcacggcctcagccgtccagttctgccatgcgctttcagtttcaagatgtcacgggggagttcgtagcatgcctactgagcctgctgcgccagatgactgaccggcattatcagcagctgctggacagtttcaatacaaaggaagagttacgggatttcttgctccagatcttcacagtattccgaattctgatcaggcctgaaatgtttcctaaagattggaccgtcatgcggttggtcgcaaataatgttatcatcaccacagtgctgtacctatctgatgccctgagaaaaaacttcctgaatgaaaacttcgactacaaaatctgggattcttatttctatctggctgtgattttcatcaaccagctgtgtctccagttggagatgttcaccccttccaaaaaaaaaaaggtactggaaaagtacggggacatgcgagttaccatgggctgtgagatatttagtatgtggcagaatctcggggagcacaaattgcactttatccctgctttgatcggtccatttctagaggtcaccctcatcccccaacctgacctgcgcaatgtgatgatccccatctttcatgatatgatggattgggaacaaaggcgatcgggcaatttcaaacaagtcgaagctaagctgatcgataaactggactcattgatgtcagaagggaaaggcgatgaaacctatagggagctgtttaacagcataattcccctcttcggcccttaccccagcctgcttaaaaaaatcgaacgcgagacttggagagaaagtggcgtgagcctgatcgcaacggtaacaaggcttatggagaggctgctggactatcgggactgcatgaaaatgggcgaagttgacggaaagaagattggctgtaccgtgtcgttgctgaatttttataagacagagttgaacaaggaggagatgtatattcgatacattcataaactgtatgatctgcacttaaaggcacaaaattttaccgaggccgcatacaccctgttgctgtatgacgaactgttggagtggagcgacaggccactcagggagttcttgacctatccaatgcagaccgaatggcaacgcaaggaacacctgcacttgactatcatccaaaattttgatcgaggcaaatgttgggagaacggcatcattctttgcaggaagatcgctgagcagtacgagtcatattatgactaccggaacttgtcaaagatgcgcatgatggaggcttccctgtacgataaaatcatggaccagcaacggctggagcccgaattttttagagtgggattttacggaaagaaatttccatttttccttcggaacaaggagtttgtctgccgcgggcacgattacgagagactcgaagcatttcagcagcgaatgctcaatgaatttccccatgccattgccatgcaacacgccaaccaaccggacgaaactatttttcaggccgaggctcaatacttacagatatatgcggtgactcccatcccagagtctcaggaggtactgcagcgggagggggttccagacaatatcaaatctttttataaagtgaaccatatatggaaatttcggtacgaccgtcccttccacaaggggacaaaggacaaagaaaacgagtttaaatcattgtgggtcgaaaggacctctttatacctcgtgcagtccctcccagggatcagccgttggttcgaggtcgagaagcgtgaggtggtggagatgtctccactggagaatgctatcgaagttctcgaaaataagaaccagcagttgaagacattaataagtcagtgccaaacaagacagatgcaaaacattaaccccctcacaatgtgtctcaatggcgtgattgacgccgcagtaaatgggggcgtgagtaggtaccaagaggcattttttgtgaaggagtacatcctgagccaccctgaagacggggagaaaatcgcccggttaagggaactcatgctagagcaagcacaaatactcgagtttggcttggcagttcatgagaaattcgtgcctcaggatatgaggcctctgcataaaaaactggtcgatcaattttttgtgatgaagtcgtccctgggaatccaggaattcagtgcttgcatgcaagcgagccctgttcactttcccaacggtagcccaagagtctgtaggaactctgcccccgcatccgtcagcccagacggcacccgggtaattcccaggagaagcccactatcatatcctgccgtgaatagatactcctcttcatccctgtcttcacaggcctccgcggaggtatccaatataacaggacaaagcgaatctagcgacgaagtgtttaacatgcagccatccccttcaacatccagtctgagtagcactcacagcgcttctcccaacgtcacttccagtgcccctagttcagctcgcgctagcccactgttgagtgacaagcacaagcactctagagaaaacagctgcctctctccccgcgagcggccctgctctgccatataccccacacctgtggaacctagtcagagaatgttatttaaccacatcggtgacggggccctgcccagatccgatcccaatttgagtgcaccggaaaaagcaagccccgctagacacactacgtctgtttctcctagtccagctgggagaagcccattaaaaggttccgtgcagtcatttaccccctctccagtcgaataccacagccctgggttaatttccaattcaccagtactgagcggatcgtacagtagcgggattagttcactgagtaggtgttcaactagcgagacaagcgggtttgagaatcaagtcaatgagcagagtgccccccttcctgtaccggttcctgtacccgttcctagctatggcggcgaggaaccagtgagaaaggagtcaaagacacctccgccttattcggtgtacgaaagaacgctccgccggccagtgcctcttcctcattccctgagcatcccggtgactagtgagccacctgccctgccacctaaaccattggctgcgagaagcagtcacctggagaatggcgcccgcaggacggatccaggaccacgcccgcggcccctgccccgcaaagtgtcccagctctag

SEQ ID NO: 185051 - DNA, 5865 bp, synthetic construct
  misc_feature 1..5865: note = Description of Artificial Sequence: Synthetic coding sequence
  source 1..5865: mol_type = other DNA
gtgatcgccagcttccggggcaccgtgccctacggcctgagcctggagattggcgataccgtccagatcctcgagaaatgcgatggatggtatcgaggcttcgcgctgaagaaccccaatatcaagggtatttttccctcttcctacgtgcacctgaagaatgcttgtgtgaagaataaagggcaatttgagatggtcatcccaaccgaagatagcgtgatcaccgagatgactagcacattgagggactggggaacaatgtggaaacagctgtacgtgcgcaacgagggcgatctgtttcaccgactgtggcatataatgaacgaaatcctcgaccttaggcgccaggtgctggtcggacacttgacccatgaccgtatgaaggacgtgaagcgccatatcaccgcccggctggactgggggaacgagcagctgggtctagacctcgtcccaagaaaggaatacgcaatggtggatcctgaggacatctctattaccgaactgtaccggttgatggaacacaggcacagaaaaaaggatacgcctgtgcaggctagtagccatcatttatttgtgcagatgaagtctctgatgtgtagtaatttgggagaggagctcgaggtgatctttagcttgttcgactccaaggagaaccgccctatcagcgaacgcttcttcctgcgtcttaaccggaatggactgcctaaggcccccgacaaaccagagaggcactgttccctgtttgtggatctcggcagttccgagcttcggaaggacatctatattactgttcacattattcggatagggcgtatgggggctggggaaaagaaaaatgcttgttccgttcagtaccgtagaccttttggctgtgcggtgctgtcaattgccgatctactgactggcgaaacaaaagacgatctgattctgaaggtgtacatgtgtaatacagagagcgaatggtaccagatccacgagaacattatcaaaaagctgaatgctagatacaatctgaccggcagcaatgccggcctggccgtatctctgcagctcctgcacggggacatcgaacagattcgccgggaatactcatcagtgttctctcacggagtgtcaattactagaaaactcggcttctctaacatcataatgcccggagagatgcggaacgatctctatattacgatcgagcgcggagaattcgagaagggcgggaagtcagtggcccgcaacgtcgaagttaccatgtttatcgtcgactctagtggacagactttaaaggatttcataagtttcggaagtggagagcctcctgccagcgaataccacagctttgtgctctaccacaacaacagtcccaggtggtcagagctgctcaaactacctattcctgttgacaaatttcggggcgcgcacattagattcgagtttcggcattgcagcacaaaggagaagggggagaaaaagctgtttgggttttccttcgttcctctcatgcaggaggatgggcgaaccctcccagacggcacacatgaattgattgttcacaagtgcgaggaaaatacgaatctacaggataccacgcggtacctaaagctcccttttagcaagggcatctttctcggaaataacaaccaggccatgaaggctaccaaggagagcttctgcattaccagctttctctgctctaccaaactcacccagaatggtgacatgctggatctactgaagtggagaacccatcccgataagataaccgggtgtctgagcaaactgaaggaaattgatgggagtgagattgtcaagtttctgcaggatacactggatacgctctttggcattttggacgagaactcccagaaatatggttctaaagtgttcgatagcttggtgcacattatcaatctactgcaggactcgaaattccaccatttcaagccagtgatggacacctacattgagagtcattttgcaggcgcattagcttacagagacctgattaaggtcttgaaatggtacgtggaccgcatcaccgaggccgagagacaggaacacatccaggaagtgcttaaggcacaggagtatattttcaagtacattgtccagtctaggaggctattttccctcgctacaggcgggcaaaatgaggaggagttccggtgttgcatccaggagcttctgatgtccgtccggttcttcctgtctcaggagtctaagggcagtggtgccttatcacaatctcaagctgtctttctgtcttctttccccgccgtgtactcagaactgctgaagctgtttgatgtgcgagaggtggccaatctcgtccaggatacattaggctccttgcccactatacttcatgttgatgattctctgcaggctatcaagctccagtgcattgggaaaactgtggaatctcaactatacacgaaccccgactccaggtacattttactgcccgtggtcttgcaccacctccatatccatctgcaagaacagaaagatctcatcatgtgtgccaggatcttgtctaacgtcttctgtctgatcaaaaagaactcaagcgagaaatcggtcctcgaggaaatcgatgtgattgtcgcatctctcctggatattttgcttcgaacgattttagaaatcacaagccgccctcagccaagttcttctgcaatgagattccagttccaggatgttactggggagttcgtggcctgcctgttaagtcttttaagacagatgaccgatcgtcattatcagcagctactggatagctttaatacaaaagaagaattaagggattttctgctgcaaatcttcacggtatttcgaattttaataaggccagagatgttccccaaggactggaccgtgatgcgactagtggcaaacaacgtaatcatcactacagtgctatacctttccgatgctttgcgtaaaaatttcttaaacgaaaattttgactacaaaatctgggattcatacttttacctcgccgtgattttcatcaatcaactgtgtttacagctggaaatgtttacacccagcaaaaagaaaaaggtgctcgagaagtatggggacatgcgggttactatgggctgcgaaatttttagcatgtggcagaatttgggtgagcacaaacttcatttcattcctgcactgataggaccattcttggaagtgacattgatacctcagccggacctcagaaatgtaatgatccccatcttccacgacatgatggactgggaacagcgcaggagtggcaattttaagcaagtggaggctaagttaatagataagctggactcattgatgagtgaaggcaagggagacgagacttaccgcgagctgtttaatagtattttgctaaagaagatcgagagggaaacctggagagagtctggggttagtctgatagccacagtgacgagactgatggaaaggctcctggactacagagattgcatgaagatgggcgaggtggatgggaaaaagatcggttgtaccgtttccctgcttaacttctacaagactgaactcaacaaggaggaaatgtatatccgatatatacataaattgtatgacctccatttgaaagcccagaatttcacagaggccgcatacacgttactactgtacgacgagctactggagtggtctgatagacccctgagggagttcctgacgtatccaatgcagacagagtggcagcgaaaagagcatctacatctgaccattattcagaattttgataggggaaaatgctgggagaatgggatcattctgtgccggaagattgctgagcagtacgaaagttattatgactaccgcaacctctcgaaaatgcgcatgatggaagcaagcttgtacgataaaattatggatcagcagagactggaacccgaattcttccgggttggcttttatggtaagaaatttccctttttccttaggaataaagaatttgtgtgcagaggacacgactacgaaaggcttgaggcattccagcagcgaatgctgaacgaattcccacacgctattgccatgcagcatgcaaaccagcccgacgaaacgatcttccaagccgaagcccagtacttacagatctatgctgtcacaccaatccccgaaagccaagaagtgctgcaacgcgagggagtccccgacaacatcaagtctttttataaagtcaaccacatctggaagtttcggtacgaccggcccttccacaaaggcaccaaggacaaggagaacgaattcaaatccttgtgggtcgagcgaacatccttatacctcgtccagagccttcccggtatctctagatggtttgaagttgagaaacgggaggtagttgagatgtcacctcttgagaacgccatagaagttcttgaaaataagaaccagcagctgaagacactgatctcacagtgtcagacccggcagatgcagaacatcaatcctttgacaatgtgtcttaatggcgtaatcgacgcggctgtcaacgggggtgtgtcgaggtatcaggaggcttttttcgtgaaggagtatatactgtcacacccagaagacggagaaaagattgctcgattgagagagctgatgttggagcaggcacaaatcctcgagtttggactggctgtacacgagaagtttgttccacaggacatgaggcctctacataaaaaactggtggaccaattctttgtgatgaagagcagcctggggatccaggaattcagcgcttgcatgcaagcaagtcctgtgcacttccctaacgggtctccccgcgtgtgcaggaattcagctcccgctagtgtcagcccagatggcactcgggtaattcctaggcggagtcctctgtcctatccagccgtcaacagatacagttcttcttccctctcatcccaggctagtgccgaagtgagtaatattactggacagtccgaaagctccgacgaggttttcaatatgcaacctagcccctcgacaagctccctgtctagtacgcattctgcatctcctaatgttaccagcagcgccccgtcttccgcgcgagccagccctctgctctcggataaacataagcacagcagagaaaactcatgtctatcccccagagaacgaccctgttcagcaatctacccgactccagtagagccttctcagcgcatgctgttcaatcatatcggggatggggcgctcccacggagtgatccaaacctcagcgcacctgagaaggcagtgaatccgactccttcatcatggagcctagattctgggaaggaggccaaaaatatgtcagactctggaaagctgatttcccccccggtgcctccaaggcccacccagacagcaagccccgcacggcacaccacctccgtgtctcctagccccgctggtcgctctccgctcaaaggatctgtacagtcattcaccccatctcccgtggagtatcacagtccgggcctgatttcaaattccccagtgctgagtggctcctattcgagcggcatctcctccctaagccgctgctccaccagcgagacaagcggattcgagaaccaggtaaatgaacagtctgcccctctgcccgtgccggtccctgttccagtgccaagctacggaggtgaagagccagtcagaaaggaatcaaaaacaccaccaccttactcagtatacgagagaactttgaggcgacctgtcccgcttccccactctctgagcattcccgtgacgtctgagccaccagccctgccgccgaaacccttggctgcccgaagcagtcacctcgagaacggtgcccggcggactgacccaggtcccagacctcgtcccctgcctaggaaagtgtctcagctctag

SEQ ID NO: 185052 - DNA, 5928 bp, synthetic construct
  misc_feature 1..5928: note = Description of Artificial Sequence: Synthetic coding sequence
  source 1..5928: mol_type = other DNA
atgtggatccccaccgagcacgagaagtacggcgtggtgatcgccagctttcgcgggacggttccatacgggctgagtctggaaataggtgacacggtacagattcttgagaaatgcgatggctggtatcgggggtttgcactgaagaaccctaacatcaaggggatcttcccaagctcttatgtgcacctgaaaaatgcctgcgtcaagaataagggacagtttgaaatggtgattcctactgaagattcagtgatcacggaaatgacttcaactctccgtgattggggcacaatgtggaaacagctctatgtcaggaatgagggcgatctctttcataggttgtggcacattatgaatgagattctggatctgaggcgtcaagtgctggttggacatttgactcacgaccggatgaaggatgtcaaaagacacatcaccgcccgcctcgactggggaaatgagcagttgggtctggatttggtgcccagaaaagagtacgccatggtcgacccagaagatatatcaataactgaactgtatcgcctgatggagcatcggcatcgtaaaaaagacacacctgtccaggcgtctagtcaccatctgttcgtgcaaatgaaatctttaatgtgttccaacctgggcgaagagctcgaagtgatcttttccttgttcgatagcaaggagaaccgtcctatctccgagagattctttctccggctgaataggaacggcctgcccaaagctcccgataaaccggagaggcattgctcgttattcgtggatttgggtagctcagagttgcgaaaagacatatacataaccgtgcatataatcagaatagggcgaatgggtgccggcgaaaagaaaaacgcctgttcggtgcagtatcggagaccctttgggtgtgcggtgctttccatcgccgacttactgaccggggaaacgaaggatgatctgattttgaaagtatatatgtgcaatacagagtccgagtggtaccagattcatgaaaacatcattaagaaattgaatgcacgctacaatcttacaggctccaacgcaggcctcgcagtgagcttgcaattattgcatggagatatcgagcagatccgccgcgagtacagctcagtattctcccacggagtttctatcaccaggaagttggggttcagcaacattatcatgcccggtgagatgagaaatgacctctacatcacaattgaaaggggtgaatttgagaaaggcgggaagagtgttgcccgtaacgtggaggttaccatgttcatagtggattcttcaggacagacccttaaggatttcatctcttttggaagtggagagcctcctgcctccgagtatcattcattcgtgctctaccacaacaactcccctagatggtcagaactgctcaagctacccatccccgtagacaagttcaggggtgctcatatccgctttgagtttcggcattgtagcacgaaggaaaaaggggagaaaaagttgttcggattttcatttgtgcccttgatgcaggaagatgggaggacactcccggatgggactcacgaactgatcgtacataagtgcgaagaaaacaccaacctccaggacactactaggtacctgaaacttcccttcagcaagggcatatttctgggaaataataaccaagctatgaaagcaacaaaagagtccttttgtatcacaagctttttgtgttccacaaagctgactcaaaacggcgatatgctcgatctgcttaaatggcgcacgcatccagataagataactgggtgcttgtctaagctgaaggagatcgacgggtctgagatcgtcaagttccttcaggacactctggacaccctctttggcatcctcgatgagaattcgcagaagtatgggtctaaagttttcgattcacttgtacacataatcaacctgctgcaggactccaagttccaccactttaaacccgttatggatacctacatcgagtcacatttcgccggcgcgctggcctatagggaccttattaaggtgctgaagtggtacgtggacaggatcacagaggcggaacggcaggaacacatccaggaagtgttaaaagcacaggaatacatttttaagtacatcgttcagtccaggcgactcttttctttagccacaggcgggcaaaacgaggaggagtttcgctgctgcatccaggaactgctgatgagcgtaaggttcttcctctcacaggagagcaagggctctggtgcactcagtcagtcccaggccgtgttcttgtcttcttttcccgcggtgtactctgaactgcttaagcttttcgacgtgagagaagtcgccaacttggtgcaggacacactcggaagcctccctaccatccttcacgtggacgactccctgcaggcgatcaagttacaatgtattgggaaaactgtggaatcgcaattgtacaccaatccggacagtagatacattctgctgcccgttgtgctgcatcacctgcatatccatctgcaggaacaaaaggaccttattatgtgtgctcgcatcctcagtaatgttttttgcttgatcaaaaaaaactcatcagaaaagtccgtcttagaggaaatcgatgtgatcgtcgcatcactcctggatatactgttgagaacgattctagagataacttcccgtccccagccgtcttcttccgcaatgcgtttccagttccaggatgtgaccggtgaattcgtggcctgtctgctcagtcttctgaggcaaatgacagatcgccactatcagcagctcctggattcattcaacactaaagaagaactgcgggactttctgctccaaatcttcacagttttcagaattctgataagacccgagatgtttccgaaggactggacagtcatgcgccttgtggccaacaatgtaatcataacaacagtcctgtatctgtctgatgctctacggaagaactttctgaatgagaacttcgattataaaatttgggactcttacttttacttggccgtgatcttcatcaaccagttgtgtttgcagctagaaatgttcactccatccaaaaagaagaaagtgctagaaaaatatggcgacatgagagtcaccatggggtgtgaaatctttagcatgtggcagaacctcggcgaacataaattacatttcattcctgcactgatcgggcctttcttagaggttacgcttattccgcagcctgacctacgcaacgttatgattccaatttttcatgatatgatggattgggagcagagacgttctggcaacttcaagcaggttgaagccaaactgatcgacaaactggacagtctcatgagtgaaggcaaaggcgacgaaacctaccgcgaactgttcaactccataatcccacttttcggaccttacccaagcctgctgaagaaaatcgagcgggagacctggagggagagcggtgtgtccctcatagccactgtgacgcggctgatggaaagactcttggactaccgcgactgtatgaaaatgggcgaggttgatggcaagaagatcgggtgtacggtttccctattgaacttttacaagacagaattaaacaaggaggaaatgtacatacggtacattcataagctgtacgacctgcacctgaaagcccagaacttcacagaggcggcctataccttgctgctttatgacgagctgctcgagtggtctgacaggccattaagagagttcttgacataccctatgcagacggaatggcaaaggaaagagcacttgcacctcaccataattcaaaacttcgaccgaggcaaatgttgggaaaatggaatcatactttgtaggaagattgccgagcagtacgaatcctactacgactacaggaatctaagcaagatgcgcatgatggaggcttctctgtacgataaaattatggatcagcagcggctggaacccgagttcttccgcgtaggcttttatggaaagaaattcccttttttcttacgaaataaggagtttgtttgccgtggtcatgactacgaaagactcgaggcttttcagcagagaatgttgaatgagttcccacacgcgatcgctatgcagcacgcaaatcagccggacgaaaccatcttccaggccgaggctcagtatctgcagatctatgctgtgaccccgattccagagagtcaagaggtactgcagcgggagggagtccccgataacataaagtccttctacaaggtcaaccatatttggaagttcagatatgaccggcctttccacaagggtaccaaagacaaagagaacgaattcaaatctctgtgggtggagcgcactagcttgtaccttgtgcagtctctgcctggaattagtagatggtttgaggtcgaaaagcgcgaggtggtggaaatgtccccattagagaacgcaatcgaagtcctggagaacaagaatcaacagctgaaaacattgatctcacagtgccaaactagacagatgcagaacatcaaccccctgaccatgtgcttgaacggcgtgatcgatgccgctgtcaacgggggggtgtcccgttaccaggaggcattcttcgtcaaggaatatatactaagccatcccgaggatggagaaaaaatcgctagattgcgggagctcatgctggaacaggctcagatattagagttcggacttgccgtgcatgagaagtttgttccccaagatatgcgtccactgcacaaaaagctcgtcgaccagtttttcgtgatgaaatcttcattggggatccaggaatttagcgcctgcatgcaggcctcgcccgtacattttccgaacggtagtccaagggtgtgtagaaactcagccccagccagcgtgagccccgatggaacccgagtgattcctagacgcagtccactgtcctatcctgcagtaaaccgttacagctcatcgtccctgtcttctcaagcttccgctgaagtgagcaatattacagggcagagcgagtcttccgatgaggtatttaacatgcagcccagtccttccacttcgtcattgtcttccacacactcggcgtctccaaacgtgactagctctgcccccagttccgctagagcgagcccactgctctcagataaacataaacacagtagggagaattcctgcctgagtccgcgtgaaaggccgtgctctgccatctatcctacccctgtggaaccatctcagaggatgctgtttaaccacattggggatggtgcgctcccccgctcagacccgaatctgagcgccccagagaaagctgttaatcccaccccctcatcgtggtctctagatagcggaaaagaggccaaaaacatgtctgactccgggaaacttataagtcctcccgtgcctccaagacccactcagactgccagtccagcccgccacacaacgagtgtgtccccatccccggccggtcggagccccctgaaaggctccgtgcagtctttcaccccttctcctgtcgagtatcatagtcccggactgatttcaaactctcccgtactgtcaggcagctatagctccggcatcagctctttatcccggtgctccacgtcagagaccagcggctttgaaaaccaggtcaatgagcagagtgctcccttaccagtgcctgtgcccgtgcccgtgccatcctatggcggggaagagcctgtgcgcaaggaaagtaagacaccgccgccctacagcgtgtatgaacggactcttcggaggcctgtaccactccctcactctttaagcattccagttacttctgaacctcccgccctcccccctaaacctctcgctgcccgctctagccatcttgaaaatggcgcccgcagaactgatccagggccgaggccccggcccctgccccggaaggtttcacagctgtag

SEQ ID NO: 185053 - DNA, 5901 bp, synthetic construct
  misc_feature 1..5901: note = Description of Artificial Sequence: Synthetic coding sequence
  source 1..5901: mol_type = other DNA
atgtggatccccaccgagcacgagaagtacggcgtggtgatcgcctcatttaggggtacagtcccctacggcctgtctctggagatcggggacacggtgcagatactggagaagtgtgacggctggtaccgcggcttcgccctgaaaaacccaaacattaaagggatcttcccaagctcctatgtccacctgaaaaacgcttgtgtgaaaaataagggtcaatttgaaatggtaataccaaccgaggacagtgttatcactgaaatgacgtccaccctgcgcgattggggaactatgtggaagcagctttacgtgagaaatgaaggcgatctctttcatcgtctttggcacattatgaacgagatcctggacttgcggcggcaggtcctcgttggacatctcacacacgaccgcatgaaagatgtcaagcggcacatcacagccaggctcgattggggcaacgaacaattggggctggacttagtgcccagaaaggagtacgctatggtggacccagaggatatcagcattacagagctttaccgactgatggagcatagacaccgcaaaaaagacacacctgttcaggcgagcagtcaccatctgtttgttcaaatgaagtcattgatgtgctcgaatctgggagaagagcttgaagtcatcttcagcctgttcgatagcaaggaaaacagaccgatatcagagcggttcttcctgcgcctgaacaggaacggtttaccaaaagcccccgacaagccagagagacattgtagcctctttgtagaccttgggtcctccgagcttaggaaggacatttacatcactgtgcacattatcaggatcggccggatgggagcgggggaaaagaagaacgcctgtagtgttcagtatcgccggcctttcgggtgcgcagtgctgtctatcgctgatctgttgactggagagactaaggatgacctcattttgaaggtttacatgtgcaacaccgaatctgagtggtaccagatccacgagaacatcattaaaaagctgaacgcgaggtacaacttgacaggaagcaacgccggactcgcagtttccctccagttgctgcatggcgacatcgaacagatccgacgcgaatactcatccgttttctcgcatggagtatcaatcacccgcaaactggggttttccaacataatcatgccgggcgaaatgaggaatgacctctacattaccatcgagaggggggagttcgagaaggggggcaagtcagtcgctcgaaacgtggaggtgacaatgtttatcgttgacagctccggacagacactaaaagacttcataagcttcggcagcggcgaaccgccagccagcgagtaccacagctttgtcctgtaccacaacaactccccccggtggtctgagttgctcaaattgcctatcccggttgataagtttaggggggcccacatcaggtttgaattcagacactgcagtactaaagagaagggagaaaaaaagctctttggctttagcttcgtgccactgatgcaggaggatggccgtacactcccggacggcacacacgagctaattgtacataagtgcgaggagaacaccaatctgcaggatactacccgctaccttaaattgcctttttcaaagggcattttcctggggaataacaaccaggccatgaaagctaccaaagagagcttctgcataaccagtttcctgtgcagcacaaagctgactcaaaacggcgatatgctcgatcttctaaagtggcggacccaccccgataagatcacagggtgtctgagcaagctgaaggagatcgacgggtccgaaatcgtgaaatttcttcaggacactcttgacactttgtttggaatcctcgatgagaattctcagaaatacgggagtaaggtattcgactcgcttgtgcatatcataaacctgttgcaagattccaagtttcatcactttaaaccagttatggatacttacatagagagccattttgccggagctctggcataccgagatctaatcaaagttctcaaatggtacgtggaccggattactgaggcggagcggcaggagcacatccaagaggttttaaaggcccaggagtatatcttcaagtacatagtgcagagcagacgcttattctctctggcgactggaggacagaacgaggaggaattccgctgttgtattcaggagctgctgatgagtgtccggttttttttgagtcaggagtcaaaaggttcaggggctctaagtcagtctcaagcggtgttcctctcctctttccctgcggtgtatagcgaactcctgaagctgttcgatgtaagagaagtggccaacctcgtgcaggatacactgggctccctgcctaccattctgcacgtcgatgacagtctgcaagccattaaattgcagtgtatcgggaaaaccgtggaaagtcaactgtacaccaaccccgactctaggtacatcctgctcccggtggttctccatcacttgcacatccacctgcaagagcagaaggatctcataatgtgtgcaagaattctctcaaatgtgttctgtttgatcaaaaaaaattcctctgagaaatcagtgctcgaggagatagacgtgatcgtggcaagtcttcttgatatcctcctgcgcacaattttagagataaccagccggcctcagccttcgtctagcgccatgagatttcagttccaggatgtgaccggggagtttgttgcttgtctcctcagcctgctgcgccaaatgaccgaccggcactatcagcaactcctcgacagcttcaacacaaaggaggaattacgggacttcctgctgcagatttttactgtgtttaggatcctcattagacctgaaatgttcccaaaggactggactgtcatgcggttagtggcaaataacgtgataattaccaccgtgctgtacctgagcgacgcgctcaggaaaaatttccttaacgaaaatttcgactacaagatctgggattcatatttctatcttgctgtgatattcatcaaccagctgtgtctgcagctggagatgttcactccctcaaagaagaagaaggtgctcgagaagtatggagatatgagagtgaccatgggttgtgagattttttcgatgtggcagaacctgggcgagcataagctacacttcattcccgccctgatcgggcccttcctggaggttaccctgattccacagcccgacttgcgcaatgtgatgatccccatctttcatgacatgatggactgggagcaaaggaggagcgggaattttaaacaagtagaagctaaattaatagataagctggattctctcatgtcagagggtaaaggagatgaaacctatcgcgaactgtttaactccattttattgaaaaagatagagagggagacctggcgcgagagcggggtctctcttatcgctaccgtaacacgcctaatggaacgactactggactatcgggattgtatgaaaatgggcgaggtggacggcaagaagattggctgcactgtgtccctgttgaatttctataagacggaactcaataaggaggagatgtatatcagatatatccacaagctgtacgacctacacctgaaggcccagaactttacggaggccgcctataccctgctgctttacgacgagctccttgaatggtccgaccgtccgctgcgtgaatttctgacctatcccatgcagaccgagtggcaaaggaaagagcatcttcatttgactatcatccagaactttgaccgagggaaatgttgggaaaacggcattatactctgccgcaagatagccgaacagtacgagtcctattacgactaccgcaacctgtctaagatgcgaatgatggaggcatccctgtacgataaaataatggaccagcaacggctagagccagagtttttcagagtggggttctacgggaaaaaatttccattcttcctgagaaataaggaattcgtgtgtcggggccacgactatgagcgcctggaagcctttcaacagaggatgttaaacgagttccctcacgccatcgcaatgcagcatgcgaaccagccagacgaaacgatcttccaggccgaagcccagtacctgcagatttatgcagtcactcccatcccagagtcccaggaggtgctgcagagagagggcgtgcccgataatatcaagtcattttacaaggttaaccacatatggaaatttagatacgaccgccccttccacaagggaacaaaggacaaggagaacgagtttaagtccctgtgggtggagagaacctctctgtacctcgtccagtcactccctggtatttccaggtggtttgaagtggagaagagagaggtcgtcgaaatgagtcccctggagaacgccattgaagttctggagaataaaaatcaacagcttaagaccctcatcagccaatgtcagacccggcagatgcagaatatcaaccccttgaccatgtgtctaaatggagttattgacgcagccgtcaatgggggtgtgagccgctatcaagaggccttcttcgtgaaggagtatattctgtctcatcccgaggacggcgaaaaaattgcccggttaagagagcttatgcttgagcaggctcagatcttggagtttgggctcgctgtgcacgagaagtttgtgccacaagatatgcgaccgctgcacaaaaagttggtagatcaattttttgtgatgaagagctccttaggtattcaagagtttagcgcctgtatgcaagcatctccggtgcatttccctaatggttccccgagggtctgtaggaatagcgcccctgcatcagtctctccagacggaaccagggttatccctcgacggtctcctctgagttacccagccgtgaacagatacagcagctctagtctttcctcacaggcctctgccgaggtttccaatatcactggacagtcagagagctcagacgaggtttttaacatgcaaccctctcccagtaccagttcactgagctctacgcattctgcttctcctaacgtgacttcctctgctccaagcagtgctagagctagtcctctactcagcgacaagcacaagcactctcgggaaaactcctgcctgtcaccgcgggagcggccctgttctgcaatataccctacaccagtggagccctcccagaggatgctctttaatcatatcggagacggagctcttcctagaagcgatccaaacctctcagcccctgaaaaagcagtgaatcctacccccagttcctggtctctggactccgggaaggaggcgaaaaatatgtctgactcgggcaaactcatatcccctcccgtgccaccacggcccacccagaccgcgtctcctgccagacacacgacgtccgtgagtccttccccggccggacgatccccactaaaaggatccgtccagagtttcactcctagccctgtggagtatcattctccaggactgattagtaacagtcccgtcttatctggcagttattcgagcggaatttctagtttaagccgctgctccacaagcgaaaccagcggcttcgagaaccaagttaatgagcagagtgctcccttgcccgtgcctgtacctgtccccgttcctagttacggtggggaggaacctgtgcgaaaggaaagcaagacacctccgccgtattcggtctacgagaggacacttcggcgcccggtgcccctcccccacagcctctccattcctgttacatcggagcctcctgccttgccaccaaagccccttgccgcacgctcctcccacctggagaacggcgctcggaggactgatcccggacctaggcctaggcctcttccgcggaaagttagtcagctgtag

SEQ ID NO: 185054 - DNA, 2550 bp, synthetic construct
  misc_feature 1..2550: note = Description of Artificial Sequence: Synthetic coding sequence
  source 1..2550: mol_type = other DNA
atgaagatgcacagcaccgagcggatccccctgttcggcccctacccatctctgttaaagaagattgaaagggagacatggagggagagcggagtgtctctcatagccacggtgacccggcttatggagaggctgttagactatagagattgtatgaaaatgggggaggtggacggtaagaaaattggttgtacggtatctctgctgaatttttataaaaccgagctgaacaaagaagagatgtacatccgctacattcataagctctacgacctgcatctgaaagcacaaaacttcacggaagccgcgtatactttgctgttgtatgacgaactgctggagtggagcgaccgcccccttcgggagttcctgacataccccatgcagactgagtggcaacgtaaggaacatttgcacctcaccatcattcaaaattttgaccgcgggaagtgctgggaaaatgggataattctgtgccgtaaaattgcggaacagtacgagagctattacgattatagaaacttatcaaagatgcgcatgatggaggcttcattatacgacaaaatcatggaccagcaacggcttgagcccgagttcttcagagtgggattctatggaaagaaattcccttttttcctgagaaacaaggaatttgtgtgtagaggacatgactatgaaaggctagaggctttccagcagcgtatgctgaacgaattcccgcatgctatcgctatgcagcacgcaaaccagccagatgagactattttccaggccgaggcgcaatatctccaaatttatgccgtcacacctatacctgaatctcaggaagttctgcaacgggaaggcgtgcctgacaacattaagtcattctataaagttaaccatatatggaagtttaggtacgatcggcctttccacaaggggaccaaggacaaagagaacgagttcaaatccctctgggtggaaagaactagcctttacctggttcagagcctccccggcataagtcgctggtttgaggtggaaaagcgcgaagtcgtggagatgtcccctctggagaatgcgatagaggtgctggagaacaagaatcagcagctgaaaacactaattagccagtgtcaaacaagacagatgcagaatattaatcctctgactatgtgtctaaatggcgtcatcgatgcagctgtgaacggaggggtaagcagatatcaggaagcattctttgtgaaggaatacatcctgtcccacccagaggatggcgagaagatcgcccggttacgggagctcatgctagagcaggctcagatcctggagtttggactcgccgtacacgagaaattcgtgccccaggatatgaggcctctgcacaaaaaactggttgaccagttcttcgttatgaagtctagcttggggatccaggagttctcagcttgcatgcaggcatcaccagtccactttcccaacgggtctccaagggtgtgtcggaattctgcaccagcctccgtctctcccgatggcacacgcgtaattccgcgtcggagcccactatcatatccagctgtcaaccgctattcttcttccagcctgtcctctcaggcaagcgcggaagtgtccaacatcactgggcagagtgaaagtagcgatgaggtcttcaacatgcagccctcacccagtaccagctctctgtcaagcactcacagcgcgagccctaacgtgacatcctcagcaccgtcttctgctagagcaagtcccttgttatcggacaaacacaaacattcccgggaaaactcttgtctgtcaccaagagagaggccgtgtagtgccatctatcccacccccgtggagcccagccagcgaatgctgtttaatcatatcggtgatggagccctgccaaggtctgaccctaatctgagtgcgccagaaaaggcagttaatcccacaccaagctcctggtctctggactccggtaaggaagccaagaatatgtccgactcaggaaagctgatcagccccccggtgccaccgcgccccacacagaccgcgagtcctgcaagacacactacctccgtgagtccatcccccgccgggagatcgccccttaaagggagtgtgcagtcctttaccccgtcgccagtagaataccacagccccgggctaatcagcaacagccccgtattgtcaggcagttattcttctggcatctcatctttaagtcgatgcagcacatcggaaacctcgggtttcgaaaaccaggtgaatgagcagagcgctccactgcccgtgcctgtgcccgtccccgtaccatcctacggcggggaagagcctgtcaggaaagagagcaagacgccccctccctacagtgtgtatgagcgaacactacgacgccctgtgcccctaccgcatagcttgtccatcccggttacctcagagcctcccgctttaccccccaaacctcttgccgcccgctcaagtcatctggaaaatggagccagacgaactgaccccgggccccgacccaggcctctacccaggaaggtgagtcagctttag

SEQ ID NO: 185055 - DNA, 3318 bp, synthetic construct
  misc_feature 1..3318: note = Description of Artificial Sequence: Synthetic coding sequence
  source 1..3318: mol_type = other DNA
tggatccccagcgagaagcagaccttcttcaccgtgatcgccagcttcaggggcacggtcccctacggcttgtctctggaaattggggacaccgtgcaaattttggagaagtgcgacggctggtaccgaggtttcgctttaaagaatcctaacatcaagggaattttccccagcagctatgtgcatctgaagaatgcttgcgtcaaaaacaagggccagttcgagatggtgatccccaccgaggacagcgtgattacagaaatgaccagcacactcagagactggggaacgatgtggaaacagctgtatgttcgaaacgaaggtgatctctttcatcgcctgtggcacataatgaacgaaatattagacctcagacggcaggttttggtgggacacctcacacacgaccgaatgaaagatgtgaaaaggcatatcactgctaggttggactggggcaatgaacagttaggtcttgatctagtgccgagaaaagagtatgccatggtggaccctgaagatatctctattaccgaactgtaccgcctgatggaacaccggcataggaagaaggacactcctgtgcaggcgagcagccatcatctgttcgtacagatgaaatctttgatgtgctctaacctcggcgaggagctggaagttatcttctccctcttcgacagtaaggaaaacagacccatctcagagcgtttctttctgaggctgaacaggaatgggctacccaaagcacctgataagccagagcggcactgcagcctcttcgttgacctcggcagcagtgagcttagaaaagacatttatatcactgtgcacattatccgtatcgggagaatgggcgcaggcgaaaaaaagaatgcgtgttcagtgcaataccggcgaccttttgggtgtgccgtgctgtctatcgcggatctgctgactggagagactaaggacgatttgatactcaaggtctacatgtgtaacacagaatctgagtggtatcagatccatgagaatattatcaagaaactgaacgcacgctacaatctgacagggtccaacgccggattggctgtatctctacagctgctccacggggacattgaacagatcaggcgcgagtattcaagcgtgttcagtcacggagtgtccattaccagaaaattaggcttttctaatattatcatgcctggcgagatgaggaatgatctctatatcaccatcgaacgtggcgagtttgagaagggggggaagtccgtcgccagaaacgtagaggtaaccatgttcatcgtggactcctcagggcagacacttaaggacttcatctcattcgggtccggcgagccacctgcaagcgaataccacagctttgtgctctaccacaacaactcccctagatggagtgagctgctcaaactgcccattcccgtagacaaatttagaggggcgcacatccgatttgagttcaggcattgcagcacgaaagaaaagggagaaaagaagctgttcgggttctctttcgtgcccctgatgcaagaggatgggcgcactctgccagatggaacacacgagcttattgtgcacaaatgtgaagagaacactaacctgcaggacacgacccgatatctgaagttaccttttagcaaggggattttccttgggaacaacaaccaggccatgaaagcaaccaaagaaagcttttgcatcacatcatttctctgcagcacaaaactgacgcagaatggagacatgttagacctactcaagtggcggacccatccggataagattacaggatgcctgagtaagctgaaggaaatcgatggttcagagattgtcaagtttctgcaagacacccttgacaccctttttggcatcctggatgagaatagccagaagtacggatcgaaggtgttcgacagcttggtgcatattatcaacctactgcaagatagcaagttccaccactttaagcccgtgatggatacctacattgagagtcacttcgctggggctttggcttacagggatctgattaaagtgctgaagtggtacgtcgaccgcatcacagaagctgaacgccaggagcacattcaggaggtgctcaaagcccaggagtatatatttaagtacattgtccagtcacggagacttttctccctggccaccggtggtcaaaatgaagaggagtttagatgctgcatccaagagttgttgatgtccgtgcgctttttcctatcccaggaatccaaggggagcggagctctgtctcaatcacaggccgtgttcctgtcctcctttccagcagtctacagcgagctgctgaaactattcgacgtgagagaagtggcaaacctggtgcaagacactctgggatccctccccactatcctgcatgtggacgactcactgcaggcgatcaaactccagtgcattggcaagaccgtggaatcccagctctatacaaaccccgactcgcggtatatactgctgcccgtagttttgcaccacctgcacatccatttgcaggagcagaaggatctgataatgtgtgctagaatcctcagtaatgtgttctgcctgattaagaaaaactcttctgagaagagcgtactggaggagattgatgtgatcgtggcctctctgctggatatcttgctcagaaccattctggagatcacatcccgccctcagccctcctcctctgctatgcggttccaatttcaggacgtgactggtgagttcgtggcctgtcttttaagcctgttgcgtcaaatgaccgatcgacattaccagcagctgctggactcatttaatactaaggaggaattaagggacttccttctgcagattttcacagtcttcaggattttgatcagaccagagatgtttccgaaggattggacagtcatgagactggtagctaataatgtcatcataactactgtgctctatttatctgacgctctcagaaagaattttctgaatgagaattttgactataagatttgggatagctacttttacttagccgtgatcttcattaatcagctgtgcctccagctcgaaatgtttaccccctcaaagaaaaagaaagtcctcgagaaatacggtgatatgcgagtcacaatggggtgtgagattttcagtatgtggcagaatctgggcgagcacaaactgcacttcattccggccctgcgacaggaaaatcgcttgaacctgggcggcggcgggtgctcagaaccacgcgcctgccattgcactccggcttgggccactaagcgcgattgtgtttccaaaaagaaagaaaagaagacatag

SEQ ID NO: 185056 - DNA, 6144 bp, synthetic construct
  misc_feature 1..6144: note = Description of Artificial Sequence: Synthetic coding sequence
  source 1..6144: mol_type = other DNA
atggccgccagcgagcggcgggccttcgcccacaagatcaaccggactgtagcagcggaggtgaggaaacaggtgtcccgtgagcgcagtggtagtccccacagtagtcgaaggtgctcaagctctctcggcgtcccattaacagaggtcgtcgaacccctggatttcgaagatgtgttgctaagcagacctcctgatgcagaacctggaccccttagggacctggtggaattccccgcggatgatctggagctcctcttacagcctcgcgaatgcaggacaacagaaccagggatcccaaaagacgagaaactggacgctcaggtgcgagccgccgttgaaatgtatattgaggattgggtaatcgtccaccgaagatatcagtacctgtcagcagcctatagcccagtcactaccgatactcagcgggagcggcagaaagggctgcctagacaggtgtttgagcaggatgccagcggcgatgagcggagtggccccgaagactctaacgactccagaaggggatcaggcagccccgaggatacccctaggagttccggagcgagctccattttcgacctcaggaacctcgcggcggattctttgctgccttcgcttcttgaacgcgcggctcctgaggacgtggaccggcgcaacgagaccctgcgcaggcagcatcgcccaccggccctgctcaccttgtacccagcgcctgacgaagatgaggcggtggaacggtgctctaggcccgaaccaccccgggaacactttggacagagaattttagttaaatgtctgtccctgaagttcgaaatcgagattgagccaatctttgggatcttggcactctacgacgtgagggagaagaaaaagatctccgaaaacttttattttgacctgaattcggacagcatgaaaggcctgctgagagctcacggaacccatcccgctatttctactctcgctaggtccgctattttctccgtcacctacccttctccagacatattccttgtcatcaagctggagaaagtgctccaacaaggcgacatttcggagtgttgcgagccatatatggtgctcaaagaggtggacacggctaagaataaagagaaattagaaaaactacggctggcagcagagcagttttgcacaagactggggcgatacagaatgccgttcgcatggaccgccgtgcacttggccaacattgtttcctccgctggccagctggacagggattcagacagcgagggcgagaggaggcccgcgtggacagacagacggcggagaggtccccaggatcgggcaagctctggtgacgacgcctgctcattttcaggcttcaggccggccacactgacagttactaacttctttaaacaggaggcagaacgcctcagcgacgaagaccttttcaagttccttgcggatatgcgtcggccctccagtctactacgtcggctgagaccagtaaccgcccagctaaagattgacattagtcctgccccagagaacccacacttttgcctctcccctgaacttctgcatatcaaaccataccccgatcctcgtggcagacccactaaggaaattctggagttccctgcgcgtgaagtgtatgcgccacacacatcctatcgaaatctgctgtacgtgtacccccactccttgaatttctcctcacgacagggttctgtccggaacttggccgttcgggtgcagtatatgacaggcgaagacccaagccaggccttgccggtgatctttggtaaatcttcctgttccgagttcacaagagaggcctttaccccagtggtctaccacaataagtcaccagaattctatgaagaattcaaactccatcttcctgcctgcgtgaccgagaaccaccatctgctgtttactttttatcatgtgtcttgccagccccgaccaggcaccgctctagagactcccgtgggctttacatggatccccctcttgcagcatggaagattaaggacaggaccattctgcctgcccgtgagtgtggatcagccccctccatcctattccgtcctaactccagacgtggccttacccggcatgcgctgggtggacgggcataaaggcgtgtttagtgtagagctgactgccgtgtcctcagtgcatccccaggacccgtatttggacaagttcttcactctcgtgcacgtgctcgaggaaggagcgtttccatttcgcctgaaggacacggtattgtccgaggggaacgtggaacaggagttgagagcgagtttggccgccctcaggctcgcctcccccgagccactcgtagcctttagtcatcatgttctcgataaactagtaagactggtcatccggcctcccatcatcagcgggcagatagtgaacctgggcagaggagcctttgaggccatggctcacgtggtgtcacttgtccaccgcagccttgaggccgctcaggacgcccggggacactgcccacagttggcagcatatgtccattacgcgtttcggttacccggcacagaacccagcctgcccgatggggcgccacctgtcaccgtgcaagcagccacactcgctagaggatctgggcgccccgcatctctgtaccttgcccggtccaagtcaatatcttcaagtaacccagatctagccgtggctcctggatccgttgatgacgaggtatcccggattctggcttcgaaactcctgcatgaagaactagccctccagtgggtcgtctccagctccgcggtgcgggaagccattctgcagcacgcctggtttttctttcagctcatggtcaaatcaatggcacttcacttattgctgggtcagcgccttgatacacctaggaaacttagattccctgggcggtttctagatgatatcactgccctcgtgggcagtgtcggacttgaagtcattactcgggtgcataaagatgtggagctggctgagcatctgaatgcctctctggctttcttcctgtccgatttactatcccttgtggaccgcggatttgtcttctccttggttagggcccactataagcaagtggctacacggcttcagtcgagcccaaaccctgcagctctgctgaccttgaggatggaattcaccaggattctgtgcagccacgaacactatgtaactctgaatctgccctgttgccctctgtcccctccagcatcaccttcaccttcggttagcagcaccacgtcccagtcttctacctttagctcccaggcgcctgatcctaaagtaactagcatgtttgagctcagcggacccttccggcagcagcatttccttgccgggctgctcctgactgagttggccctggccctggagcctgaggccgagggcgcttttctgctgcacaagaaggccataagcgcagtccatagtctcctctgcggccatgacactgaccctcgctacgcagaggccactgtcaaggccagagtggcagagctctaccttcctcttctctcgattgcacgcgacaccctcccaagattgcacgatttcgcggaaggcccagggcagcggtctagactcgcgagcatgcttgactcagatacagagggggagggcgatattgcaggcaccataaacccctcagttgcaatggcgattgccggtgggcccctggccccaggtagtcgcgcctcgatcagccagggaccaccgacagcttctcgggctggctgcgccctttcagccgaatcgtcacggaccttacttgcctgtgtgctgtgggtcctgaaaaataccgagcccgccttactccagaggtgggccaccgacctgacattgccgcagctgggccgattgctggacctactatatctgtgtctcgcggccttcgaatacaaaggcaaaaaagcctttgagcgcataaattcactgacctttaaaaagtccctagacatgaaagctaggctggaggaggctattctgggtaccattggggcacgccaagaaatggtccgccgcagcagagagcggtcaccctttgggaatccggagaacgtccggtggaggaagagcgtcacccactggaagcagaccagtgatcgagtggataaaacgaaggacgagatggaacatgaggccttggtcgagggtaacttggctactgaggcaagcttggttgtgctcgatacgcttgagatcattgtgcagaccgtgatgctttccgaggcgcgtgaatcagtccttggggcagtgctgaaggtcgtcctgtactctctcggctcggcccagtccgctctttttctccaacatgggttagccactcagagagccctggtctcaaagtttccagagctcctctttgaagaggacacagagttgtgcgcagacctctgcctcaggctgttacgccattgcggatccaggataagcaccatccgaacccacgccagtgccagcctgtacctgcttatgagacagaatttcgagatagggcacaatttcgctcgggtgaagatgcaggtcacgatgagcctatcaagcttagtcggtactactcagaacttcagtgaggaacacctgcgcaggtctctgaaaacaatcctgacttatgccgaagaagatatgggtttacgagatagtacattcgcagaacaggtgcaggatctcatgttcaatcttcatatgatcttgacggacacagttaaaatgaaggagcaccaggaagaccctgaaatgctcattgatctgatgtatcgaatagcacgcggctatcagggcagccccgacctgcggctgacatggctccagaatatggcaggcaaacatgccgagctgggaaatcatgctgaggccgcacagtgcatggtgcacgccgcagccttagtagctgaatatctcgccttactggaagaccatcgccatctgcctgtggggtgcgtaagttttcagaacatatccagtaacgtcctggaggaaagcgccatttctgatgatatcctcagtccagacgaggaggggttctgtagcggaaagcatttcaccgagctagggctagtcgggctcctcgagcaggccgctggatactttacgatgggaggtttgtacgaggccgtgaatgaagtatataagaacctgatccctattctggaggcccaccgggattataagaagctggctgctgtgcacggcaaactccaagaggcctttactaagattatgcaccagtcaagcggttgggagagggtttttggaacttactttagggtgggattttatggcgcacacttcggtgacctggatgagcaggaatttgtatacaaggagccctctatcacaaaactcgctgagatctctcaccggttggaagagttttatactgaacggttcggggacgacgtggttgaaataatcaaagattccaatcccgtggacaaatcaaaactagatagccaaaaggcatatatccagatcacctacgtcgaaccctacttcgatacgtatgaactgaaggatcgggtgacctacttcgatcgcaattacgggctgcgcacttttctgttctgtacaccatttacacctgacggacgggcacacggcgagctccctgagcagcacaagcgaaagactctattatctaccgatcacgctttcccttacattaaaacccggattcgcgtctgccatcgggaagaaaccgtgctgacacccgtcgaggtggccatcgaggacatgcagaagaaaacaagggagctggcattcgccacggagcaggatccgcccgacgcaaagatgttgcaaatggtactgcagggctcagtgggccccaccgttaaccaggggccactcgaggtcgcccaggtgttcctggcagagatccctgaagaccccaagctgtttcgccaccacaataaactccgcctctgcttcaaggatttctgcaagaagtgtgaagatgcccttcggaaaaataaggccctgatcggcccggatcagaaggagtaccatcgggagcttgaacgaaactactgtcgcctcagggaggccctacagccattactgacacagcgccttccacagttgatggcaccaacaccccccggactcagaaattccctcaaccgggcaagctttagaaaagctgatctttag

SEQ ID NO: 185057 - DNA, 4161 bp, synthetic construct
  misc_feature 1..4161: note = Description of Artificial Sequence: Synthetic coding sequence
  source 1..4161: mol_type = other DNA
atgcggtgggtggacggccacaagggcgtgttcagcgtggagctgacggcggtgtcctctgtgcatccccaggatccatacttggataaattctttaccctcgtgcatgttctcgaggaaggcgcctttccttttcgcttaaaagacacagtcttaagcgagggaaatgtggagcaggaactccgcgcgagtctggcagcactgcggctggcctcgcctgagccgctggtggcattttcccatcacgtgctggataagttggtccgtttggtgattcgcccacccattatctccgggcagattgtgaacctcgggcggggtgctttcgaggctatggcccacgtggtgagccttgtccatcgctcactcgaggcggcccaggatgccagaggacattgccctcagctggccgcttacgtgcactatgctttcagacttcccggcaccgagcccagcctgccagatggagccccccctgtgacggttcaggctgccactcttgcccgcggcagcgggcgccccgctagcttatatttagcccgcagcaaatccatttcctcctctaatccggatcttgcagtggccccaggcagcgtggacgacgaagttagcagaatattagctagcaaaggcattgataggtcccattcgtgggtcaactctgcttacgcgcctggtggcagtaaggccgtcctgcgtcgcgcccccccttattgtggagctgacccacgccagcttttacacgaggaattagccttgcagtgggtcgtcagctcttccgctgtcagggaagccatcctgcagcacgcatggttcttctttcagctgatggttaaatcgatggccttgcacctgctccttggacagagactggacacccccagaaagctcaggtttcccggcagatttctcgacgatatcaccgcccttgttggctccgtcggcctagaagtgattacgagggtccacaaagacgttgaactggccgagcacttaaatgctagtttggcattttttcttagcgacctgctgtccctggtagaccggggcttcgttttcagcctggtcagggcccattataagcaagtagcaactagactccaatcttcccctaacccagcagcgctcttgacgctgagaatggagttcacacgtatcttatgctcccatgagcactatgttacactgaatctaccgtgctgccccttatctccccctgctagtcccagtccctcagtgagcagtaccacttcacaaagttctacattttcttcccaagcaccagacccaaaggtaacatcaatgtttgagctctcaggccccttccgacaacagcatttcctcgccgggctcctacttacggaattggcgcttgctctagagcccgaggcagagggtgcatttctcctccacaaaaaggcaatcagtgccgtccacagcctcctgtgcgggcatgacaccgacccgcggtacgccgaagccaccgtcaaagccagagtcgccgaactatatctgccactgttgtcaatcgcacgggatacactgcctcggctacacgattttgctgagggtccaggtcaacgctctcgcctcgccagtatgctggattcagataccgagggcgagggggatattgccggcacaattaatccctccgtcgccatggcgattgccggggggcccttggcccccgggagtagggcttccatatcccagggaccgcctaccgcctctagagcaggctgtgccctgtcagccgaaagcagccgtacccttttggcctgcgtgctgtgggtgctgaaaaataccgaacccgcgctacttcagagatgggccaccgatttgacgctgccccagctgggccgcctgttggacctactgtacttatgcctcgccgccttcgagtataaggggaaaaaagcattcgaaagaattaattccctgacttttaaaaagtcacttgacatgaaggcaaggctcgaggaggcaatactggggaccatcggagcacggcaagaaatggtgagaagaagtcgggaacgtagcccatttgggaatcccgagaacgtgaggtggcgcaagagtgtcacacactggaagcagaccagcgatcgtgtggacaaaacaaaagatgagatggaacacgaagcactcgtcgagggaaacctggccaccgaagcctctttagtcgtgctggacaccctggagatcatagtacagacagtaatgctatcagaggcccgtgagagtgtgttgggcgctgtgcttaaggtggtgctctatagcctgggcagcgcccagtccgccctgtttcttcagcacggcctggctacccagagggcgctggttagcaaattccccgaactcctgtttgaggaagacaccgagctatgtgctgacctgtgcttgcgcctgctccggcattgcggctctcggatatccacaattcggacacatgctagcgcctccctctaccttctcatgagacaaaactttgaaatcggccataacttcgcacgagtgaagatgcaagtcactatgagtcttagttccttggttgggaccacccagaacttttctgaggagcacttaaggcggagcctgaaaaccatccttacctacgccgaggaagacatgggtttacgtgactctaccttcgcagaacaggtgcaggacctgatgtttaacctgcacatgattctgaccgacacggtgaagatgaaggaacaccaggaggatcccgaaatgctgatcgacctaatgtacaggattgctcgcgggtaccaggggtctccagacctccggctgacatggctgcaaaatatggcaggtaaacacgctgaactgggcaaccatgccgaagcagcccagtgcatggtacatgccgctgcgctggtcgctgagtacttggccctactcgaggaccatcggcacctgcctgtcgggtgtgtgtcatttcagaatatatcatccaacgtcctcgaggagtctgcaattagcgacgatatattgtcgcccgatgaagaagggttctgttccggaaagcatttcacagagttgggcctggttggattgctggagcaagcggccggctactttaccatgggtggcctgtacgaagcagtgaatgaggtatataagaatttgattcccattttggaagcacacagggattacaaaaaactggccgcagtgcacggaaaactgcaggaggctttcacaaagatcatgcaccagtcgtcgggatgggaacgggtgttcggcacctactttagagtaggcttttatggcgctcatttcggagacctggatgaacaggaatttgtatacaaagagcccagcatcaccaagctcgcggaaatcagccacagactggaagagttctataccgagcgctttggagacgacgtcgttgagattatcaaggattcaaatccggtggacaagtccaaattggactcacagaaggcatatatccaaataacctatgtggagccatactttgacacctacgaactgaaggatagagtaacgtacttcgatcggaattatggccttcgcaccttcctcttttgtaccccattcacacctgatggccgtgcccatggggaacttcctgagcaacataagcgaaagaccctcctgtccacggaccatgccttcccatacatcaagacccgaatacgcgtctgccatcgggaagaaaccgtgcttacacctgtcgaggtggccatagaggacatgcaaaagaagacacgggaactagcatttgccaccgaacaagatcctccggacgccaagatgctccagatggtcctacagggctccgtgggccctaccgtgaaccaaggcccccttgaggttgcccaggtgtttttggctgagatcccagaagatcccaagctctttcgtcaccacaataaacttaggctctgttttaaagatttctgcaagaaatgtgaggatgcccttcgtaagaataaagctctgatcggccctgatcaaaaagaataccacagagaactggaaagaaactattgcagactgagggaagcacttcaaccactcctcacacagagattaccacagttgatggccccaaccccccccggtttaaggaatagcctgaaccgggcgtcatttaggaaggctgacctttag

SEQ ID NO: 185058 - DNA, 5973 bp, synthetic construct
  misc_feature 1..5973: note = Description of Artificial Sequence: Synthetic coding sequence
  source 1..5973: mol_type = other DNA
atggccaccctgcccagcgccgagcggcgggccttcgccctgaagatcaatcgttatagctccgcagagattcggaagcaatttacgctgccacccaatcttggccagtaccaccgtcaatccatttctacctcagggttcccctctttgcagctacctcagttctacgatcccgtcgagcccgtcgatttcgaaggccttctgatgacgcacctgaacagcttggatgtgcagctagcgcaggagctgggcgactttactgacgatgatcttgatgtggttttcactccgaaggaatgccgcaccttacaaccctcattgccggaagagggagtggagctggaccctcacgtgcgagattgcgttcagacatacattcgagagtggctgatcgtgaaccggaagaaccaggggagccccgagatctgtggattcaagaaaacgggcagccgcaaagacttccacaaaactttgcctaaacagacttttgaatcggaaacactggaatgttccgagcctgcggcccaagccggcccccgccatttgaacgtcttgtgcgatgtgtctggtaagggtcccgttactgcctgtgattttgacctgagaagtctgcagcccgacaagaggctggagaatctccttcagcaggtttccgctgaggatttcgaaaaacagaacgaggaagcccggcgtactaatcgccaggccgaattatttgcactgtatcccagcgtggacgaggaggatgcggtggagatccgacctgtccctgagtgccccaaggagcacctcggcaataggatcctggtgaagctgctcaccctcaaattcgagattgagattgaaccactgttcgccagcatcgccctttacgacgtaaaagagcgcaaaaagataagcgagaactttcactgtgacttaaatagcgaccaattcaaagggttcctccgcgcccacaccccctcggttgccgcgtcctcacaggcccgaagcgcagtgttttccgtcacgtatccctctagcgatatctatctggtggtcaaaatcgagaaggtgctgcagcagggcgaaatcggcgattgtgctgagccctataccgtcatcaaagagtcagacggtgggaaaagtaaggagaaaattgagaagctgaaacttcaggcagaaagtttctgtcagcgcctaggcaaatatcgcatgccgttcgcatgggctccaataagcctcagctcttttttcaatgtcagcacgctggaaagggaagtcaccgacgtggatagtgtcgtcggccgcagttctgtgggagagcggagaaccctcgcgcagtctcggcgcttgagtgaaagagccctttcgcttgaagagaatggtgtggggtcaaactttaaaaccagcaccttgtccgtctcttctttcttcaaacaagaaggcgatcggctgagtgatgaggacctatttaagtttttggcagattataaacgatcctcttcactgcagaggcgtgttaagtcaattccgggtcttctcaggctcgaaatctccaccgccccggagataattaactgctgtttaacacctgagatgctgcccgtgaagccctttcctgaaaacagaaccagacctcacaaggaaatcttggaattcccaacccgggaggtctacgtgccgcatactgtgtaccgcaatttactgtatgtgtacccgcaacgtctgaacttcgttaacaagcttgctagtgcccgtaacatcaccattaaaatccagttcatgtgcggggaggacgcatcaaatgccatgccagtcatctttggaaagtccagcgggccagaattcctgcaggaggtatatactgcagtcacttaccacaacaaaagccctgacttttatgaggaggtgaaaattaagctgcctgccaaacttacagtcaaccaccacctgctcttcaccttttatcatatctcctgtcagcagaaacagggagcgagtgtggagactctcctcggttactcatggctgccaatcctgctaaatgaacggctgcagactggctcctattgcctgcccgtggctctggagaagttgccacctaactatagtatgcactcagctgaaaaggtgcctcttcaaaacccgccaataaagtgggccgaaggacataaaggcgtgttcaatatcgaagtccaggcagtgagtagcgtccacactcaagataatcacctcgagaaattctttaccctctgccactctctggaaagtcaggtgaccttcccgattcgtgtgctggaccagaagatatcagagatggcactggagcacgagctgaagctgtctattatttgcttgaattcctcccgtctagaacccctcgtgttgtttctgcaccttgtgctggataaactgttccaactctccgttcagccaatggtgatcgcagggcaaaccgctaatttttctcagttcgcgttcgaaagcgttgttgcaatcgccaattcccttcataattcaaaagacttatctaaggaccagcatggcagaaactgcctattggcttcatacgttcattacgtgttcaggctccctgaggttcagcgagatgtgccaaagtcgggggcacccaccgccttgctggacccacgctcataccatacctacggtcgtacctcagctgccgccgtgagttcgaaattactccaggctagagtgatgagcagctccaacccagatctagcaggcacacattcagccgctgacgaggaggttaagaacatcatgagctccaagcattttcatgaagaactggctctgcagatggtggtcagcacaggcatggtcagagagacagtgtttaagtatgcttggttcttctttgagctgcttgtgaagtcaatggcccaacatgtgcataatatggacaagcgtgacagcttccgaagaacgaggttttccgatagatttatggatgatattacaacaattgttaacgtggtgacgtctgagattgccgcacttctggttaagccccagaaggaaaatgaacaggctgagaagatgaacattagtttggctttttttctgtacgatctgctgagtctgatggaccggggctttgtgttcaatctcattcgccactactgttcacagctttcagcaaaactcagtaatctgcctactcttatttccatgagactggagttcctgcggattctctgctcccacgaacattacctaaatctgaatctatttttcatgaatgccgacaccgcgcccactagcccatgtccgagcatctctagccagaatagcagcagttgtagcagttttcaggatcaaaagatcgccagcatgttcgatttaacttccgagtatcgccagcaacacttcctgacaggcctactgtttaccgaattggctgcggccctcgacgcagagggggagggcatcagcaaagtgcagcgcaaagctgtcagcgccatccacagcctgttgagcagccatgatctcgaccccagatgtgttaagccagaggtcaaggtcaaaattgctgctctctacctaccgctggtggggattattctagatgccttaccccagctttgcgactttacagtggctgacaccaggcggtacagaacatctggaagtgacgaagagcaggaaggggccggtgccattaatcagaatgtggccctcgccattgcaggcaataactttaacttgaagacttccgggatcgtcttgtcctcactgccatataaacagtataatatgctgaatgccgataccacaaggaacctcatgatctgcttcctctggatcatgaagaatgctgatcagagccttatcagaaagtggattgcggatctcccgtccacccaattgaatagaatactggacctgctttttatctgcgtactctgcttcgagtacaaaggaaaacagagcagcgacaaggtgagtactcaggttctgcagaagtcacgagatgttaaggcacgcctagaggaagctttacttaggggcgaaggagcccgcggcgaaatgatgagaaggagagctccaggcaacgacagattccccggattaaatgagaatctccggtggaaaaaagagcaaacccactggcgacaggcaaatgaaaaactagacaaaactaaggccgaactggaccaggaagccctgatttcaggcaacctggcaacggaggctcacctgatcatattggatatgcaggagaacatcatccaggccagctctgccttggactgtaaggacagtctcctggggggtgtgctgagggtccttgttaactctctgaattgcgaccaatccacaacatatctaacccattgttttgccacattgcgtgccctgatcgccaaatttggcgacctcctgtttgaggaagaagttgaacagtgttttgatctgtgccatcaagtgcttcaccattgctcttctagcatggatgtaacacgctctcaggcatgtgcaaccctgtacctcctgatgaggttctcgttcggggctacgagcaacttcgctcgagtcaaaatgcaggttaccatgtctctggcgagcttagtgggacgggcccctgactttaatgaggaacacctccgacgatccctgaggaccatccttgcctactccgaggaagacaccgccatgcaaatgactccattcccaactcaagttgaagaactcctttgcaatcttaactccatcctgtatgacactgtcaagatgcgggagttccaggaggaccccgaaatgctcatggaccttatgtacagaatcgccaagtcataccaggcatcacctgatctcagactcacatggctgcagaacatggcagaaaaacataccaagaaaaagtgttataccgaggcagcaatgtgcttggtgcatgctgcggccctggtggccgagtacctgtcaatgcttgaggatcactcttacttgccggtggggagcgttagctttcaaaacatctcttccaacgtgctggaagaaagtgtcgtgagcgaagatacactgagtccggacgaagacggggtctgtgccggtcaatactttaccgaatccggcctggtgggcctgttagaacaagccgctgagttgttctcaaccggcggcttgtacgagacagttaacgaagtttataagctcgtcattcccatcctcgaggcacaccgggaattcaggaagctgacacttacacactctaagctgcagagggcctttgactctatcgtgaataaggaccataagcgcatgttcggcacttatttcagggtgggtttctttggctctaaatttggcgatctggacgaacaggaatttgtgtataaggaacctgcaattactaagctccccgaaatatcacacagactggaagccttctacgggcagtgctttggcgccgaattcgttgaggttattaaagatagtaccccagtggataaaacgaagttggatcccaacaaggcgtacattcagatcactttcgtggaaccctatttcgacgagtacgagatgaaggatcgtgtcacatacttcgagaagaatttcaatctgcgcaggtttatgtacacaacgcccttcaccctggagggacgaccaagaggagagttgcatgaacaataccgccggaacaccgtccttactacaatgcatgccttcccgtacattaagacccggatctcagtcatccaaaaggaggaatttgtgctcacccccattgaggtggcaatcgaggatatgaagaaaaaaacactacagctggccgtggccatcaatcaggagccacccgatgctaaaatgctgcaaatggtcctccagggatcagtgggtgccacagtcaatcagggccctctggaagtggctcaggtttttctggcagagatccccgccgaccccaagctgtatagacatcataataaattgcggctgtgcttcaaggagttcattatgtag

SEQ ID NO: 185059 - DNA, 6096 bp, synthetic construct
  misc_feature 1..6096: note = Description of Artificial Sequence: Synthetic coding sequence
  source 1..6096: mol_type = other DNA
atgacccacctgaacagcctggacgtgcagctggcccaggagctgggagacttcactgacgacgacctggacgtggtgttcactccgaaagagtgcagaaccctgcagccttctctccccgaggaaggagtcgaactcgaccctcacgttagagattgcgtacagacatatatccgagaatggctgattgtcaacaggaagaaccaagggtctccggaaatttgcggcttcaagaagaccgggtcccggaaggactttcacaaaacactacccaaacagacatttgagtccgagaccttggagtgctccgaaccggccgcccaagctggcccacgccatttaaatgtgctctgcgatgtgtccggtaagggccccgtgacagcttgtgattttgacctgagatctttgcagcccgataagagactggagaatttgttgcagcaggtgagtgctgaggactttgaaaaacagaacgaggaggcgcgaagaacgaacaggcaggccgaactcttcgctctctaccctagtgtggacgaggaggacgccgtagagatacgccctgttccagaatgtccaaaggaacaccttggtaatcgtattctggtaaaacttctgacactgaagtttgaaatcgaaattgagcccctgttcgcaagtatagccctgtatgacgtgaaagaaaggaagaaaatatctgagaacttccattgcgatctgaactcagatcagttcaaaggtttcctacgtgcccacactccaagcgttgctgcaagctcacaggcacgaagcgctgtgttctccgttacctatccaagtagcgatatttacctggttgtaaaaattgagaaggtgcttcaacagggtgagataggcgactgtgccgagccgtacaccgtgattaaggagtctgacgggggaaaatccaaagaaaagatagaaaagttgaagttgcaggccgaatccttctgtcagcggcttggaaagtacaggatgccatttgcctgggcacccattagcttaagcagcttcttcaacgttagtactttagagagggaagtgactgatgttgactctgtggttggcaggagcagcgtgggagagcgacggaccctagctcagtcgcgacgcctcagcgagcgggctcttagcttggaagaaaacggtgtggggtccaacttcaagacatcaacactcagcgtgtccagcttctttaagcaggagggagacagactgagcgacgaagatctatttaagtttttggcagactacaaacgctcttctagtctgcagagaagggtcaaatccatacccgggctcctgagactagagatcagcaccgcaccggaaatcatcaactgctgcctgactccggaaatgctgcccgtcaaaccctttccagaaaatcgcacgcgtcctcacaaagaaatccttgaatttcccacacgcgaggtgtatgtgccgcacaccgtatacagaaatctactgtatgtttatccacaacggctcaattttgtgaataagttagcctccgctagaaacattaccattaagatccaatttatgtgcggtgaggatgcctcgaacgccatgcctgtcatctttggaaagagctccggcccagagtttttgcaggaagtgtatacagcggtgacctaccataacaaaagccccgacttttacgaggaggtgaagataaaactgcctgcaaagttgacggtcaaccaccacctgttgttcactttctatcacatcagctgccaacagaagcagggtgcttctgtggagacactcctgggatattcctggcttccaatcctgctgaacgaacgcctccagaccggatcttactgtttacccgtcgccctggaaaagctgccccccaactattccatgcactcggcggagaaagtgcctctgcaaaacccaccaatcaagtgggctgagggtcataaaggggtgttcaacattgaagtgcaggcagtaagtagcgtacacacacaggataatcaccttgaaaagttttttaccctgtgtcactcactggaatcccaagtaacgtttcccattagagtgctggatcagaagatcagcgaaatggccctcgaacacgagctgaagctctccatcatatgtctcaatagttcccgattggagcccctcgttctcttcctgcacctggtcctcgacaaactttttcagctgtccgtgcagcctatggtcatcgctggacagacggcaaacttcagccagttcgcctttgaatccgtcgttgccatcgctaactcactgcataacagcaaggacttgtccaaggaccaacacggcaggaattgcctgctagcaagttacgttcactacgtgtttcggctcccagaagtgcagcgcgacgtgccaaaaagcggtgcgcctacagcactgcttgatcctcgctcctatcacacctatggaagaacgtctgcagctgctgtgagttcgaagcttctgcaggcgcgggttatgtctagttcaaaccccgatctggcaggcacgcattccgcagctgatgaggaagttaagaatatcatgagttctaagatagcagacagaaactgctcacgaatgtcctattactgctcaggttccagtgacgcaccaagtagtcccgcagctcccaggcccgcaagcaagaagcatttccacgaggaactggctctgcagatggtggtgtctacagggatggtgagggagactgttttcaagtacgcatggtttttcttcgagctgctggtcaagtctatggcccaacatgtgcacaacatggacaaaagagactcttttcgaagaaccagatttagcgaccgctttatggacgacataaccaccattgtgaacgtcgtgaccagcgaaatcgccgcccttttagttaaaccgcagaaagagaatgagcaggccgaaaaaatgaatatctctctggccttcttcctttacgatctgttgagcctgatggatcgcggatttgtgttcaacctgatcagacattactgcagccaactatcagccaagctgtctaatcttccaacccttatctctatgcggctcgaatttctgagaattctgtgttcccatgagcactacttaaatctgaatctgttctttatgaatgccgatactgcccctacttccccctgcccctcgatatcttcccaaaactcgtcatcgtgttcatcgtttcaggaccagaaaattgcaagtatgttcgatttaaccagtgaataccgtcagcaacacttcctgacggggttgctgttcaccgaactggcagcagccttagacgctgaaggcgaggggataagcaaggttcagcgaaaagcagttagcgccatccattctctgctctccagtcacgatttggatcctagatgcgtcaagcccgaggtcaaggttaagattgctgccctgtacttgcctctggttgggatcattctggatgcgctcccgcaactgtgtgactttaccgttgccgacacccgacggtatcgaacgagcggatcagatgaagagcaggagggtgccggggccattaatcagaatgtggctttagccatcgctggtaataatttcaacctcaaaacctctggaattgtcctttcttcactgccttataagcagtacaacatgctgaatgctgacaccactaggaatctgatgatttgcttcctgtggatcatgaaaaacgcagaccaatctctgattcgcaaatggatagcggaccttccatccacccagctcaaccgaatcctcgatctgcttttcatctgcgtgctctgtttcgaatataaagggaagcaaagctctgacaaagtaagtactcaggtgctgcaaaaatcccgggatgttaaggcccgccttgaagaagccctcctgcggggagagggggcccgaggagaaatgatgcgaaggcgagctccaggcaatgatcgttttccgggactcaatgagaatctgcggtggaagaaagaacagacgcattggcgtcaggccaatgagaagctagacaaaacaaaggccgagctcgaccaggaggctttgatctccggaaaccttgccacagaagcacacctgatcattcttgacatgcaggaaaacatcattcaagcgagctcagccttggattgcaaggatagtcttctgggcggggtgcttcgggtactggtgaactcactgaattgcgatcagagcacgacctatctcacacactgcttcgctaccctccgcgccttgatagccaagttcggagacttactgtttgaggaagaagtggagcagtgtttcgacttatgccatcaggtgttgcatcactgttcgtcctccatggacgtgactagatctcaggcatgtgcaacattgtatctcctcatgcggttctctttcggcgccactagtaattttgctcgggtgaaaatgcaagtgactatgtcgctcgcctctctcgtgggaagagcacctgatttcaacgaggaacatttacgcagaagcctacggaccatcctggcatactctgaagaggataccgctatgcagatgacgccctttccaacacaggttgaggaactattgtgcaatctgaattcaatcctgtatgacactgtgaagatgcgggagtttcaggaggacccagaaatgctcatggaccttatgtatagaatcgccaagagctaccaggcctcaccagacctgaggctaacctggctgcagaacatggccgagaagcataccaaaaagaaatgttatactgaggccgcaatgtgtttggtgcacgccgccgcgctcgtagctgaatacctgtctatgctagaggatcactcttatcttccagtagggtccgtcagctttcagaacatctcctccaacgttttggaggagagcgtggtgagcgaagacactctctcaccagacgaggacggcgtttgtgccggtcagtatttcacagagagtggtctggtcggactgttagaacaagctgcagagctgttctccaccggagggctgtatgagactgtcaacgaagtttataagcttgttataccaatcctggaagctcatagagagttccggaaattgactttgactcactccaagctgcagagggcctttgatagcatcgtgaataaagatcataaaagaatgtttggtacatatttccgcgtgggcttcttcggcagcaaattcggagatttggacgagcaggagttcgtctataaggaaccggcaattacaaaactgcccgaaattagccatcgtctggaggcgttttacggtcagtgcttcggagccgaattcgttgaggtcattaaggactcaacccccgtggacaagaccaagttggaccccaacaaggcgtacatccagatcacattcgtcgaaccttacttcgacgagtatgagatgaaagatagggtcacatatttcgagaagaactttaacctgcgtcgtttcatgtacactaccccctttaccttggaggggcgcccccgaggtgagctccacgagcagtatcggcgcaacactgtgcttaccaccatgcacgcttttccgtacatcaagacgcgcatttccgtgattcagaaggaggagtttgtgttgactcctattgaggtggccatcgaggatatgaaaaagaagacactacagcttgccgtggcaatcaatcaggaacctcctgatgctaaaatgctccagatggtgctgcagggctcagtcggggctactgtcaaccaaggcccgctggaggttgcacaggtatttctggctgagatccctgccgaccctaagctctatcgccaccacaataaactcagactgtgttttaaggagtttatcatgaggtgtggcgaggccgtggagaagaacaagcgtttgattactgctgaccaaagagagtaccagcaggagttgaagaagaactacaacaagttaaaagaaaatctgagacccatgatcgaacggaagatcccagagctgtataaacccatctttagggtggagtctcaaaagagagattcttttcaccgcagcagctttaggaagtgcgaaacacagctatcacagggctcctag

SEQ ID NO: 185060 - DNA, 6300 bp, synthetic construct
  misc_feature 1..6300: note = Description of Artificial Sequence: Synthetic coding sequence
  source 1..6300: mol_type = other DNA
atggccaccctgcccagcgccgagcggcgggccttcgccctgaagattaatagatattcatctgcagagattcgcaaacagtttactttaccacccaacctgggacagtatcatagacagagcatctcaaccagcgggtttccaagtctacagctgccacaattttatgatcccgttgagccggtggatttcgaagggctgttgatgacccacctcaatagcctcgacgtgcagctggcacaagagctcggcgattttacagacgatgaccttgacgtggtttttactcccaaggaatgccgcacacttcagccctcattacccgaggagggggtggagttggacccccacgtcagggattgtgtccagacatacattcgcgaatggctgatcgtgaacaggaagaaccagggctctccagaaatctgcgggttcaaaaaaacggggagcagaaaagacttccataaaaccctgcccaagcagactttcgagtctgaaaccctggagtgttccgagcctgccgctcaggccgggcctcggcacctcaacgtgttgtgcgatgtgtcaggaaaagggcccgtgacggcatgtgatttcgatctgagaagtctccagccggacaagcgactggagaatcttctgcagcaggtctccgccgaggactttgaaaaacagaacgaggaggcccgccgcacaaatagacaagctgaactgttcgctctttacccttctgtggacgaggaggacgcggtggaaatccggccagtgcctgaatgcccaaaggagcacttgggtaaccgcattcttgttaaactgttgaccttaaagtttgagatagagatcgaacccctgttcgcctccatagccctgtatgatgtgaaagaacgaaaaaagatctctgagaacttccactgcgacctgaatagtgaccagtttaaaggatttcttagagcacacacaccctccgtcgctgccagttctcaggcaagaagcgccgtttttagtgtcacctatccaagttctgatatctacctggtagtaaagatagagaaggtcctacagcagggtgaaatcggggactgtgctgaaccatatacagtcattaaagaatccgacggtggcaaatctaaagaaaagatagagaagcttaagctgcaagccgagtctttctgccagaggctcggcaaataccgcatgcccttcgcttgggcccccatttccctctcctcattttttaatgtgagcacccttgaacgggaggtaactgatgtggatagcgtggtaggccggtcgagcgttggggagaggcgtacactcgcccaaagcaggcgactgtctgagagggccttaagtttggaagagaacggcgtgggcagtaatttcaaaacttcgacgttgagtgtgagctctttcttcaagcaggaaggagatcggttaagcgatgaggacttattcaaatttctggccgactataagcgctcctcgagcctccagagacgggtcaagtcaatccccggtctgctacgtttggagatctctacagccccagaaatcatcaactgctgtctgacacccgaaatgctgcccgtgaaaccatttccggaaaatcgcactcgccctcataaggagattctggagtttccgacacgtgaggtttacgttcctcatacggtttaccggaatttgctgtacgtctacccccagcgactgaattttgttaacaagcttgccagcgcaagaaatatcactatcaaaatccaattcatgtgtggggaagatgcctcaaatgccatgcctgtgatctttgggaaaagctcaggacccgagtttcttcaagaggtctatacggctgtaacttatcacaataaaagcccagatttttacgaggaggtcaagatcaagctccccgcaaagctcacagtgaaccaccaccttctgttcacattttaccacatcagctgccagcagaagcagggggcaagcgtggagactttattaggctacagttggctacctatccttctgaatgaacgactgcagacaggatcttactgtctcccagtggctcttgagaagctgcctcccaactactcgatgcattccgctgagaaagtgccgctgcagaatcctccaattaagtgggcagaggggcacaaaggggtgtttaatatagaggtgcaggccgtttctagtgtccatacccaggacaaccacctggagaagttcttcaccttatgtcactcattagagtcgcaggtgacttttcccattagagtcctggatcagaaaatcagcgagatggctttagaacatgagctgaaattatctatcatttgtctcaactcaagtcggctcgaacccttagtgctgttcttacacttggttctggataaactatttcagctaagtgtgcaaccaatggtcattgcgggtcagaccgccaacttctcccagttcgcctttgagtccgtagtggctatcgcgaacagtcttcataactccaaggacttatctaaagatcagcatggacgcaattgcctgctggcctcatacgtgcattatgtgtttcgcttgcctgaagtacagcgcgatgtaccaaaatccggggcaccaacagcgttgcttgaccctagaagttatcatacttacggccggacttcggcagccgcggtgtcttctaagctgctgcaggctcgggtgatgagttccagcaatcctgatctcgctgggacccatagtgcagccgatgaggaggtgaagaacattatgagctccaaaatcgcggacaggaactgttcaagaatgtcttattattgtagtggatcttccgatgctccgtcttccccagcagccccgcggccagcgtctaaaaaacatttccacgaagagctggctctgcagatggtggtttcgaccgggatggtgagagaaactgtgtttaagtacgcatggtttttcttcgaactgctggttaagagcatggcacagcatgtgcataacatggacaaaagggacagcttcaggagaactagattctcagaccgctttatggacgacataaccactatcgtgaacgtcgtgactagcgaaatcgccgcacttctggtaaagccacagaaggagaacgagcaagcagagaagatgaatatctccctggcattcttcctgtatgatcttttaagtctaatggaccggggctttgtgtttaatctcatcagacattactgtagtcaactgtcagctaagcttagcaacctacccaccctcatatcaatgcgccttgagttcctgaggatcctgtgttcccatgaacactacctaaacctaaacttgttctttatgaatgctgacacggcccccacgagcccatgtccgtccatcagcagtcaaaactctagctcctgcagctctttccaagaccagaagatcgcttctatgtttgacctgacctcagaataccggcagcagcattttctgacagggctcctgttcactgagcttgcagcggctctagatgccgaaggtgagggaatctccaaggtgcagcgaaaggccgtgagtgcaattcactcattgctgagttctcacgatctcgaccctaggtgtgtaaagcccgaagttaaagttaaaattgctgcactgtacctgccccttgttggcattattttagacgctctgccacaattatgtgactttaccgtggccgacactaggaggtacaggacctccggctccgacgaggagcaggagggtgccggcgcgatcaatcagaacgttgccttagcgattgctggcaacaatttcaatctgaagacctccggtattgtgctgagctctctgccttataagcagtataacatgctgaatgcagacaccaccagaaacctcatgatttgttttctctggatcatgaaaaacgccgaccagtccctaataagaaaatggatagcagaccttccgtcaacgcagctgaatcgcattctggacctcctgtttatttgcgtcctctgctttgagtataagggaaaacaatcatcggacaaagtctccactcaagtgcttcagaaatctagggatgtgaaagcgcggctcgaggaggccttgctccggggggaaggagcacggggggagatgatgaggagacgggcccccggtaatgatagattcccaggtctgaatgagaatctgcgctggaagaaagagcaaacgcattggcgccaggccaacgagaagctggataaaacgaaggctgaactggaccaggaggccttgatctctggtaatctggcaactgaagctcacttaattattctggatatgcaggaaaatatcattcaagccagcagcgcgcttgattgtaaagacagccttctcgggggagtgcttagggtcctcgtcaatagtctgaactgtgaccagtctacgacctatctgacccattgctttgctacactccgtgcccttatcgccaaattcggagacctcttgttcgaggaagaggtggaacagtgcttcgatctctgtcaccaggtgctgcatcactgttcctcttccatggatgtgacccgcagccaggcctgtgcgactctgtacctgcttatgaggtttagttttggagcaacttccaattttgcccgcgtcaagatgcaagtcactatgtccttagccagcctggtaggccgggcgcccgatttcaatgaagaacatctacggcgctcactgaggacaatcctcgcatactcagaagaggacaccgcgatgcaaatgacacccttcccaacccaggttgaggaattactttgtaacctcaacagtattctttacgataccgtgaaaatgcgcgaatttcaggaagatccagagatgctgatggatcttatgtacaggatcgctaaatcatatcaagcgagccctgatttacgacttacttggctgcagaatatggctgagaagcatacgaaaaagaagtgttatactgaggcagccatgtgcttggtgcatgcggcagctttagtagccgagtaccttagcatgctggaggaccactcctacttgccggtggggtcagtaagttttcaaaacattagctctaacgtgttggaggaaagcgttgtcagcgaagacacactaagcccggatgaagatggcgtttgcgcaggacagtattttaccgagtccggactggtgggtctgctggagcaagctgctgagctgttttccactggggggctgtacgagaccgtgaacgaagtctacaaactagtcattcccatcttagaggcacatcgggagttccgaaagctgacccttacgcactccaaattacagcgagcttttgacagtatagtcaacaaagatcacaaaaggatgttcggcacttactttcgggtggggttcttcgggagcaaattcggcgatttagatgagcaggagttcgtctataaagagcctgcgatcacaaagcttcccgagatctcgcaccggttggaggcgttctatggccagtgtttcggcgctgaatttgtggaggtcatcaaagactctacccccgtggataaaacaaagctcgatcccaataaggcctatatccagatcacttttgtggaaccatatttcgacgagtacgaaatgaaggatagagtcacatatttcgagaaaaacttcaatctgagacggttcatgtacaccactccctttacactcgagggacgtcctaggggcgagctgcatgagcagtaccgtagaaataccgttctgacgacaatgcatgcatttccctacattaagaccagaattagcgtgatccagaaggaagaattcgtgctcacccctatcgaggtcgcaatagaagacatgaagaagaagactttacagctcgctgtagccatcaatcaagagccccctgacgctaagatgcttcagatggtgctgcaggggtcagtcggagccactgtcaaccaagggcctctagaagtggcacaggtttttttagctgagattcctgccgatcccaagctttaccgtcaccacaacaaactccgtctatgtttcaaagaattcatcatgcgttgtggggaggccgtcgagaagaacaagcggctgattaccgccgatcagcgagaataccagcaggagctgaagaaaaattacaacaagctgaaagagaatttgcgacccatgatagaacgaaagattcccgaactgtacaaaccgatattcagggtggagtcccaaaagcgggactcctttcaccggtcgagcttcagaaagtgcgagacccaattatcacaaggcagttag

SEQ ID NO: 185061 - DNA, 6000 bp, synthetic construct
  misc_feature 1..6000: note = Description of Artificial Sequence: Synthetic coding sequence
  source 1..6000: mol_type = other DNA
atgacccacctgaacagcctggacgtgcagctggcccaggagctgggcgacttcaccgatgacgacttggacgtggttttcactcctaaagagtgcagaacccttcagcctagcctcccggaggaaggagttgagctggatccacacgtcagggattgtgtgcagacgtacatcagggaatggctcatagtcaaccgtaagaaccagggatcccctgaaatttgcggcttcaagaaaactgggtcccgcaaggatttccacaagacactgcctaagcagacattcgagagtgagaccctggaatgtagcgagccagccgcccaggctggtccgagacatcttaacgttctatgtgatgtcagtggaaagggtccagtgacagcctgcgacttcgacctccgcagcctgcaacccgataagaggctggagaatctgctacagcaagtgagtgccgaggatttcgagaagcagaacgaagaggcccgacgaacaaatagacaggcggagctctttgccttgtatccatcggtggatgaagaagacgcagtggagatcagacccgtgcccgagtgccctaaggaacacttgggaaacaggattttagttaagttattgaccctgaagtttgaaattgagatcgagccactcttcgccagcatcgctctctatgacgtgaaagagcggaagaagatttctgaaaactttcattgcgacctcaacagcgatcagttcaaggggttcctccgggcccacacaccatctgttgccgcgagcagtcaagcccgaagtgctgttttctcagtcacgtaccccagctccgatatatatttggttgtgaaaatagaaaaagttttacagcaaggtgaaattggggactgcgcggagccttatacagtgattaaggaatcagatgggggcaaaagcaaggagaagatagaaaaattgaagcttcaggctgagagtttctgtcagagattagggaaatatcgcatgccttttgcttgggcgcccatctccctttcctccttctttaacgttagcaccctggagcgtgaggtcacggatgtagattctgttgtgggccgatctagtgtgggcgagagacgcacactcgcgcagtcacggcgcttaagtgagagggccctgtccctcgaagagaacggcgtcggctcaaactttaagaccagtacgctatctgtctcctccttttttaagcaagaaggcgacagactcagcgatgaagaccttttcaagtttctggcggactataaaaggtcttcaagcctgcagcggagggtgaagtccattcccgggctcctccggctggaaatctccaccgcccccgagataatcaattgctgcctgacccctgaaatgctgcccgtcaaacccttcccagagaaccgtaccagaccacacaaggaaatattggagttccccacgagggaagtttacgtcccccacactgtctacagaaacctcctctacgtctatcctcaacgacttaattttgtgaataagctggcttctgctcggaatatcacaatcaaaattcagttcatgtgcggcgaggacgcctccaatgcaatgcccgttatattcggtaagagttctgggcctgaatttctgcaagaggtatacactgccgtgacctaccataacaagagccctgatttttacgaggaggtgaagattaagttgcccgctaaactgaccgtcaatcatcatcttctcttcactttttaccacatttcttgccagcagaaacaaggcgcctctgtcgagacgcttctgggatacagctggctacccatattattgaacgaaaggctgcagaccggtagctattgtctcccggtcgcactggaaaaactaccaccaaattattcaatgcatagtgcagaaaaagtgccattacaaaacccaccaatcaagtgggccgagggacataagggcgtgtttaatatagaagtgcaggcagtgtcaagcgtacatacgcaggacaatcacctggagaagtttttcacgctctgccacagcctcgaatctcaggtcacatttcccatccgagtgcttgatcagaagatcagtgagatggctttggagcacgaattgaagctctcgattatctgcctgaactcttcccggctggaaccactggtcctatttctgcacttggtgctcgacaagttattccagttgagtgtgcagccaatggtgattgcaggacaaacagccaacttctctcagttcgcctttgagtctgtggtggcgatcgccaatagcctgcataattctaaggatctgagcaaagatcagcatgggcgtaattgccttctcgcctcatacgtccactatgtgttcagacttcctgaagtgcaacgcgatgtgcccaagtccggagcacccaccgccctgttagaccccaggtcataccatacgtatggacgaacgagcgcagcagccgtctctagcaagctgctccaggcaagggtgatgtcctctagcaaccccgacctagcgggaacgcatagcgcggcagacgaggaagtaaagaatataatgagcagcaagcattttcacgaagaactagcactgcagatggttgtctctacaggtatggtgagggagactgtttttaaatatgcttggttctttttcgaactgttggttaaatccatggcccagcatgttcacaacatggacaagcgcgacagtttcagacgcacgcgcttcagcgatagattcatggatgacattacaacaattgtcaacgtggtgacgagcgagattgcagcactgctggttaagccacagaaagagaatgagcaggctgaaaagatgaatatttccctcgcatttttcctttatgatctgctgtccctaatggacagggggtttgtgtttaatctcatccgccattattgctcccagctgtcagccaagctctcaaatcttccaaccctaataagcatgagactggagttcctcaggatactgtgctctcacgagcattaccttaaccttaacctctttttcatgaatgccgacaccgccccgacatcaccttgcccctctatcagctctcagaactctagctcctgtagctcctttcaggaccagaaaattgccagcatgtttgaccttacatctgagtatcggcagcagcattttttgactgggctgctgtttaccgagctcgctgcggctctggacgcagaaggggagggcatcagcaaggtgcaacgcaaagctgtgagcgcaattcattcgctgctgagtagccatgatctcgacccgcgctgcgtgaagcccgaggtgaaggtcaaaatcgccgccttatatctgccgttagtcgggataatcttagacgcactgccccagctatgcgattttactgtcgctgatacgcggaggtatcgaacatccgggagtgacgaagagcaggaaggtgccggggcaattaaccaaaatgtagcattagctatcgcaggtaataattttaatcttaagacttctgggattgtgctttcctcactgccatacaagcagtacaatatgctgaacgcagacactaccagaaacctgatgatatgcttcctttggattatgaagaacgcggaccaatctttaatccgtaagtggattgctgacctcccttccacacaactgaaccggatcctcgatctcctgttcatttgcgtgctgtgctttgagtacaaaggtaaacaaagctctgacaaggtgtctactcaggtcctccaaaagagccgtgatgttaaagcccgactggaagaagccttgctgaggggcgagggagcccgcggcgaaatgatgcggcggagggcaccagggaacgatagatttcccggtctgaacgagaatttgcgatggaaaaaggaacagacccactggcgccaggcaaacgagaaattagacaagaccaaggcagagcttgaccaggaggccctgatcagcgggaacttagcaactgaagcccaccttatcattctggacatgcaggaaaacatcattcaggctagctccgccctggattgtaaagactcactgttgggtggggtgctgcgagttctcgtcaacagtttgaattgcgaccaatcaactacgtacctgactcactgtttcgctacactgagggctctcattgccaagttcggcgatctgctgtttgaagaagaagttgagcagtgttttgacttatgccaccaggtgctccaccactgcagctcttccatggatgtcacccgatctcaggcctgcgccacactgtatctgctcatgcggttctctttcggggcgacgagcaatttcgcaagagtcaagatgcaggtgaccatgagtcttgcatctctggttggtagggcaccagacttcaacgaggagcacctgcgtaggtcactgcgtacaatcctggcttactccgaggaggataccgccatgcagatgacgccttttcctacccaggtagaggaactgctttgcaacctgaatagtatcctgtacgacaccgtaaagatgcgcgaattccaggaggatcctgagatgctcatggacctcatgtacaggatcgccaaaagctaccaggctagccccgatttgagactaacttggctgcaaaatatggcagagaagcatacgaagaaaaagtgctatacagaagccgctatgtgcctcgtgcacgcagccgctctagtcgcggagtacttaagtatgctggaggatcactcgtacctgcctgttggctcagttagtttccagaatatttcgagtaacgtgctggaggagagtgtagtctctgaggacaccctaagccccgacgaagacggggtgtgcgcaggtcagtacttcacagagagcggtttagtgggattgctggaacaggccgcggaactgttctctaccggggggctctacgagacagtcaacgaggtgtacaagttggtgatacccattttggaggctcatcgagagttccgcaaactcacactgactcattctaaattacagcgagcctttgactctatcgtaaacaaggaccacaaaaggatgtttggaacttatttccgggtcggctttttcggaagcaagttcggcgatttagatgagcaggagttcgtttataaagaacccgccatcacaaagctgcctgagatttcccaccgcctggaagccttttatggtcagtgcttcggggcggagttcgtcgaggtcataaaagattccacaccggtagacaaaactaagctagatcctaataaagcctatatccagatcacctttgtggagccttattttgacgaatatgagatgaaggaccgcgtaacatattttgagaaaaactttaaccttcgccggttcatgtacaccacacccttcaccctggagggccggccaaggggagagcttcacgagcaataccgaagaaacaccgtgctgacaacgatgcatgccttcccatacattaaaactcgcatctccgtgatacaaaaggaggagttcgtgctgacaccgatcgaggtcgctatcgaagatatgaagaaaaaaactttgcagctggccgtggccattaaccaggaaccccctgatgcaaaaatgttacagatggttctgcaaggtagtgtcggtgcaaccgttaatcagggaccacttgaagtggctcaggttttcttggcagagatcccagctgaccctaagctttatcggcatcataataagcttcggctgtgtttcaaagaatttatcatgagatgtggggaagctgtggaaaagaacaaaagattgatcaccgccgatcaaagggaataccaacaggagcttaaaaaaaactacaataagctgaaggaaaacttaagaccaatgatagagcgcaagatacctgagctatacaagcccattttcagggtggagagtcagaaaagggactcgtttcaccgctcctcattccggaaatgcgagacccagctgtcccagggaagttag

SEQ ID NO: 185062 - DNA, 1182 bp, synthetic construct
  misc_feature 1..1182: note = Description of Artificial Sequence: Synthetic coding sequence
  source 1..1182: mol_type = other DNA
atgaagcggacccgggacgaggtggacgccaccctgcagatcgccaaattaaacgccgcagagctgctccccgccgtccattgcctgggttttggccccggagccagtggtgcagcggcaggagacttctgtctcttagaactagaaccaaccctctgtcagcagctggaggatggacattctctggttatcaggggcgacaaagatgaacaagcagtgctctgttctaaggacaaaacttacgatttgaaaatcgcagacactagtaatatgctgctttttatccctggttgcaagacacctgatcagctcaaaaaggaagactctcattgcaatattatacacactgagatctttggtttctccaacaattattgggagctccggagacgtagaccaaaactgaagaagctgaaaaaattgttaatggaaaacccttacgagggaccagattctcagaaggaaaaagactcaaacagttcaaaatataccaccgaggacttgctcgatcagatccaggctagtgaagaagaaatcatgacccaactccaggtattgaacgcttgcaaaatcggaggctattggcgaattttggaattcgactatgagatgaaacttctcaatcacgtgactcagctcgtggatagcgagtcatggagtttcggaaaggtgcccctgaacacctgcttgcaggaactcggccccttggaacccgaagagatgatcgaacactgtttaaagtgctatgggaagaaatacgtagatgagggagaggtatactttgagctcgacgccgacaagatctgccgggccgccgcaagaatgctcctacaaaacgccgtcaagttcaacctggccgagtttcaagaggtgtggcagcagtccgtccctgagggaatggtgacaagtctcgatcagctgaaaggccttgcacttgttgaccggcattcccgaccagaaatcatctttctcctcaaggtagatgatctaccggaagataaccaagagcgcttcaattctctcttttcactcagagagaagtggaccgaggaagacatcgctccatacattcaggatctgtgcggcgagaagcaaacgatcggcgctctgctgactaagtactcccattccagcatgcagaacggagttaaagtgtacaatagccggcgaccaattagttag

SEQ ID NO: 185063 - DNA, 342 bp, synthetic construct
  misc_feature 1..342: note = Description of Artificial Sequence: Synthetic coding sequence
  source 1..342: mol_type = other DNA
atgagcgccagcgtggtgagcgtgatcagccggttcctggaggagtacctgtcttctaccccacagagattaaagcttttagatgcttacttattatacattttgttgaccggtgccctgcagtttggctattgcctgctggtgggcactttcccctttaattccttcctttcagggtttatcagctgcgttggttcctttatcctggcagtgtgtcttagaatccagattaatccacagaacaaggcagactttcaggggatcagtcccgaacgtgcttttgccgacttcttattcgcctccactattctgcacctggtggtgatgaattttgtgggctag

SEQ ID NO: 185064 - DNA, 285 bp, synthetic construct
  misc_feature 1..285: note = Description of Artificial Sequence: Synthetic coding sequence
  source 1..285: mol_type = other DNA
atgcggaccctggccatcctggccgccatcctgctggtggccctgcaggctcaggccgagccgctgcaggcgcgcgctgatgaggtggccgccgctcccgaacaaatagctgcagatatccctgaggtagtggtctccctagcttgggacgagagcctggcacctaagcatccaggttctcgaaagaacatggcgtgttattgtaggattcccgcctgcattgccggcgaaaggagatacggcacatgcatctaccagggcaggctgtgggccttctgctgttag

SEQ ID NO: 185065 - DNA, 285 bp, synthetic construct
  misc_feature 1..285: note = Description of Artificial Sequence: Synthetic coding sequence
  source 1..285: mol_type = other DNA
atgcggaccctggccatcctggccgccatcctgctggtggccctgcaggcgcaggccgaaccactgcaggccagggctgacgaagtggccgctgcgcctgagcagatcgctgctgatattcccgaagtggttgttagtctcgcatgggacgaatcgttggcccccaagcaccctggcagcaggaagaatatggcgtgctactgcaggataccagcatgcattgcgggagagagaaggtacggcacctgtatatatcagggccgcctctgggcattttgctgctag

SEQ ID NO: 185066 - DNA, 294 bp, synthetic construct
  misc_feature 1..294: note = Description of Artificial Sequence: Synthetic coding sequence
  source 1..294: mol_type = other DNA
atgcggatcatcgccctgctggccgccatcctgctggtggccctgcaggtgcgagcaggtcccctacaggccaggggagacgaggcccccggccaggaacagagggggcccgaggatcaagacatctctatctccttcgcctgggataaaagctctgccctgcaggttagcggatctacaagaggaatggtgtgttcatgtcgtttggtgttttgcagaagaactgagctgagagtgggaaattgtctgatagggggcgtctcattcacgtattgttgtactcgagttgattag

SEQ ID NO: 185067 - DNA, 285 bp, synthetic construct
  misc_feature 1..285: note = Description of Artificial Sequence: Synthetic coding sequence
  source 1..285: mol_type = other DNA
atgcggaccatcgccatcctggccgccatcctgctggtggccctgcaagcgcaagcagaaagtctgcaggaacgcgccgatgaggccaccactcaaaaacagagtggagaagataatcaggatcttgccatctcatttgcaggaaacgggcttagtgccctgcgtacaagcgggagccaggcccgggccacatgctattgccgcacaggccgatgtgccacccgggaaagtctcagtggcgtgtgcgaaatcagcgggagattgtatcggttatgctgtcggtag

SEQ ID NO: 185068 - DNA, 303 bp, synthetic construct
  misc_feature 1..303: note = Description of Artificial Sequence: Synthetic coding sequence
  source 1..303: mol_type = other DNA
atgcggaccctgaccatcctgaccgccgtgctgctggtggccctgcaagcaaaagcagaaccgttgcaggctgaggacgatccactccaggccaaagcttacgaggctgacgcccaagaacagcggggcgcaaatgatcaggacttcgccgtaagctttgcagaagatgcctccagcagcttacgagcccttggttcaaccagagcctttacgtgccattgcaggcggtcatgctacagcaccgagtactcctatgggacgtgcactgtaatgggaatcaaccatcgattttgctgtctgtag

SEQ ID NO: 185069 - DNA, 207 bp, synthetic construct
  misc_feature 1..207: note = Description of Artificial Sequence: Synthetic coding sequence
  source 1..207: mol_type = other DNA
atgcggaccagctacctgctgctgttcaccctgtgcctgctgctgtccgagatggcatcaggcgggaacttccttaccggactaggccatcgctctgaccactacaactgcgtgtccagtggggggcagtgcctctactccgcgtgtcccatctttacaaagatccaggggacttgctaccggggaaaagccaagtgttgtaagtag

SEQ ID NO: 185070 - DNA, 372 bp, synthetic construct
  misc_feature 1..372: note = Description of Artificial Sequence: Synthetic coding sequence
  source 1..372: mol_type = other DNA
atgaagctgctgctgctggccctgcccatgctggtgctgctgccccaagtgattcccgcctatagcggcgaaaagaaatgttggaacaggagtggtcattgccgcaaacaatgtaaagatggcgaggctgtaaaagacacatgtaaaaacttgagagcctgctgcatcccatctaacgaggatcatagacgcgtgcccgccacaagtcctacaccattatccgacagcacccctgggattattgacgatatcctgaccgtcaggtttacaaccgactattttgaggttagctcgaaaaaggacatggtggaggaatcagaagccgggcgcgggaccgagacctcactgccgaatgtccaccatagttcttag

SEQ ID NO: 185071 - DNA, 1002 bp, synthetic construct
  misc_feature 1..1002: note = Description of Artificial Sequence: Synthetic coding sequence
  source 1..1002: mol_type = other DNA
atgagctggatcaaggagggcgagctgagcctgtgggagcggttctgcgccaacatcatcaaggctggaccaatgcccaagcacatcgccttcataatggacggtaaccgacgctatgccaagaagtgtcaagtggagaggcaagaaggacacagccaggggttcaacaaactggctgagacactgcggtggtgtctgaacctggggatcctagaggttacggtatatgcatttagtattgagaactttaaacggagcaaatcagaggtggatggactaatggaccttgcaagacagaagttctcccgcctgatggaagaaaaggagaagctgcagaagcacggggtgtgtattcgtgttttgggagacctgcatttactgcccctagatctgcaggagctaattgcccaggccgtccaagcgacaaagaactataataaatgtttcctcaatgtctgtttcgcatataccagccggcacgagataagcaacgccgtgcgggagatggcctggggcgtcgagcaaggcctcctggaccccagcgacatcagcgagagtctgcttgacaagtgcctgtacactaaccgatcaccacaccccgacatccttattagaacctccggggaggtcaggctcagcgactttctcttgtggcaaacctctcacagctgcctggtgttccaaccagtgctttggccggaatacacattttggaatctgttcgaagccattctgcagttccaaatgaaccattccgtactgcagaaagccagggacatgtatgcggaggaaagaaaaaggcagcagctggaacgcgaccaagccactgttaccgagcagcttctgcgcgaaggtctgcaggcttcaggtgacgcacagctgcggcggacgcggctgcacaagctgtccgccaggcgagaggagcgcgtccaagggttcctgcaggcattagaactgaaacgggccgactggcttgcgcgtctcggtactgccagcgcctag

SEQ ID NO: 185072 - DNA, 1005 bp, synthetic construct
  misc_feature 1..1005: note = Description of Artificial Sequence: Synthetic coding sequence
  source 1..1005: mol_type = other DNA
atgagctggatcaaggagggcgagctgagcctgtgggagcggttctgtgccaacataatcaaagcaggtccaatgcccaagcatatcgcctttatcatggacgggaatagaaggtatgcgaagaagtgtcaagtggagcgccaggaggggcactcacagggtttcaacaaactcgccgaaacccttcgctggtgtctaaacttagggatcctggaagtgactgtatacgcgttctcgatcgaaaattttaagcgctctaagtctgaggtcgacggccttatggatctggccaggcagaaattctccaggctcatggaagaaaaagaaaagttgcagaaacacggcgtctgcattagagtgctgggcgacttgcatctgctccccctggatcttcaggagctgatagcacaggcagttcaggcaacaaagaattataacaaatgcttcttaaacgtttgcttcgcttatacgagcaggcacgagattagcaacgcggtaagagaaatggcttggggcgtggaacagggcttgttagacccctcggatatctccgagagcctgctggacaagtgcctctatactaatcgatccccccacccagatatcctaattcggacttcaggcgaggtcagactatcggactttctgctttggcagacctcacactcatgcctggtctttcagcctgttctgtggccggagtacactttttggaacctgtttgaggcgattctgcagttccagatgaaccactctgttctccagcaaaaggcccgggacatgtatgccgaggagagaaagcggcagcagctggaacgcgaccaggcaaccgtgactgagcagctgttgcgcgagggactgcaggcatctggggacgctcaactgcgccgcacccggttacacaaattgtcagctcgacgagaagagcgggtacagggattccttcaggccctcgagctcaagagagccgattggctggctaggcttggaactgcaagcgcatag

SEQ ID NO: 185073 - DNA, 516 bp, synthetic construct
  misc_feature 1..516: note = Description of Artificial Sequence: Synthetic coding sequence
  source 1..516: mol_type = other DNA
atggacctggcccggcagaagttcagccggctgatggaggagaaggaaaaactgcaaaaacacggagtgtgtatacgggttctgggtgacctgcatttgttaccgctggatctccaggaactgattgcccaagcagtacaggccactaaaaactacaataatgacatcagcgagagtctcctggacaaatgcctttacactaatcggagtccgcacccagacattctgatccgcaccagcggcgaggtgcgtttaagtgatttcttactctggcaacaaaaagctcgcgacatgtatgctgaggaacgcaagcggcagcagttagaacgtgaccaggccactgtcactgagcagctgctgcgggagggtcttcaggcctccggagacgcccagctgagacgcacccgcctgcataaattatctgctaggcgagaagagcgagtgcaggggtttctccaggccctcgagctcaagcgggctgactggcttgctcgactcggaaccgcaagtgcttag

SEQ ID NO: 185074 - DNA, 501 bp, synthetic construct
  misc_feature 1..501: note = Description of Artificial Sequence: Synthetic coding sequence
  source 1..501: mol_type = other DNA
atggacggcaaccggcggtacgccaagaagtgccaggtggagcggcaggagggccactcacaggggtttaataaactcgccgagaccttaaggtggtgtctgaacctcggtatcctggaagtgacagtgtatgccttctctatcgagaacttcaagcggtctaaatccgaggtggacggcttgatggatttggcccgtcagaagttctctaggctgatggaggaaaaagagaagctacagaaacatggagtgtgcattcgtgtgctgggcgaccttcatctgctgcctctggacttgcaagaactgatcgcacaggccgtgcaggccactaagaattacaacaaatgttttctcaacgtgtgtttcgcatacacaagcaggcacgaaatcagcaatgctgttcgagaaatggcttggggagtagagcaggggctactcgacccctcccgggacagattccaccacattgggcaggcttctctggaattgctaactagctag

SEQ ID NO: 185075 - DNA, 546 bp, synthetic construct
  misc_feature 1..546: note = Description of Artificial Sequence: Synthetic coding sequence
  source 1..546: mol_type = other DNA
atggaggagaaggagaagctgcagaagcacggcgtgtgcatccgggtgctgggcgacctacacctgttgcccttggacttacaagagttgatcgcccaggctgtccaggccaccaagaattataataagtgcttcttgaacgtctgcttcgcctacacttcgagacatgagattagcaacgccgtgagagagatggcctggggagttgaacagggcttgctggaccccagcgatatttccgaaagcctactggataaatgtctgtatacgaacagaagccctcatcctgatatccttatccgtactagtggggaagttcgcctgtcagactttctcctgtggcagaccagccattcttgcctggtattccagcccgtgctttggccggagtacacattttggaatttgtttgaggccatcttgcagttccagatgaaccattctgtcttacagcatccaggcagtctgctgaccaaggcctggaagaagccatttcagcaagacggcgagctctacggcaactgttcttccccaaaaagttcatag

SEQ ID NO: 185076 - DNA, 669 bp, synthetic construct
  misc_feature 1..669: note = Description of Artificial Sequence: Synthetic coding sequence
  source 1..669: mol_type = other DNA
atgagctggatcaaggagggcgagctgagcctgtgggagcggttctgcgccaatatcatcaaggccggacctatgccgaaacacatagccttcatcatggacggcaacagaagatacgcaaagaaatgtcaagtggaacgccaagaaggccattctcagggcttcaacaagctggccgagaccctgagatggtgcttgaatctcgggatccttgaggttaccgtgtacgccttctccattgaaaacttcaaacgctccaaatcagaggtagatggattgatggacctggctaggcagaaattcagtcgcttaatggaggaaaaggaaaagctccagaaacatggagtttgtattcgcgtgctgggagatctccatctcctgccactcgacctccaagaactcattgcccaggcagtccaggccacaaaaaactataacaagtgttttcttaatgtgtgctttgcttacacaagccgtcatgagatctccaatgccgtgcgcgaaatggcatggggcgtcgaacagggtttgttggacccgagatatccggatgatatcagtgagtctcttctcgacaaatgtctctacaccaacaggtctccccatcccgacattctcattcggacatcaggggaggtcagactttctgacttcctgttgtggcagtag

SEQ ID NO: 185077 - DNA, 369 bp, synthetic construct
  misc_feature 1..369: note = Description of Artificial Sequence: Synthetic coding sequence
  source 1..369: mol_type = other DNA
atgagctggatcaaggagggcgagctgagcctgtgggagcggttctgcgctaacattatcaaagccggcccaatgccaaaacatattgcatttatcatggacggaaacagaaggtatgccaagaagtgccaagttgaacgtcaggagggccactctcagggatttaataagctggccgagaccctgcggtggtgccttaatctggggattctggaggttactgtctacgccttctccatcgagaacttcaagcggagtaaatctgaggttgacggtcttatggatctcgccaggcaaaagttttccaggttgatggaggaaaaggaaaagctgcagaaacacggcgtttgtatcagggtgcttggatag

SEQ ID NO: 185078 - DNA, 216 bp, synthetic construct
  misc_feature 1..216: note = Description of Artificial Sequence: Synthetic coding sequence
  source 1..216: mol_type = other DNA
atgagctggatcaaggagggcgagctgagcctgtgggagcggttctgcgcgaatattatcaaggctggaccaatgcctaagcacatcgcattcattatggacgggaacagaaggtacgccaaaaagtgtcaagtggagcggcaggaaggccatagtcagggatttaacaaattagcggagaccctccgctggtgtcttaacctgggaattctgtag

SEQ ID NO: 185079 - DNA, 258 bp, synthetic construct
  misc_feature 1..258: note = Description of Artificial Sequence: Synthetic coding sequence
  source 1..258: mol_type = other DNA
atgagctggatcaaggagggcgagctgagcctgtgggagcggttctgcgccaatatcatcaaggccggacccatgcccaagcacatcgcatttattatggacgggaaccgaaggtacgctaaaaagtgccaggtcgaacgccaggagggccattcccaaggattcaataaactcgccgaaactctaaggtggtgcttgaacctcggcattctcgaagtaaccgtctatgccttctccatcgaaaattttaagagatag

SEQ ID NO: 185080 - DNA, 885 bp, synthetic construct
  misc_feature 1..885: note = Description of Artificial Sequence: Synthetic coding sequence
  source 1..885: mol_type = other DNA
atgagctggatcaaggagggcgagctgagcctgtgggagcggttctgcgccaacatcattaaggctggcccgatgcccaaacacatcgccttcataatggatggcaatcgaaggtacgctaaaaaatgccaggtggagagacaggaaggccactcacaggggtttaataagctcgccgaaacactcagatggtgccttaatctcggtattctcgaggttactgtctatgccttctcaatcgagaacttcaagcgcagtaaatctgaagtcgatggcctgatggatctggcgaggcagaagttctcccgcttgatggaggaaaaatgctttctcaacgtctgcttcgcgtataccagccggcatgaaatttccaatgccgtgcgggaaatggcatggggtgtggaacagggcctgctggatccaagcgatatctctgaaagtttactggataaatgtctgtatacaaatcgctctcctcaccctgacatccttattcggacatccggtgaagtgcgcctctcagacttcctgctgtggcagacgtcccattcatgtctggtatttcagcccgtcttatggcctgagtacacattctggaacctgttcgaggccattttgcagttccaaatgaatcattccgtgctgcagaaagcccgggatatgtatgccgaggagaggaaacgacagcagctggaacgagatcaggctaccgtgaccgaacaactgttacgcgagggcctccaagcttccggggatgcccagctacggaggacccgactgcacaaattgagcgccaggagggaggagcgcgttcagggttttctgcaggctttggaactaaagagggctgattggctggccaggcttggcaccgcctccgcatag

SEQ ID NO: 185081 - DNA, 183 bp, synthetic construct
  misc_feature 1..183: note = Description of Artificial Sequence: Synthetic coding sequence
  source 1..183: mol_type = other DNA
atgagctggatcaaggagggcgagctgagcctgtgggagcggttctgtgctaacatcatcaaggccggtcccatgcctaaacacattgccttcatcatggatgggaatagaaggtacgctaaaaaatgtcaggtagagagacaagaggggcatagccagggcttcaacaaactggctgaatag

SEQ ID NO: 185082 - DNA, 396 bp, synthetic construct
  misc_feature 1..396: note = Description of Artificial Sequence: Synthetic coding sequence
  source 1..396: mol_type = other DNA
atgagctggatcaaggagggcgagctgagcctgtgggagcggttctgcgcaaatattatcaaggccggtcctatgccaaagcacattgctttcattatggacgggaaccggcgatacgccaaaaaatgtcaggtcgaacgacaggaagggcattcccagggtttcaacaaactggcagagactctgcgttggtgcttgaatttggggattctggaagtgaccgtgtacgcgttctccattgagaactttaaacggtctaagagcgaggtggatggtctgatggaccttgcgagacagaagttcagcagattgatggaagagaaggagaaactgcagaagcatggggtttgcatccgggtgctaggggatctgcatcttttgcctctggatctgtag

SEQ ID NO: 185083 - DNA, 501 bp, synthetic construct
  misc_feature 1..501: note = Description of Artificial Sequence: Synthetic coding sequence
  source 1..501: mol_type = other DNA
atgagctggatcaaggagggcgagctgagcctgtgggagcggttctgtgctaatattattaaagccggcccaatgccgaaacatattgcctttatcatggatggcaaccgcaggtatgctaagaaatgccaggtggaaagacaggaggggcacagccagggatttaataaactcgcagaaacattgcgctggtgtctcaacctgggcattctggaggtgacagtgtatgcatttagtattgaaaacttcaaaagatccaagagcgaagtcgatggactcatggacctagctaggcagaaattcagtcgcctcatggaggagaaagaaaagcttcaaaagcatggagtctgtatcagagtgctgggagacttgcacctcctgcctttggacctgcaggagttgatcgcccaagcggtgcaagccaccaagaattacaataaatgcttcttgaacgtttgcttcgcctacacttccagacacgagattagtaatgctgtgtag

SEQ ID NO: 185084 - DNA, 909 bp, synthetic construct
  misc_feature 1..909: note = Description of Artificial Sequence: Synthetic coding sequence
  source 1..909: mol_type = other DNA
atggtgtggaagcggctgggcgccctggtgatgttccccctgcagatgatatatcttgtggtcaaggcagccgtgggcttggtgcttccagccaagctcagagatctttctcgggagaacgtgctcataaccggcggtgggaggggaatagggcggcagctagcacgggagtttgctgagcgaggggctaggaaaatcgtactttggggaagaaccgagaagtgcctgaaggaaactaccgaggaaatccgacagatggggacggaatgccactacttcatttgcgacgttggcaaccgtgaggaagtgtatcagaccgcaaaggctgttagagagaaagtgggcgacatcaccatccttgtcaacaatgcggcagtggtgcatggaaagtctctgatggatagcgatgacgacgctctgctgaaatctcagcacattaacaccctgggccagttttggactacgaaagcctttttacctcgcatgttggagttacagaatggccacatagtctgccttaatagtgttctcgctctcagcgctatcccgggggctattgactactgcacctcaaaagcttccgcttttgcattcatggagtctctcaccctgggtctacttgattgtcctggggtgagcgcaaccactgtcttgcccttccatacgtcaaccgagatgttccaaggcatgcgagtacgctttcccaacctgttccctccactgaaaccagagacagtcgcccggagaacagtggaggctgtgcagctaaatcaagccctcttgctgttgccctggactatgcacgctctcgtgatccttaaaagtatccttccccaggcggcgctggaagagatacacaaattttccgggacgtacacctgtatgaatacctttaaaggtagaacatag

SEQ ID NO: 185085 - DNA, 444 bp, synthetic construct
  misc_feature 1..444: note = Description of Artificial Sequence: Synthetic coding sequence
  source 1..444: mol_type = other DNA
atgggcaccgagtgccactacttcatctgcgacgtgggcaaccgggaggaggtgtaccagacggcaaaagcggtgcgagaaaaggtaggcgatatcacaattctcgtcaataatgctgccgttgttcatggaaagtctttgatggattccgatgatgacgccctgctgaagagccaacatataaacactctcggacagttctggactacaaaagctttcctgcccaggatgttggaactccagaacggccacatcgtctgtctgaactcggtgctcgctctatctgcgatacccggggccattgactactgcactagcaaggcatcggcatttgcttttatggaaagccttactctgggtttgcttgactgccccggtgtatctgccacaactgtcctgccctttcacactagcacagaaatgttccaaggcatgagagtgtag

SEQ ID NO: 185086 - DNA, 423 bp, synthetic construct
  misc_feature 1..423: note = Description of Artificial Sequence: Synthetic coding sequence
  source 1..423: mol_type = other DNA
atggccagcagcggcatgacccggcgggaccccctggccaacaaggtagccctagtcacagcttctaccgacggaattggattcgccattgcccgccgcctggcacaggacggtgcccacgttgtcgtttcttctcgtaagcagcagaatgtcgaccaggcagtcgccactttacaaggggaggggttgagtgtgaccggcacagtatgccatgtcggaaaagctgaagatcgggaacgcctggtggctacattgtggatggataaagaaaaagaagagtccatgaaagagactctgcgtattaggagactgggtgagccagaagattgcgcaggaattgttagcttcctttgcagcgaagacgcaagctacataaccggcgaaacagtggtagttggtggaggtaccccctctagactctag

SEQ ID NO: 185087 - DNA, 837 bp, synthetic construct
  misc_feature 1..837: note = Description of Artificial Sequence: Synthetic coding sequence
  source 1..837: mol_type = other DNA
atgcacaaggccggcctgctgggcctgtgcgcccgggcctggaactctgtgcgcatggcctccagcggcatgactagacgcgaccctctggcaaataaggtcgcgctcgtcacagccagcaccgacggcattggttttgcgatcgctagacgcctggcccaggatggcgctcacgttgtggtctcttcacgcaaacaacaaaatgtggaccaagcagtggcaactctgcaaggagaaggacttagtgtgactgggacggtctgtcacgtgggaaaggctgaggatcgcgagaggctggtggccactgctgttaagctccacggagggattgatatactggtatcaaacgccgccgttaaccctttttttggctctataatggacgtgaccgaagaggtgtgggacaaaactttagatataaatgtcaaggccccagctctcatgaccaaagctgtggttcctgaaatggaaaagcgcggcggcggaagcgtggtgatagtgagttcaatagcagcctttagcccctcccccggattcagcccatataatgtttcaaagaccgcccttttaggtttgacaaagaccttggccattgaactagccccgcgaaacatccgggtcaactgtctagcacccggtctcatcaaaacatcattctcgaggatgctttggatggataaggagaaagaggagagcatgaaggagaccctgcgcattagacgcttgggagagccagaggattgtgccggcatcgtctcattcctgtgttccgaagacgcctcttacattacgggagaaaccgtagttgttggaggtggtacgcctagtagactatag

SEQ ID NO: 185088 - DNA, 513 bp, synthetic construct
  misc_feature 1..513: note = Description of Artificial Sequence: Synthetic coding sequence
  source 1..513: mol_type = other DNA
atggccagcagcggcatgacccggcgggaccccctggccaacaaggtcgccctggtcaccgccagtaccgatggtattggtttcgccatcgcccgccggctcgcacaggacggagcccatgtggtcgtgtctagccgcaaacagcaaaatgtcgatcaggccgtggccaccctccagggcgaggggctgagcgttacaggtaccgtgtgccatgtgggtaaggccgaggatcgagagaggcttgtggccacagcagtcaaactacacggcggcattgacattttggtctctaatgctgccgtcaaccctttctttgggtcaatcatggacgtcactgaggaggtatgggataagcgccgtctgtctggcgacagggtattccactcttccctgcagtcaatttcttctctggacggacaaggcaagcggggaaagcatgaaagaaaccccgccgacaagaaggtacggagggcgcgaggtctgtgttggcaccgggtgtttccggtgctgtag

SEQ ID NO: 185089 - DNA, 546 bp, synthetic construct
  misc_feature 1..546: note = Description of Artificial Sequence: Synthetic coding sequence
  source 1..546: mol_type = other DNA
atggccagcagcggcatgacccggcgggaccccctggccaacaaggtggccctggttactgcctccaccgacggcattggatttgccattgctcgccggctggctcaggatggagcccacgttgtggttagcagtcgcaagcaacagaacgtggaccaggctgtggccaccttgcagggtgaaggcctgtctgttaccggaaccgtgtgtcacgtcggtaaggcggaagatagagagcgcttggttgctacaactctggacatcaatgtgaaggctccggcgctcatgacaaaggcagtggtcccagagatggagaagcggggcggaggcagcgtggtcatcgtgtcgagcatcgccgcgttctctccaagccctttgtggatggacaaggagaaggaggagtcaatgaaggagaccctgaggatcagacgcctcggcgagccggaggattgcgccggcatagtctcgtttctctgcagcgaggatgcctcctatataactggcgaaactgtcgtcgtcggtgggggaaccccctcccgcttgtag

SEQ ID NO: 185090 - DNA, 477 bp, synthetic construct
  misc_feature 1..477: note = Description of Artificial Sequence: Synthetic coding sequence
  source 1..477: mol_type = other DNA
atgcacaaggccggcctgctgggcctgtgcgcccgggcctggaactcggtcagaatggccagctccggcatgacaagacgggaccctttggcaaacaaggtggccttagtcactgcctccactgatggtattggattcgctattgctaggagactagctcaagacggagctcacgtggtggtgtcctcccgcaagcagcaaaatgtggatcaagccgtggcgaccctgcagggcgaagggctttccgttacaggcaccgtatgtcatgtggggaaggcagaggatcgggaacggttggtagccacgctatggatggacaaggaaaaggaagagtctatgaaagagaccctgaggatcagacgcctgggcgagcccgaggattgcgccggcatcgtgtctttcctgtgttccgaggacgcctcctacatcacaggagaaaccgtggtcgtgggaggcggcacaccttcccggttatag

SEQ ID NO: 185091 - DNA, 579 bp, synthetic construct
  misc_feature 1..579: note = Description of Artificial Sequence: Synthetic coding sequence
  source 1..579: mol_type = other DNA
atgcacaaggccggcctgctgggcctgtgcgcccgggcctggaactctgtgcgaatggcatctagcggcatgaccagacgtgacccattagccaacaaggttgcccttgtcactgcatccactgatggaatcggtttcgctatcgcgaggcgactggcccaagatggtgcacacgtggtggtgtctagcaggaaacagcaaaacgtcgaccaggcagtggcaacgctgcagggcgaggggctttccgtgacagggactgtttgtcacgtcggcaaggcggaagacagagagcgcctcgttgccacagccgtgaaactccatggtggcatcgatatattggttagcaacgctgctgttaatccgttctttggtagcattatggacgtgactgaggaagtctgggataaactgtggatggacaaggaaaaagaggagtctatgaaggagaccttgagaatccgccggctaggggagcctgaggattgtgcggggatcgttagctttttgtgttctgaagatgctagctacataactggcgagacagttgtggtggggggggggacgcccagtaggctatag

SEQ ID NO: 185092 - DNA, 681 bp, synthetic construct
  misc_feature 1..681: note = Description of Artificial Sequence: Synthetic coding sequence
  source 1..681: mol_type = other DNA
atggccagcagcggcatgacccggcgggaccccctggccaacaaggtcgcactggtaaccgcaagcacagacgggatcggattcgccatcgcccgtagactggcacaggacggcgctcacgtggtagtgtcaagccggaaacagcaaaacgtggaccaagccgtggcaacgctgcaaggcgaaggcctgagtgttaccggaaccgtatgccacgtcgggaaagctgaggacagagaaaggctggtagccactacgctggatatcaatgtgaaggctccagctctcatgaccaaggctgtcgtccccgaaatggaaaagcggggtggcggatcggttgtgatcgtgagcagcatcgctgctttctcaccttcccccggcttttctccctataacgtgtccaaaacagctttactgggccttaccaaaacgcttgcaatcgagctggctccacgcaatatccgcgttaattgcctggccccaggcctcataaaaaccagtttttctaggatgttatggatggataaagaaaaagaagagagtatgaaggagacgctaagaatccgccggctcggagagccagaggattgcgctggcatcgtcagctttttgtgttctgaagacgcctcttacattaccggtgaaaccgtcgttgtaggcggcggcacccctagccgtctttag

SEQ ID NO: 185093 - DNA, 567 bp, synthetic construct
  misc_feature 1..567: note = Description of Artificial Sequence: Synthetic coding sequence
  source 1..567: mol_type = other DNA
atgcacaaggccggcctgctgggcctgtgcgcccgggcctggaacagtgtcagaatggcttcttcgggcatgaccagacgggatcccctcgccaataaggtggcactggttaccgcttctactgatggcattggcttcgccatcgcccgtagactcgcacaggacggcgcccacgttgtggtgtccagccggaaacaacaaaacgttgatcaggctgtcgctaccctacagggtgaaggactctcagtcacaggcactgtgtgccacgttggcaaagcggaggaccgggagagattagtcgccactgccgtgaagttgcatggagggattgatattctggtttccaacgccgccgtgaacccgttctttgggtcaattatggacgtcactgaagaagtgtgggataaaaggcggctgagtggggacagagtgttccatagttcattgcagtcaatctcctccttggacggacagggtaagagggggaaacacgagaggaatcccgccgacaagaaagtcaggagagcacgtggactctgctggcatagggtattcccagtactgtag

SEQ ID NO: 185094 - DNA, 600 bp, synthetic construct
  misc_feature 1..600: note = Description of Artificial Sequence: Synthetic coding sequence
  source 1..600: mol_type = other DNA
atgcacaaggccggcctgctgggcctgtgcgcccgggcctggaacagcgttcggatggctagcagtggcatgaccaggagagacccacttgcgaacaaggtggctctggtgacagcttctactgacggaattggatttgctattgcgcgcaggctggctcaggatggggctcatgtcgttgtatccagccggaagcagcagaacgtagatcaagcagtggcaaccctacagggcgaaggcctctcggtgactggtacagtgtgtcatgtgggtaaggcagaagatagagaaagactggtggcaactactcttgacatcaacgtgaaagcgcccgcgttgatgactaaggctgtcgttccagaaatggagaaaagagggggtggcagcgtcgtgatagtatctagcattgctgcctttagtccctcaccactctggatggataaagaaaaggaggagtcaatgaaggagaccctgcgcataaggaggctgggtgaacccgaggattgtgctggcatcgtcagcttcttgtgttccgaagacgcctcatacatcacaggagaaacagtggtcgtgggcggtggtacacccagccgcctgtag

SEQ ID NO: 185095 - DNA, 1374 bp, synthetic construct
  misc_feature 1..1374: note = Description of Artificial Sequence: Synthetic coding sequence
  source 1..1374: mol_type = other DNA
atgcggagcgccgccgtgctggccctgctgctgtgcgccggccaggtcacagctcttcctgtaaatagtccaatgaataagggcgacactgaggtcatgaagtgcatagtcgaggtaatttctgacactctcagcaagccttcccccatgccagtctctcaggaatgtttcgagacactgcggggcgacgagcggatcctgtccattctgaggcaccaaaacttgctgaaggagttacaggacctggccctgcagggtgctaaagagcgggctcaccagcaaaagaaacactctggcttcgaagacgaacttagtgaggtactggaaaaccagtcctcacaagccgagctcaaagaggcagtcgaagagccgtcttctaaagacgtgatggagaagcgggaggacagcaaagaggctgagaagtcaggcgaggcgactgatggcgcccgcccgcaggcactcccagagccaatgcaagaaagcaaggccgaagggaataaccaggcccccggtgaggaagaggaggaagaggaggaagccactaatactcatcctccagcttcactgcccagccagaaatatcccggcccccaggccgagggggattccgagggcctgtcgcaggggctggtggaccgagaaaaaggcctatcagcagagcccggctggcaggccaagcgcgaggaggaagaggaagaggaggaggaggccgaggctggggaagaggcggtgcccgaggaagagggtcctaccgtagtcctgaatccccacccctctctcgggtataaggagattcgaaaaggagaatcaaggtccgaagccctcgctgtggatggcgcaggtaaacccggtgcggaggaagctcaggatcccgaagggaagggcgagcaggaacacagtcagcaaaaagaggaagaggaggagatggccgtggtaccccaaggattgttccgcgggggcaaatccggagaactagaacaagaggaggagcgcttatccaaagagtgggaggactctaaaagatggtccaagatggatcagctagcaaaagaactgactgccgagaaacggctagagggacaggaggaagaggaggataacagagacagctcaatgaagctgtcatttagggcgcgtgcctacggattcagggggccaggaccacagctacggcggggctggagaccaagttctcgagaggactcgttagaagcaggccttccattacaagtgcgcgggtatccagaagagaaaaaggaggaagagggaagcgcgaacaggagaccagaggatcaggaacttgaatccttgtccgccatagaggctgagctcgaaaaagttgcccatcagctccaggcactcaggcggggatag

SEQ ID NO: 185096 - DNA, 1128 bp, synthetic construct
  misc_feature 1..1128: note = Description of Artificial Sequence: Synthetic coding sequence
  source 1..1128: mol_type = other DNA
atgaactgggagctgctgctgtggctgctggtgctgtgcgccctgcttttactgctggtgcagctactcagattcctgagagcagatggcgatcttacgcttttgtgggccgagtggcagggacggagaccagagtgggagctcacagacatggtggtttgggttacaggcgcatcctctggaataggagaagagcttgcatatcagctgtccaaactgggggtgagcctggtactgtctgcaagacgggtacacgaactagagagagtcaagcgcagatgtcttgaaaacggtaatttgaaggagaaagatatcctggtccttcctttggacctcaccgatactggatcacatgaagctgcgactaaggcagttctgcaggaattcggaagaatcgacatcctggtcaacaatggtgggatgtctcagcggtcactctgcatggatacctctcttgatgtttaccggaagctaattgaactcaactatctgggaacggtgtccctgacgaagtgcgttttgccgcatatgattgagcgcaagcagggtaaaatagtaaccgtgaacagcattctcggcatcatatctgtccctctttctattggctactgcgcgagtaaacatgctctccgtggtttttttaacgggttgagaacggaactggcaacctatccaggtattattgtgtctaacatatgtcctggccccgtccagagcaacatcgtggagaatagtttggctggcgaagttaccaagaccatcgggaacaacggcgaccagagtcacaaaatgaccacctctcgttgtgttcgactaatgctaatatcaatggctaatgacctgaaggaagtttggatctcggagcagccatttctgctagtgacatacctgtggcaatatatgcctacttgggcttggtggatcactcgttggggccgcaagggactccgcactttgcgggttgtctggatgcagactctcctgatcttgaaaagcctgcgccagaacatgacagagaaaagcacatgtacattccaggcgaccggaggacgcaacggaaagcacgagaattcaaatcttcttatgttgctgaacaatcagcgcctgatatgcgacttcactttttag

SEQ ID NO: 185097 - DNA, 870 bp, synthetic construct
  misc_feature 1..870: note = Description of Artificial Sequence: Synthetic coding sequence
  source 1..870: mol_type = other DNA
atggtggtgtgggtgaccggcgccagcagcggcatcggcgaggagctggcttaccagctttctaaactcggagtgagtctggtgctgagcgcccgccgcgtgcatgagctggaaagggtcaagaggcgctgcttggaaaatggcaacctcaaggagaaagacatcctcgtcttacccctcgacctaaccgatactggctctcacgaggctgctacaaaagccgtacttcaggagttcggccggattgacatcctcgtgaacaatgggggaatgtcccagaggagtctgtgtatggatactagcctggacgtatatcgcaagctaattgagctgaactacctggggacagtatctctgacaaagtgcgtgctgccacacatgatcgagcgaaaacagggaaagatagtgacggtcaatagcatactgggcatcattagtgttcccctatcaatcgggtactgcgcctcgaagcacgcgctcagaggtttcttcaatggactcaggaccgagctggccacctatcccgggatcattgtcagcaacatctgtcccggacccgttcagtcaaatatcgtcgagaacagtcttgcaggagaagtcactaagaccatcggaaataatggcgaccagagccataagatgaccacgtcaaggtgtgtcaggctgatgctaatcagcatggcgaatgatctgaaagaggtatggatctctgagcagccattcctgttggtgacatatctctggcagtacatgcccacctgggcatggtggataacaaacaaaatgggtaagaaacggatcgaaaacttcaagagcggcgtggacgcagattctagctactttaaaatttttaaaacgaaacacgattag

SEQ ID NO: 185098 - DNA, 1020 bp, synthetic construct
  misc_feature 1..1020: note = Description of Artificial Sequence: Synthetic coding sequence
  source 1..1020: mol_type = other DNA
atgaactgggagctgctgctgtggctgctggtgctgtgcgccctgctgttactactggtgcagttactccgatttcttagagccgatggtgatttgacgctgctgtgggccgaatggcaaggcagaaggcctgagtgggagctgacagatatggtggtgtgggtcacgggagctagcagcgggataggggaggaactcgcgtaccaactttcaaagttgggagttagtctcgttctaagcgcgcggagggttcacgagctggagcgcgtcaaacggcgctgtctggagaacggcaatcttaaggagaaggatattttggtgctccctctggacttgactgacacgggaagtcatgaagcggccaccaaggccgtcctgcaggagttcggcaggattgacatactggttaataacggtggaatgtcccaacgctctctgtgcatggacactagtcttgacgtatataggaaactgatagagctgaactacctcggcaccgtcagtcttactaaatgtgttctgccccacatgattgaaagaaagcaggggaagatcgttactgtgaactccattctagggattatcagcgtacctttgtctatcggctattgtgcgtcaaaacatgcgctccgaggatttttcaatgggctgcggacagagctggcaacatatcccggaattattgtctccaacatctgtcctgggcctgtgcaaagcaacatcgtcgagaatagtctggccggtgaggtgaccaaaacaatcggcaacaatggtgaccagtctcacaaaatgaccacgtccagatgcgtgagactgatgcttattagtatggccaacgatctcaaggaagtgtggatcagcgaacaaccgttcctattggtgacatatctgtggcaatacatgcccacctgggcatggtggatcaccaataaaatgggcaaaaagaggatagaaaatttcaagagcggcgttgatgctgacagcagttacttcaagatctttaaaactaaacacgattag

SEQ ID NO: 185099 - DNA, 186 bp, synthetic construct
  misc_feature 1..186: note = Description of Artificial Sequence: Synthetic coding sequence
  source 1..186: mol_type = other DNA
atgaactgggagctgctgctgtggctgctggtgctgtgcgccctgctactgctgctggtacaattgctccgttttttgagagccgacggcgacctaacgttgctgtgggcagagtggcagggacggcggccagaatgggagctaacagatatggttgtgtgggtgaccggagcctcctctggctag

SEQ ID NO: 185100 - DNA, 960 bp, synthetic construct
  misc_feature 1..960: note = Description of Artificial Sequence: Synthetic coding sequence
  source 1..960: mol_type = other DNA
atgctgttctgggtgctgggcctgctgatcctgtgcggcttcctgtggacccgtaaggggaagcttaagatagaagacataacggacaaatacatctttattacggggtgtgacagtggcttcgggaatctggctgcccggacattcgataagaagggttttcacgtaatcgctgcctgtttgactgaatcaggaagcactgctctgaaagctgaaactagtgagcgtctccgcacagtgcttctagacgtgacagatccggaaaatgtaaagcgcaccgcacagtgggtgaagaaccaggtgggcgaaaaggggctgtggggtctgattaataatgcaggcgtgccgggggtgctggcccctaccgattggttaacactggaagattacagggaacctattgaggtgaacctgttcggcctgatctccgtgactctgaacatgttgccactggtgaagaaggcacaagggagagtgataaacgtcagctcagtcggaggccggctggccatcgtgggcgggggatataccccgtccaaatacgccgtcgaaggatttaacgacagtctccggagggacatgaaggcatttggggttcatgtcagctgtattgagccaggactattcaaaaccaatctcgccgatccggtcaaagttatcgagaaaaagctggctatttgggaacagttgtcaccagacattaaacagcagtacggagaaggatacatagagaaatctctggacaaactcaagggtaacaaaagctacgtgaacatggacctgagtccagttgttgaatgcatggaccacgcactgacttccctcttccccaaaacccactacgcagccggcaaagacgctaaaattttttggatcccactcagccacatgcccgcggctctgcaagatttccttctccttaaacaaaaagctgaactagccaatccaaaagccgtatag

SEQ ID NO: 185101 - DNA, 960 bp, synthetic construct
  misc_feature 1..960: note = Description of Artificial Sequence: Synthetic coding sequence
  source 1..960: mol_type = other DNA
atgctgttctgggtgctgggcctgctgatcctgtgcggcttcctgtggaccaggaaaggaaagctgaaaatcgaggacataacagacaagtatatcttcataacagggtgcgactcgggttttggcaacttagctgcaagaactttcgacaagaagggcttccacgtaattgctgcttgtctgacagagtcggggtctaccgcattgaaagcagagacctcagagcgcctgagaaccgtgctccttgacgtgacagatcctgaaaatgtgaagcgcaccgcgcagtgggttaagaatcaagtgggcgagaaggggctgtgggggctcatcaataacgcaggggtccctggtgttctggctcctacagattggcttacgctcgaggattaccgagaacctatcgaagtcaaccttttcggtcttatctccgttacgcttaacatgctgccactggtcaagaaagctcaggggcgcgtgatcaacgtgtcctctgttggcgggcgtttggcaattgtgggaggaggctacacgccatccaaatacgccgtggagggctttaatgattccctgcggagagacatgaaagcattcggagttcacgtgtcatgtatagagccggggttgttcaaaactaatctggctgaccccgtgaaggtgatcgagaagaagctggccatctgggagcagctgtcccccgatatcaagcagcagtacggcgagggttacatcgagaagagtctggataaattaaaaggaaacaagagttacgttaatatggacttgagccccgtagtcgagtgcatggaccacgctctgacttcactgttcccaaagacccactatgctgccggaaaggacgccaagatcttctggatcccgctctcccatatgcctgcggctctgcaggacttcttattattaaagcagaaggctgagttggccaatcccaaagccgtgtag

SEQ ID NO: 185102 - DNA, 960 bp, synthetic construct
  misc_feature 1..960: note = Description of Artificial Sequence: Synthetic coding sequence
  source 1..960: mol_type = other DNA
atgctgttctgggtgctgggcctgctgatcctgtgcggcttcctgtggacgcgtaaagggaagctaaaaatcgaggatatcacagataaatacattttcattacaggatgtgattctggctttggcaatttggcagcaaggactttcgacaagaagggatttcacgtgatcgcggcttgtctcaccgagtcagggtctacagccctgaaggccgaaacctctgagaggctccgaacagtcctattggatgtgactgatccagagaacgtgaagcggaccgcacagtgggtgaagaatcaagtcggagagaagggcctgtggggcttaataaacaatgccggagttcctggcgtgctcgcaccaactgattggctaacgctcgaggattacagagaaccaatagaggtaaatttgttcggtctgatctcagtcaccctgaatatgttgcctctggttaaaaaggcccagggtagagtaattaacgtgtccagcgtgggaggcagactggccatagtcggaggtggttacacgcctagcaaatacgctgtcgaaggattcaatgactctcttcgaagggacatgaaagcctttggggtgcatgtgtcgtgtatcgaacccggtttgtttaagactaacctggcagatcccgtgaaagtgattgaaaaaaagttggccatctgggaacaactgagccccgacataaaacagcagtacggcgaaggctatatcgagaaatctctggacaaattgaaaggcaataaaagttatgtgaacatggacctcagcccagtcgtggaatgcatggatcacgcccttacctctctgttccccaagactcattacgccgccggcaaagacgccaaaatcttctggattcccttaagtcacatgcctgccgccctccaagactttttacttctgaaacaaaaagcggaactggctaatcccaaggctgtgtag

SEQ ID NO: 185103 - DNA, 519 bp, synthetic construct
  misc_feature 1..519: note = Description of Artificial Sequence: Synthetic coding sequence
  source 1..519: mol_type = other DNA
atgctgcccctggtgaagaaggcccagggccgggtgatcaacgtgtcgagcgtgggaggcagactggccatagtgggtggtgggtacactcccagcaaatatgcagttgagggcttcaacgactctctgagacgagatatgaaggcattcggggttcacgtgtcttgcatcgagcctgggctgttcaagacaaacctagctgatccagtgaaggtgatcgaaaagaagctagcaatttgggagcaactttcccctgacattaagcagcagtacggggaagggtacatagagaagagcctggacaagctcaaaggaaacaagtcatacgtcaatatggatctttcacccgtggttgagtgtatggatcacgccttgaccagtcttttcccaaagacgcactacgcggccgggaaagatgccaaaatattctggattcccctgagccatatgcctgccgcacttcaggatttccttttgctgaaacagaaggccgaattggccaaccccaaagccgtgtag

SEQ ID NO: 185104 - DNA, 960 bp, synthetic construct
  misc_feature 1..960: note = Description of Artificial Sequence: Synthetic coding sequence
  source 1..960: mol_type = other DNA
atgctgttctgggtgctgggcctgctgatcctgtgcggcttcctgtggacccgcaaggggaagcttaagatagaagatattacagacaagtatattttcattacaggctgcgattcaggttttggcaacttagcagcccgcacattcgacaaaaagggatttcatgtcatcgccgcttgcctgacagagagcggctctactgccctaaaggctgaaacatctgagcgactgcggactgtactcctcgatgtcactgatccagagaatgtcaagcgtactgcccaatgggtgaaaaatcaggtaggcgaaaaaggattgtggggtctgattaataatgctggtgttcccggcgtactggccccgaccgattggctgactctggaagattatcgtgaaccaatcgaagtaaatctgtttgggctcattagcgtaaccctgaatatgctaccattggtcaagaaggcccagggcagggtgattaacgttagctccgtggggggccgtttagccatcgttggagggggctatacccctagtaagtacgcagtcgagggatttaacgacagcctgcgtagagatatgaaggcttttggagtgcacgtcagctgcattgagccagggctgtttaaaaccaatcttgcggacccggtgaaggttatcgagaagaagctggccatctgggaacaactgtctcctgacatcaaacagcagtatggggaaggctacattgaaaagagcctcgataagctgaaagggaacaagtcatacgtgaatatggacctctcacccgtggttgaatgcatggaccacgccctcacatccctgtttcctaaaacccactacgctgccggaaaagacgccaagattttctggatcccgcttagccacatgccggccgcacttcaggactttcttcttctaaagcagaaagctgaactggccaatcctaaggcagtgtag

SEQ ID NO: 185105 - DNA, 1140 bp, synthetic construct
  misc_feature 1..1140: note = Description of Artificial Sequence: Synthetic coding sequence
  source 1..1140: mol_type = other DNA
atgcccgagggccggagccactgcgcctgcagcatcaccagcctgacactattagtgtccctaacaagggtaacactcgatattctgcaaaaattagacccacctcaaccagctcattggagacaccaccttctagtcctatacaagaagggcgtgtatctcagccacaccggcggaaagatgcttttctgggtcctcggtcttctcattctgtgcggttttctgtggaccaggaagggtaagctcaagatagaagatattaccgataaatatatcttcatcaccggctgcgactcaggctttggcaacctggcagcaaggacgttcgataaaaaaggctttcacgtgatcgctgcatgtctgactgaaagcgggtctacagctctgaaggcagagacttctgagaggttaagaacagtccttctggacgtgaccgatcctgagaacgtgaagcgaacagcccagtgggtgaaaaatcaggtgggcgaaaagggtctttggggcttgattaataatgcaggcgtacccggggttctggcacctaccgactggctcacactggaggattacagggaaccaatcgaagtcaatttgtttgggctcatcagcgtgaccttgaacatgcttccattggtcaagaaggcccaaggccgggtgattaatgtgtcttctgtcggagggaggctggcaatcgttgggggaggatacactccgtctaagtacgcggttgagggcttcaacgactctctgcggcgggacatgaaggcgtttggtgtgcacgttagctgtattgaacctggactctttaaaaccaatcttgctgaccccgtgaaggtgatcgaaaagaaactggccatctgggagcaactttcccccgatattaagcaacagtatggagaaggttacatcgaaaagagcctagacaagctgaagggcaacaaaagctacgtgaatatggatctgtcgcctgtggtggagtgcatggaccacgcgttaacatcactgtttcccaagacacattatgcagccggaaaagacgctaagatcttttggattcctctgagtcacatgccggcagcattgcaggattttctacttctgaaacaaaaggccgagctggctaacccaaaagccgtctag

SEQ ID NO: 185106 - DNA, 960 bp, synthetic construct
  misc_feature 1..960: note = Description of Artificial Sequence: Synthetic coding sequence
  source 1..960: mol_type = other DNA
atgctgttctgggtgctgggcctgctgatcctgtgcggcttcctgtggactcgcaagggcaagctcaagatcgaggatattaccgataaatacatcttcattaccggctgtgactctgggttcgggaatttagctgcgaggaccttcgataagaaaggatttcacgtcatcgccgcttgtctaactgagagcgggagtactgctttaaaagctgaaacctcagagcgactgagaactgtattgctggacgtgacagacccagaaaatgtaaagaggaccgcccagtgggtgaaaaaccaggtcggggagaaaggcttatgggggctcatcaataacgctggggtaccgggagttctcgcccccacagactggctgacgctggaagactacagggaaccaatcgaggtaaacttgtttggattgatttcagtgactctgaatatgctgcctctggtgaagaaggctcaggggcgcgtcattaacgtcagcagcgtcggcggaagacttgctatcgtggggggtggatatactccctcaaagtacgccgtcgagggcttcaatgactcacttagacgagatatgaaggccttcggagtccacgtgtcttgtatcgagcccggactgttcaagaccaaccttgcggatcccgtgaaggtgatcgaaaaaaagctggccatttgggagcagctctccccagacatcaaacagcagtacggggaagggtacatagagaaaagtctcgacaagctgaaaggtaataaatcctatgtgaatatggacttgtctcctgttgttgaatgcatggatcacgctcttaccagtctgtttcccaagacgcactatgctgcgggcaaggatgccaagatattttggattcctttgagtcacatgcccgccgcgctgcaagacttcctgctcctgaaacagaaggctgagctggccaaccccaaggccgtctag

SEQ ID NO: 185107 - DNA, 201 bp, synthetic construct
  misc_feature 1..201: note = Description of Artificial Sequence: Synthetic coding sequence
  source 1..201: mol_type = other DNA
atgctgttctgggtgctgggcctgctgatcctgtgcggcttcctgtggacaaggaaggggaaactcaaaattgaagacatcacagacaaatacatcttcattaccgggtgcgattccgggttcgggaacctggctgcaagaacttttgacaaaaaaggttttcacgtgattgctgcctgcctgacagagtccggaagctag

SEQ ID NO: 185108 - DNA, 486 bp, synthetic construct
  misc_feature 1..486: note = Description of Artificial Sequence: Synthetic coding sequence
  source 1..486: mol_type = other DNA
  misc_feature 1..375: note = DNA
  misc_feature 376: note = RNA
  misc_feature 377..486: note = DNA
atgggcctgccccagcccggcctgtggctgaagcggctgtgggtgctgcttgaggtggctgtacatgtggtggtgggaaaggtgctgctgatcctgttccccgatcgggtcaagagaaatattctggcaatgggtgagaagacgggcatgacccgaaatccacacttttcacacgacaactggatacccacttttttcagcacccagtatttttggttcgttttaaaggtgagatggcagaggttggaggacaccaccgaactcggcgggctggcccctaattgccctgtggtgcgtcttagcgggcagcgatgtaatatttgggagtttatgcagggtaacagacccctggtgctgaactttggatcttgtacttgaccatcgttcatgtttaagttcgaccagtttaagaggctgatcgaagatttttccagtatcgcagatttcctggtgatctatatagaggaagcacatgcctcaggttag

SEQ ID NO: 185109 - DNA, 750 bp, synthetic construct
  misc_feature 1..750: note = Description of Artificial Sequence: Synthetic coding sequence
  source 1..750: mol_type = other DNA
  misc_feature 1..375: note = DNA
  misc_feature 376: note = RNA
  misc_feature 377..750: note = DNA
atgggcctgccccagcccggcctgtggctgaagcggctgtgggtgctgctggaagtggctgttcacgtggtggttggtaaggtgctgctgatcctcttccccgatcgagttaagcgcaacatcttagcaatgggagaaaaaacaggcatgacacggaaccctcatttctctcacgacaattggattcccacgttctttagcacccagtacttctggtttgttttgaaggtgcgttggcaaagactggaggacaccactgagcttggaggcctggccccaaattgccccgtggtccgattgtctggccagcggtgtaacatatgggaattcatgcagggaaatcggcctctcgtgctcaactttggcagctgcacttgacccagtttcatgttcaaattcgatcaatttaaaagactgattgaagacttctcatcaattgcagattttttagttatttacatcgaggaggctcatgcctcagatggatgggcctttaagaacaatatggacatccgcaaccaccagaacttgcaggaccgcctccaggccgctcacctgctcctcgccagaagtccccagtgtcccgtggtggtggatactatgcagaatcagtcttcacaattgtacgctgcccttcctgaacgcctgtacatcatccaggagggaaggattctgtacaaggggaaatccgggccatggaactacaaccctgaagaggtacgggcagtcctggaaaagttacactcttag

SEQ ID NO: 185110 - DNA, 606 bp, synthetic construct
  misc_feature 1..606: note = Description of Artificial Sequence: Synthetic coding sequence
  source 1..606: mol_type = other DNA
atgggcctgccccagcccggcctgtggctgaagcggctgtgggtgctgcttgaagtagccgtccatgtcgtggttggaaaagttctactgatactgttccccgacagggtgaagcgaaacattctcgccatgggggagaagaccggcatgacccgcaaccctcacttttcgcacgataactggattccaacctttttttctacccagtatttctggttcgtgttgaaagtgaggtggcagaggcttgaggataccactgaactggggggactagcccctaactgtcccgtcgtcagactgtccggccagagatgcaatatctgggaattcatgcaggatggctgggcatttaagaacaacatggacattagaaaccatcagaacctgcaggatagactccaggcggcccacctgctcctggcaaggtctccccagtgtccagtcgttgtggatactatgcagaaccaaagttctcagctgtatgccgctctaccagagaggctgtacatcatccaagagggccggatactgtacaaggggaagtctggaccttggaattataatccagaggaagttagagctgtcttagagaaactgcactcatag

SEQ ID NO: 185111 - DNA, 363 bp, synthetic construct
  misc_feature 1..363: note = Description of Artificial Sequence: Synthetic coding sequence
  source 1..363: mol_type = other DNA
atgttcaagttcgaccagttcaagcggctgatcgaggacttcagcagcattgcggatttcctggtgatctatattgaagaagcccacgcttccgatgggtgggcgttcaaaaacaacatggatatcaggaatcatcaaaatcttcaggaccggctgcaggccgcccacctgctactcgctcgcagtccccagtgccccgtcgtagttgatacaatgcagaatcagtcatcccaattatatgcggcgttgcccgagagactgtacattatacaggaggggcgcatcctgtataaggggaagtcgggtccatggaactacaatccggaggaggtgcgagcagtactggaaaaactccacagctag

SEQ ID NO: 185112 - DNA, 558 bp, synthetic construct
  misc_feature 1..558: note = Description of Artificial Sequence: Synthetic coding sequence
  source 1..558: mol_type = other DNA
  misc_feature 1..183: note = DNA
  misc_feature 184: note = RNA
  misc_feature 185..558: note = DNA
atgggcctgccccagcccggcctgtggctgaagcggctgtgggtgttactagaggttgcagtgcatgtggtcgtggggaaggtcctcttgattctgtttcccgatcgcgtcaaaaggaacattctcgccatgggcgaaaagactggaaatcgccccttggtcctcaattttgggagctgcacctgaccatctttcatgtttaagttcgaccaattcaaacggcttatcgaagacttttcttctatcgcggactttcttgtcatctatatcgaggaggcccatgcctccgacgggtgggctttcaaaaacaatatggacatccggaatcatcagaatttgcaggatcgactgcaggccgcccatctactattggccagaagcccccagtgtcctgttgtggtcgatacaatgcagaaccagtcttcccagttgtacgccgctttgcctgagcgactttacataatccaggaaggccgcattttatataagggcaaatcgggcccctggaactacaatcccgaggaggtacgcgccgtgttggaaaaactgcattcgtag

SEQ ID NO: 185113 - DNA, 342 bp, synthetic construct
  misc_feature 1..342: note = Description of Artificial Sequence: Synthetic coding sequence
  source 1..342: mol_type = other DNA
atgggcctgccccagcccggcctgtggctgaagcggctgtgggtgctgttagaagttgcagttcacgtggtcgtcggcaaggtcctcctgatcctctttccagaccgcgtcaagcgcaacattttggccatgggagagaagactgggatgacacggaaccctcactttagtcatgacaactggatacctaccttctttagcacacaatacttttggttcgtgctgaaagtgcgatggcagcgccttgaggatacaactgaactgggtggcttagcaccgaactgcccggtggtgcggcttagtgggcagagatgcaacatctgggaatttatgcagggctag

SEQ ID NO: 185114 - DNA, 270 bp, synthetic construct
  misc_feature 1..270: note = Description of Artificial Sequence: Synthetic coding sequence
  source 1..270: mol_type = other DNA
atgggcatcctgagcgtggacctgctgatcaccctgcagatcctgcccgtttttttcagcaattgcctgttccttgctctgtatgattccgtgattctcctcaaacatgtagtgttgctcctctcacgctccaaatctacccgcggcgaatggaggcggatgcttacttcagaaggcctacggtgcgtttggaaatcctttctgctcgacgcctataagcagttgaactgtccgcccagtggttttagtaaggatggtcatattttgtag

SEQ ID NO: 185115 - DNA, 399 bp, synthetic construct
  misc_feature 1..399: note = Description of Artificial Sequence: Synthetic coding sequence
  source 1..399: mol_type = other DNA
atgggcatcctgagcgtggacctgctgatcaccctgcagatcctgcccgtgtttttctccaattgcctgtttctcgcgctctacgacagcgttatcttgcttaagcatgtagtgctgttactctcgagaagtaagagtacccgaggtgagtggcgcagaatgttaacgagcgagggcctgcgctgcgtgtggaagtcatttctacttgatgcctataaacaggtcaagcttggggaagacgcccccaattcctccgtagtccatgttagttcaaccgagggcggcgataatagtggtaacggtactcaggagaaaatcgctgagggcgccacatgtcatcttctggattttgcttctccagagagacctctggttgtgaatttcggcagcgccacctag

SEQ ID NO: 185116 - DNA, 822 bp, synthetic construct
  misc_feature 1..822: note = Description of Artificial Sequence: Synthetic coding sequence
  source 1..822: mol_type = other DNA
  misc_feature 1..396: note = DNA
  misc_feature 397: note = RNA
  misc_feature 398..795: note = DNA
  misc_feature 796: note = RNA
  misc_feature 797..822: note = DNA
atgggcatcctgagcgtggacctgctgatcaccctgcagatcctgcccgtattcttttcgaactgcctcttcctcgccctgtatgatagtgtgattctgctcaaacatgttgtgctactcctttctcggagcaagagtacacggggagaatggcgacgtatgctgacttcagaggggctcagatgcgtgtggaaatcctttttgctggatgcttacaagcaggtgaagcttggtgaggacgctcctaatagttccgtggtacacgtctcctcaaccgagggcggggataacagcggcaacggaactcaagaaaagatcgcagagggggccacctgccacctgctggactttgcctccccagagaggccacttgtggttaacttcgggtccgccacgtgacctccttttaccagccagctgcctgcctttcgcaaacttgtcgaagaattctctagcgttgctgatttcctgttggtgtacatagatgaggctcacccctctgacggttgggcaatccccggagattcttctctctcctttgaggtaaaaaagcaccagaatcaagaggatcggtgtgctgctgcccagcagctactggaaaggttcagtcttcccccccaatgccgtgttgtggccgaccggatggacaataatgcaaatatcgcctatggcgtggccttcgaacgcgtctgtatagtgcagcgccagaaaatcgcctacctcggcggaaagggccctttctcttacaacctacaggaggtccgccattggctggaaaaaaacttctctaagaggtgaaagaaaacaaggctggccggatag

SEQ ID NO: 185117 - DNA, 21 bp, synthetic construct
  misc_feature 1..21: note = Description of Artificial Sequence: Synthetic coding sequence
  source 1..21: mol_type = other DNA
atgggcatcctgagcgtgtag

SEQ ID NO: 185118 - DNA, 21 bp, synthetic construct
  misc_feature 1..21: note = Description of Artificial Sequence: Synthetic coding sequence
  source 1..21: mol_type = other DNA
atgggcatcctgagcgtgtag

SEQ ID NO: 185119 - DNA, 168 bp, synthetic construct
  misc_feature 1..168: note = Description of Artificial Sequence: Synthetic coding sequence
  source 1..168: mol_type = other DNA
atgggcatcctgagcgtggacctgctgatcaccctgcagatcctgcccgtgttcttcagcaattgccttttccttgctctgtacgattccgtgattctgctaaaacacgtggtgcttcttctgagccgaagcaagtctacccgcggagagtggcggcgcatgctgtag

SEQ ID NO: 185120 - DNA, 930 bp, synthetic construct
  misc_feature 1..930: note = Description of Artificial Sequence: Synthetic coding sequence
  source 1..930: mol_type = other DNA
  misc_feature 1..267: note = DNA
  misc_feature 268: note = RNA
  misc_feature 269..504: note = DNA
  misc_feature 505: note = RNA
  misc_feature 506..903: note = DNA
  misc_feature 904: note = RNA
  misc_feature 905..930: note = DNA
atgggcatcctgagcgtggacctgctgatcaccctgcagatcctgccagtgttcttctccaactgtttatttctcgctttatatgattcggtgatcctcttaaagcacgtagtcttgctgctcagccgaagtaaatcaacccggggggaatggcggagaatgctcaccagcgaaggcctaagatgcgtctggaaatcattcctgcttgacgcgtataaacagttgaactgcccgccaagcggattttcaaaggacgggcacattctatgactcgtgtacgaggcctataagagcaggctgcttgtgtactcacatttagacctgtggatggtgaagttaggcgaggacgctccaaactctagtgtggtacatgtatcttccaccgagggaggagacaactccggcaacggaacccaagagaaaatcgcagagggtgccacctgtcacctcttagatttcgcctcccctgaaaggcccctggtggtgaatttcgggtcggccacatgaccaccttttacttcccagctacccgcatttcgcaaactggtggaagagttttcatctgtcgcggacttcctcctcgtctatattgatgaggcacacccctccgacggctgggccataccaggtgatagtagcttatccttcgaagtgaaaaagcaccagaaccaagaggacaggtgcgcagccgcacagcagctcttagaacggttttcactaccacctcagtgcagagtggtggccgacaggatggacaataacgctaacattgcatacggagtggcattcgagcgggtctgtatcgtgcagcggcagaagatcgcctatctggggggaaagggtccattctcctataatctgcaggaagtcagacattggctggagaaaaacttcagcaaacgttgaaagaagacccggttagccggttag

SEQ ID NO: 185121 - DNA, 822 bp, synthetic construct
  misc_feature 1..822: note = Description of Artificial Sequence: Synthetic coding sequence
  source 1..822: mol_type = other DNA
  misc_feature 1..396: note = DNA
  misc_feature 397: note = RNA
  misc_feature 398..795: note = DNA
  misc_feature 796: note = RNA
  misc_feature 797..822: note = DNA
atgggcatcctgagcgtggacctgctgatcaccctgcagatcctgcccgtgttcttcagcaattgtctgttcctagccctatacgacagcgtaatactattaaagcatgtcgtcctgctcctcagtagatcaaagtcaacgcgaggggagtggcgccggatgttgacgtcagagggactgagatgcgtatggaagagtttcctgctagatgcctataagcaggtgaaacttggcgaagacgctcctaatagctcagtggtgcacgtgtcctccaccgagggcggagacaacagcggaaatggtacccaggaaaaaatcgcagagggtgccacatgccacttgctggacttcgcatctcccgaaagaccactggtggtgaacttcggttcagcaacctgacccccttttaccagtcaactacccgcatttagaaagttagttgaggagtttagctctgtcgccgatttcctactggtttacatagacgaagcccacccctctgacggctgggctattccgggagactccagtctctcattcgaggtgaaaaagcaccagaatcaggaggatcgctgcgccgctgcacagcagctccttgaacgcttctcactgccaccacaatgccgagtggtggccgatcgaatggataacaacgccaatatcgcctatggtgtggcgtttgaaagggtttgcattgtgcagcggcaaaagatcgcctatctgggtggcaaaggacctttcagttataacctgcaagaagtccgccattggctggagaagaacttctccaaacgctgaaaaaagactcgcctagcagggtag

SEQ ID NO: 185122 - DNA, 915 bp, synthetic construct
  misc_feature 1..915: note = Description of Artificial Sequence: Synthetic coding sequence
  source 1..915: mol_type = other DNA
  misc_feature 1..507: note = DNA
  misc_feature 508: note = RNA
  misc_feature 509..915: note = DNA
atgccccggcaggccaccagccggctggtggtgggcgagggcgagggcagtcagggggccagtggcccagccgccaccatgctccgcagcctattgttgcattcattacggctttgcgcgcaaacagcttcctgcctcgtactcttcccaagattcttaggaaccgcattcatgctgtggctgctcgacttcctctgcattcggaagcatttcttgggccggcggcgacggggacagcctgagcctgaagtggaactgaactcagagggcgaggaggttcctcctgacgatccccccatctgcgtgagcgatgacaacaggctctgtactctggcaagtcttaaagccgtgtggcatggccagaaattagattttttcaagcaggcacatgaaggcggaccggcaccaaacagcgaggtggttctccctgacgggtttcaatcccaacacattctggattatgctcagggtaatcgccctctggtgctgaactttggctcctgcacctgaccgccattcatggcgaggatgagtgctttccagcgcttggtgactaagtaccagcgggacgtcgacttcttgattatctacattgaggaggcgcacccgtctgacggttgggtaacaactgacagtccatacattattccccaacatcggtccctggaggacagagtgagcgctgcccgggtgctccagcagggcgctcctggatgtgctctggtgttagatacaatggcaaatagtagtagttccgcctacggcgcatatttcgagagattgtatgtcatccaaagcggaactattatgtaccagggcgggaggggcccagacggataccaggttagcgagctgaggacctggttagagagatacgatgagcagttgcacggggctaggccccggcgggtatag

SEQ ID NO: 185123 - DNA, 1026 bp, synthetic construct
  misc_feature 1..1026: note = Description of Artificial Sequence: Synthetic coding sequence
  source 1..1026: mol_type = other DNA
atgagcgccagcgcccccgccgccgagggcgagggcacccccacccagccggcttccgaaaaggagcccgagatgccggggccccgcgaggagagtgaggaagaggaggacgaggacgatgaagaagaagaggaagaagagaaggggaaaggacagaagctttgcgagatagagagaatccatttttttttgtcaaaaaagaagaccgacgagctgcggaacctgcataagcttctgtataaccgccctggaaccgtctcttccctgaagaagaacgtgggacagttttccggctttccattcgaaaaaggcagcgtccaatacaagaaaaaagaagaaatgctcaaaaagttccggaacgctatgttgaaatctatttgcgaggtgttggacttggaaagaagtggcgtcaacagtgagctggtcaagagaatcctaaatttcttaatgcaccccaaaccttccggaaagccactgcccaaaagcaagaaaacatgtagcaaggggtctaaaaaagagagaaactcaagcgggatggctagaaaggcaaaacgtacgaagtgtcccgaaattctgagtgacgagtcatcttcagacgaggatgagaaaaaaaacaaagaggaatcttcagacgatgaggacaaagaaagtgaagaagaacccccaaaaaagaccgctaagcgcgagaaacctaaacagaaagctacatctaaaagcaagaagtcagtgaagagtgcaaacgtaaaaaaggctgattccagtaccaccaaaaagaaccagaactcttctaaaaaagagtctgagtccgaggactcctcagatgacgagcccttgattaagaagctgaaaaagccgcccactgacgaggaactaaaggagactattaagaagctattagcctctgcgaatctggaggaagtaacgatgaaacagatctgtaagaaggtctacgagaattatcctacatacgacctgactgagcgtaaagatttcatcaaaactacagtcaaagaattaatttcatag

SEQ ID NO: 185124 - DNA, 1128 bp, synthetic construct
  misc_feature 1..1128: note = Description of Artificial Sequence: Synthetic coding sequence
  source 1..1128: mol_type = other DNA
atgagcgccagcgcccccgccgccgagggcgagggcacccccacccaaccggcctcagaaaaagagcccgagatgccagggccccgggaagagtcagaggaggaagaggacgaggatgacgaagaggaggaggaagaggagaaagaaaaaagcctgatagtggaaggcaagcgggaaaaaaagaaagttgaacgccttacgatgcaggttagtagtcttcagagggagccgtttactatcgcacagggcaaaggacagaaattgtgcgagattgaaagaatacacttctttttgtccaaaaaaaagactgacgagctaagaaatctgcacaaactattgtacaatcggccaggcacagtgagctcactgaagaagaatgtaggccagtttagtggctttccgtttgagaaaggctcggtgcagtataagaaaaaagaggagatgctaaagaagttccgcaatgccatgctcaaaagcatctgcgaggttctggacctggagagatcaggcgtgaactccgaactggtaaaaagaattttaaactttctgatgcacccaaaaccatctggcaagccactcccgaaatcaaagaagacctgctccaaggggtccaagaaagagagaaattcaagcggaatggccaggaaggccaagcgcactaagtgtccagagattttgagcgatgaaagcagcagcgacgaggacgaaaagaagaataaggaagaaagctccgatgacgaggataaggagtccgaggaggaaccacccaagaaaacagctaaaagggagaagccgaaacagaaagccacttccaaaagcaagaagtcagtgaagtctgcgaacgtgaagaaggctgatagctccactactaagaagaaccaaaatagcagtaagaaggagtccgagagtgaagacagttccgacgatgaacccttaatcaagaagcttaagaagcccccaacggatgaggaattaaaggagacaatcaagaaattgttggcctctgcaaacttagaagaagtcacaatgaaacagatctgcaaaaaggtgtacgagaattacccaacatacgacctcaccgaacgcaaggactttataaaaaccacggttaaagagcttatctcatag

SEQ ID NO: 185125 - DNA, 1101 bp, synthetic construct
  misc_feature 1..1101: note = Description of Artificial Sequence: Synthetic coding sequence
  source 1..1101: mol_type = other DNA
atgagcgccgccaaccccgagacccccaacagcaccatcagccgggaagcttccacccaatcctcatctgcagcagcaagccaggggtgggtcctgcccgagggcaaaatcgtgcctaacacagtgtttgttggcggcatcgacgcccggatggacgagaccgagattgggtcttgctttggccgatatggctccgtgaaagaagtgaagattattacaaacaggacaggggtgagcaagggatatggcttcgtgagttttgtaaatgatgtggacgtgcagaagatcgtggggagccagattcatttccacggaaaaaagctgaaactaggtcctgcgattcggaaacagaaactctgcgccaggcacgtccagccaagacccctcgtggtaaaccctccaccacccccgcagtttcagaatgtgtggagaaatcccaacactgagacatatttgcaaccccagatcacccccaatcccgtcacccaacacgttcaggcatactctgcatatccacactcaccaggacaggtcattacggggtgccagttgctggtgtacaactaccaggaatacccaacctaccccgactcggcattccaggttacaaccgggtaccaactgccagtctacaattaccaaccctttccagcctacccatcatctcccttccaggtgacggcaggctaccagctcccagtctacaactaccaagccttccctgcataccctagcagcccttttcaggtcacaaccgggtaccagttgcctgtgtacaactatcaggctttccctgcatatccttcttcccccttccaggttacaacgggataccagctgccagtctacaactaccaggcctttccggcatatcctagcagtccctttcaggttaccacagggtatcagctgccagtctataattatcaggcattccctgcctaccctaatagcgcggtgcaagtgacaaccggctatcagttccacgtttataattaccagatgcccccccagtgtccagtgggtgaacagcgtcgcaacctgtggacggaagcatacaagtggtggtacctggtgtgcctaatccaacgtagagactag

SEQ ID NO: 185126 - DNA, 1605 bp, synthetic construct
  misc_feature 1..1605: note = Description of Artificial Sequence: Synthetic coding sequence
  source 1..1605: mol_type = other DNA
atgagcgccgccaaccccgagacccccaacagcaccatcagccgggaggcgtcgactcagagttcaagcgccgccgcttcccaagggtgggtcctgcccgagggaaagatagtgcccaacaccgtcttcgtaggtgggattgacgcccgaatggacgagacagagatcgggtcctgtttcgggcgatacggttcagtcaaagaggtgaaaatcatcacaaataggacgggtgtttccaaggggtatggctttgtctcttttgtcaacgacgttgatgttcagaagatcgtcggcagtcagatccactttcatggaaaaaagctcaaactggggccagcaatccgaaaacagaaactttgcgctcggcatgttcagcctcgccctctggtcgtgaaccctccccctccaccccagtttcagaacgtgtggaggaaccctaataccgaaacgtacctccaaccccagatcacccctaatcctgtgactcagcacgtgcaggcttacagtgcctacccacactctccaggccaagtgattacgggttgccagctgctggtatataactatcaggaatatccaacttacccagactccgcttttcaagtgactaccggttatcaactccccgtttacaactaccaaccatttccggcctaccccagatccccctttcaggtgaccgccggctatcagcttccagtttataattatcaggctttcccagcctatccgaacagcccctttcaggtagctacagggtaccagtttcctgtttataactatcagccctttccggcatacccttctagcccctttcaggtaacagccggttaccagctacccgtatacaactaccaggctttccctgcctatcccaacagtcccttccaggtcgcaacaggttaccagttcccagtgtacaactatcaggccttcccggcgtaccctaattccccagttcaagtgaccactggttatcagcttccagtgtataattaccaggctttccctgcatacccatcttctcctttccaggttacaaccggctaccaactgccagtgtacaactaccaggcctttcccgcctacccgtcatccccatttcaagtgaccacagggtaccagttgcctgtgtataattaccaagcttttcccgcttacccatctagcccctttcaggtgactaccgggtaccaactgcccgtctataattaccaggcattccccgcttacccctccagtcctttccaggtgaccacagggtatcagctacccgtctacaactatcaggcatttcctgcctaccctagttcccctttccaggttacaaccgggtaccagctgcctgtgtataactaccaggcctttccagcatatccctccagtcctttccaggtgactacggggtaccaactgcctgtgtacaattaccaggcttttcctgcctacccaaatagtgctgttcaggtcactacagggtaccagttccatgtctacaactaccagatgcccccccagtgccctgtcggcgagcaacgtagaaatctttggacagaggcatacaaatggtggtacttggtgtgtctcatccagcggcgcgactag

SEQ ID NO: 185127 - DNA, 1821 bp, synthetic construct
  misc_feature 1..1821: note = Description of Artificial Sequence: Synthetic coding sequence
  source 1..1821: mol_type = other DNA
atgagcgccgccaaccccgagacccccaacagcaccatcagccgggaggcctcaactcaatcctctagcgccgcggcttcgcaaggatgggtgctgccagagggaaagattgttcctaatacggtgttcgtgggcggcatcgacgcaaggatggacgaaaccgaaattggtagctgtttcgggagatatggttctgtgaaggaggtcaaaatcattactaacagaaccggagtgtccaaaggctatggtttcgtgagcttcgtaaacgatgtggacgtgcagaaaatcgtgggcagccagattcattttcacggcaaaaaactgaagctcggcccagccattagaaaacagaaactgtgcgccagacacgtgcagccgcggcctctggtggttaacccaccaccgccacctcagttccagaacgtctggcgaaacccgaataccgagacctatctgcagcctcagattacacctaaccccgtcacccaacacgttcaagcttattcagcctaccctcacagtcccggtcaggtcattaccggctgtcagctgttggtgtataattaccaagagtatccaacctatcccgactcagcctttcaggtaaccaccggctatcagcttccagtgtacaactaccagccattccccgcctatcccaggtccccctttcaggtgacagctggataccagctgcccgtgtacaactatcaggcctttccagcttatcccaactcgcctttccaggttgcgacagggtaccagtttccggtgtacaactatcagccttttcctgcgtatccctctagtcctttccaagtaactgctggttaccagctgccagtctataattaccaggcattcccagcctaccctaacagtccctttcaggtggccaccggttatcagttcccggtctacaactatcagccgtttccagcttatcccagctccccgttccaggtgacggcaggttatcagctgcccgtctataactaccaagcttttcccgcatacccgaattcacccttccaagtagccaccgggtatcagtttccagtctacaactaccaggcgtttcccgcctacccaaactctccagtgcaggtcacaactgggtaccaactgccagtctataattaccaggctttccccgcataccctaattcacctgtccaggtgactacagggtaccagctgcctgtctataactatcaagcgttccctgcttacccttcttcccctttccaggtcacaaccgggtaccaacttcccgtttataattatcaggccttccccgcgtacccaagcagcccatttcaagttacaactgggtatcaactgcccgtctataactaccaggccttcccggcttacccttcatccccattccaggttactaccggctaccagctgcctgtgtataactatcaagcatttcccgcctatccctcctctccctttcaagtgacaaccggttatcaactccctgtgtacaattatcaggcttttccagcctatccttccagcccttttcaagttaccacagggtatcagctacctgtttacaattaccaggcattcccagcctacccaagctcaccgtttcaggtgaccaccggataccaactgccggtgtacaactatcaggcttttcccgcataccctaatagcgccgtgcaggtgacgacaggataccagttccatgtctataattatcagatgcctccccagtgtccagtgggtgaacaaagacgcaatctgtggacagaggcatacaagtggtggtacctggtgtgcctgatacagaggagagactag

SEQ ID NO: 185128 - DNA, 1461 bp, synthetic construct
  misc_feature 1..1461: note = Description of Artificial Sequence: Synthetic coding sequence
  source 1..1461: mol_type = other DNA
atgagcgccgccaaccccgagacccccaacagcaccatcagccgggaagcatccactcagagtagtagcgccgccgcaagccaggggtgggtattgcctgaaggcaagatcgtgccaaacaccgttttcgtgggaggaattgacgctagaatggatgagacagagatcgggagctgcttcggaaggtacggcagcgtgaaagaggtgaagattattacgaatcgcaccggggtgtcgaagggctacggtttcgtctcttttgtcaatgatgttgacgtgcagaaaatcgtaggctcccagatccactttcatggaaagaagctaaagctggggccggcaataagaaaacagaagttatgtgcccgacacgtacagcctcgcccactagtggtgaaccctcccccgccccctcagtttcagaatgtgtggagaaaccctaacaccgagacttacctacagccacagattacgcctaatccagtgacccagcatgtccaggcttactctgcatatcctcactctcccggccaggtaataaccggatgtcagctacttgtgtacaactaccaggagtatcctacttatccagattcagccttccaagtcactactggttatcagttgcccgtctacaattaccagccttttcccgcttacccccgcagccccttccaagtgacagctggctatcaactcccagtgtacaattaccaggccttccctgcttaccccaacagcccatttcaggttgctactgggtatcagttccccgtgtataactatcagccttttcctgcctaccctagcagtccatttcaagtaacagcgggataccagttgcctgtttacaattaccaggcattcccagcttaccccaacagcccattccaagttgcaaccggctaccaattcccagtctataattaccagccattcccagcctacccgtcctcaccatttcaagtgacagccggatatcagttgcccgtctacaactatcaggcattcccggcctatcccaattcaccttttcaggtggccaccggttatcagtttcccgtgtacaattaccaggcctttcccgcttaccccaacagccctgttcaggttacgaccggttaccagctgcccgtgtacaattatcaggcattccccgcttaccctaactctccctttcaggtggcgacggggtaccagttccccgtgtacaactaccaggcctttcctgcatacccgaactcacctgtgcaggtcacaactggctaccagttgccggtttacaactaccaggcattccccgcgtatcctaattctgccgtccaagtcaccactggttatcaatttcacgtttataactaccagatgccaccacagtgtcccgtcggggaacaacgtagaaacctttggacagaggcgtacaagtggtggtatctggtatgtcttatacagaggcgggactag

SEQ ID NO: 185129 - DNA, 1677 bp, synthetic construct
  misc_feature 1..1677: note = Description of Artificial Sequence: Synthetic coding sequence
  source 1..1677: mol_type = other DNA
atgagcgccgccaaccccgagacccccaacagcaccatcagccgggaggctagcacccaatctagctcagccgctgcctcgcagggatgggttctgcccgaggggaaaatcgtgccgaacacagtcttcgtgggaggcattgacgccagaatggatgagaccgaaattggatcgtgttttggccgatacggtagtgtgaaagaggtaaagattatcacaaaccgtaccggggtctcaaagggctacggattcgttagtttcgttaatgacgtggatgtccagaaaatcgtcggatcccaaatacattttcacggcaagaagctcaaattaggccccgcgatccggaagcaaaagctgtgcgctcggcacgtgcagcccagaccacttgttgtgaacccccccccgcccccccaattccagaacgtgtggaggaatcccaacacagagacttatctgcagcctcagatcacgcccaatcccgtcacacaacacgtgcaggcatactctgcctacccccattcaccgggccaggtgataacggggtgccagctgttggtctacaactaccaggagtatccaacctacccggatagcgcgtttcaggtcaccacaggttaccagctcccagtgtacaattatcaaccattcccagcctatccgcggtcacccttccaggtaaccgctggttaccagctgccggtttacaactaccaggcattccctgcttatcccaatagtccatttcaggtggctacaggataccagttccctgtctacaattaccagccctttccggcgtacccatccagcccattccaggtaacagcagggtatcagttacctgtgtacaactaccaggcatttcccgcataccccaactccccatttcaagtggccactggctatcagttccctgtgtacaattaccaggcattccctgcctatccgaactcccctgttcaggtgaccactgggtaccagctccccgtgtataattaccaggcgttccctgcttaccctaacagtccagtacaggtgacaacaggatatcagttaccagtgtacaactaccaggcattccctgcatacccttcttccccttttcaggtcacaacgggctatcagctgcctgtctacaactatcaggcgtttcctgcttatccctcgtctcccttccaagttacaaccggataccagctacctgtgtacaattatcaggccttcccagcataccctagtagcccctttcaggtgactacaggataccagctgcctgtctataattatcaggcatttccggcttatccgagctccccctttcaagtgacaacaggctaccagctacctgtctacaactaccaagccttccctgcctatccaagcagcccctttcaggtgacaaccggctaccagctcccagtgtacaactatcaggctttccccgcctacccaagctccccattccaagtcactactggatatcagctgcccgtttataattatcaggccttcccggcatacccaaacagtgccgtccaagtgactactggatatcaatttcatgtttataactaccaaatgcctcctcagtgccccgtgggggagcagcggcgcaatctgtggactgaggcgtacaagtggtggtacctggtgtgcctaatccagcgtagagattag

SEQ ID NO: 185130 - DNA, 1086 bp, synthetic construct
  misc_feature 1..1086: note = Description of Artificial Sequence: Synthetic coding sequence
  source 1..1086: mol_type = other DNA
atgagcgccgccaaccccgagacccccaacagcaccatcagccgggaggcctccacccagtcatcctctgctgcagcatcacagggatgggtcctgccagaaggaaagatcgttccaaataccgtgttcgtgggcggcatcgacgcccgcatggatgaaacagagatcggtagctgcttcggtcgatacgggagcgtgaaggaggtgaagatcattacaaatcgtactggagtgtcgaaaggctatgggtttgttagctttgttaacgacgttgatgtgcaaaagatcgtagggtcacagatccacttccatgggaagaagctgaagttgggtccggcaattaggaaacagaagctttgcgctagacacgtgcagccaagaccccttgtggtgaatccgcctccacctccccagttccagaatgtctggaggaatccaaacaccgaaacctatttgcagccacagattacaccgaacccagttactcagcacgtacaggcctactcagcgtatcctcacagccccggacaggtaatcacaggctgccaattgctcgtgtataactatcaggagtatcctacctaccccgactccgcctttcaggtgaccaccgggtatcagctccctgtatataactaccaaccatttcctgcatatccacggtcccctttccaagtgacggcaggataccaactgcctgtctataactaccaggccttcccagcatacccaaacagtccatttcaagtcgcgaccggatatcaattcccagtttacaattaccagccattcccagcctatccctcctctccattccaggtgaccgctggttaccagctccccgtgtataactatcaagctttccccgcatacccgaactccccgtttcaggttgctaccggctatcagttccccgtctacaactatcaagcgttcccagcctatccgaattcccccttccaggtggcaactggctaccagttccccgtctataattaccaggcttttcccgcttacccaaactctcccgtgcaggtcacgactggataccaactccctgtgtacaactatcagatgcccccatag

SEQ ID NO: 185131 - DNA, 1965 bp, synthetic construct
  misc_feature 1..1965: note = Description of Artificial Sequence: Synthetic coding sequence
  source 1..1965: mol_type = other DNA
atgagcgccgccaaccccgagacccccaacagcaccatcagccgggaggctagtactcaaagctccagcgcagccgcatcacaaggctgggtgctacccgagggaaagatcgtgcccaacaccgttttcgtcgggggcattgacgcaaggatggacgaaactgaaattggtagttgctttggcagatacggcagtgtaaaagaggtgaaaatcatcactaaccggacaggggttagtaagggttacgggttcgtgtcgtttgtgaacgacgtggatgttcagaagattgtggggtctcagattcattttcatgggaagaagctcaaattgggacccgcgatcagaaagcagaagctttgtgctagacacgtgcaacctcgccccctggtagtaaatcccccacctccgccacagtttcaaaacgtttggagaaaccccaatacagaaacgtacctccagccccagatcacccccaaccctgtcacccaacatgtgcaggcctacagtgcttacccacacagccctgggcaggttattacaggatgccaactgctggtatataactaccaggagtacccaacctacccagactcagcgtttcaggtgaccaccggatatcagctcccggtttacaactatcagccctttccagcttaccctaggagcccgtttcaagtgacagccgggtatcagctcccagtgtacaattaccaagcatttcccgcttatcccaactcaccgttccaggttgctacaggctatcaattccctgtctataactaccagccattccccgcttaccctagctctcccttccaggtgaccgccgggtatcagctgccagtttacaattatcaagcattccctgcctatcccaacagtccttttcaggtggcaacaggctaccaatttccagtttacaactaccaaccatttcccgcatacccttccagcccatttcaggtgaccgctggctaccagctgcccgtgtacaattatcaggcattccctgcatatcccaactccccatttcaggtagccactggataccagtttcccgtttacaactatcaggccttccctgcttatccaaactccccggtgcaggttaccactggttaccagctgcctgtttacaattaccagcccttccctgcataccccagaagccccttccaggtcacagccggttatcaactcccagtctataattatcaggctttcccagcatatccaaactctccttttcaggtcgccacaggctaccagttccctgtttataactatcaggcattccctgcctatcccaactcgccggtgcaggtcactactggctatcagttaccagtatacaactaccaggcattccctgcttatccgtcttcacccttccaggtgactaccgggtatcagttacccgtgtataactatcaggcatttcctgcctacccctccagtccatttcaggtgaccaccggctaccaactgccggtgtacaactatcaggcctttcccgcatatcccagctcccccttccaagtgaccacagggtatcagctgcctgtgtataattatcaggcctttccggcctacccatcctccccttttcaggttacaactggataccaattgcctgtgtataactatcaagctttcccagcttacccgagctcgcctttccaagtgacaaccggctatcagttgccagtctataactaccaggcgttccctgcctatccctctagccctttccaggtcaccacgggataccagctgcccgtctataactaccaggcctttcccgcttaccccaactcagcagtccaggtcaccacgggctaccagttccacgtttacaactatcagatgcctcctcagtgccctgtgggtgaacagagacgaaatctgtggacggaggcctacaagtggtggtacctcgtctgcctaatccaacgccgtgattag

SEQ ID NO: 185132 - DNA, 1605 bp, synthetic construct
  misc_feature 1..1605: note = Description of Artificial Sequence: Synthetic coding sequence
  source 1..1605: mol_type = other DNA
atgagcgccgccaaccccgagacccccaacagcaccatcagccgggaggcttcaacgcagtcctcttctgcagccgcttcccagggctgggtacttcctgaaggtaagatcgtgcctaatacggtgtttgtcggcggtattgatgctcggatggacgagaccgagatcggatcctgttttgggcgatacggttccgtgaaggaagtgaagatcattacaaaccgcaccggggttagcaagggttatggattcgtcagctttgtaaacgacgttgatgtccagaaaatcgtggggagccagattcactttcacggcaaaaaactcaagctggggcccgccatccgtaagcagaagctttgcgcaaggcatgtgcaacccaggcccttagttgtgaatccccctccaccaccacagttccagaatgtgtggcggaaccctaacactgaaacgtatcttcagccacagatcactccaaacccagtcacgcagcatgtccaggcctattccgcatatcctcactcaccaggccaagtgattacggggtgccagctcctcgtatataactaccaggagtaccccacctaccctgacagtgcttttcaggtcactaccgggtaccagcttcccgtgtacaattatcagcctttccctgcttatcctcggtcaccgtttcaggtgaccgctggatatcagctacctgtctataactaccaagcttttcccgcttacccgaactcaccctttcaagtggccacaggctaccaattcccagtttacaactatcagcccttcccagcctatcctagttctcccttccaggttaccgcaggttaccagctaccagtttataactaccaggcctttcccgcctaccccaattctccgttccaggtggccaccgggtaccaatttcctgtttataactaccaggccttccctgcctacccaaattctccagtgcaggtgacaacaggttatcagctccccgtgtacaattaccaggccttcccagcatacccatcttccccctttcaggtgaccaccggctaccagttacctgtgtacaactaccaggcgtttccggcttacccctcatctcctttccaggtcaccactggctaccagctcccggtctataactaccaggcatttccagcctacccctctagccctttccaggtgaccacaggctaccagttgcccgtgtataattatcaggcattccccgcctacccttcctccccttttcaagtaaccaccggatatcaattgccagtctacaattaccaagcttttccagcttacccgtcatcacctttccaagtgacaaccgggtatcagcttccagtttacaattaccaagcctttccggcataccctagcagcccttttcaggtaaccactggctaccagttgcctgtctacaactaccaagccttccccgcctaccctaacagtgcggtacaggttaccaccggataccagttccatgtctataactatcaaatgccccctcagtgcccagtcggagaacaaagaagaaacctctggaccgaggcctacaaatggtggtacttggtctgtttgatccaacgccgcgattag

SEQ ID NO: 185133 - DNA, 1317 bp, synthetic construct
  misc_feature 1..1317: note = Description of Artificial Sequence: Synthetic coding sequence
  source 1..1317: mol_type = other DNA
atgagcgccgccaaccccgagacccccaacagcaccatcagccgggaagctagtacgcaatcctcttccgccgccgcttcccagggatgggtgctgcccgagggcaagatagtccctaatacagtctttgtcggtgggatcgatgcacggatggatgagaccgagatcggttcctgcttcggccgctatggaagcgtgaaagaggttaagattatcacgaatagaacgggtgtttcgaaaggttacggttttgtgagtttcgtgaatgatgtggacgtgcagaaaattgtgggctctcagatacatttccatggcaagaaactcaaattgggtcccgctatccgcaagcagaaactctgcgccagacatgtccagcctcgtccactcgtcgtgaatcctccaccacctccgcagttccagaatgtatggcggaatccaaatacagaaacctacctacagccccaaatcacgcccaatcccgtcacacaacacgttcaggcctatagcgcgtacccacactcccctggacaggtgatcacaggatgccagctgctggtgtacaattaccaagaatatcccacctaccccgatagcgctttccaggttactactggctatcagctccctgtgtataactatcaacccttcccagcctaccctcgctccccatttcaagtgaccgccggttaccaattgcccgtgtacaactaccaggcctttcccgcgtaccccaactcaccttttcaggtggcgaccggctaccagttcccggtttataactatcaggccttccccgcgtatccaaattcaccctttcaggtcgcaacaggctatcaatttcccgtctacaactaccaagcattcccggcatacccaaacagcccatttcaggtggccacaggataccaatttcccgtctataactaccaagcctttccagcttacccaaattcacccgtccaggtcaccactggctatcaattgcctgtgtacaattatcaggcctttcccgcctacccaaacagtcccttccaagttgccaccggttaccagttccctgtttacaattatcaggccttccccgcctatccaaactctcctgtccaggtgactacaggttaccagctgcccgtttacaattatcaggcattcccagcatacccgaactctgccgttcaggtgacgaccggctaccaatttcacgtctacaattaccaaatgcctccccagtgcccagtgggcgaacaacgaagaaacctttggaccgaggcatacaagtggtggtatctcgtatgtttgatccagagaagagactag

SEQ ID NO: 185134 - DNA, 1173 bp, synthetic construct
  misc_feature 1..1173: note = Description of Artificial Sequence: Synthetic coding sequence
  source 1..1173: mol_type = other DNA
atgagcgccgccaaccccgagacccccaacagcaccatcagccgggaagctagtacccaaagtagctcagctgctgccagccagggctgggtgcttccggaggggaagattgtaccgaatactgtgttcgtggggggcatagatgcccggatggacgaaaccgagatcggcagttgcttcggcaggtacggaagtgtcaaggaggtcaaaattattactaacaggactggagtgtccaaaggttacggttttgtgtcattcgtgaatgatgttgatgtacagaagattgtgggcagccagatccacttccacggtaagaaattgaagttgggcccagctatacgtaaacagaaactgtgtgcaagacacgtgcagccacgtcctctggtagtgaaccccccaccccctcctcaattccagaacgtgtggcgcaaccccaatacagagacttacttacagcctcaaatcaccccaaacccagtgacgcagcacgtgcaggcttattccgcttacccacattcccctgggcaggtgataaccggctgccagctgcttgtctacaactatcaagaatacccaacatatccggattccgcattccaagtcaccactggctaccagctccctgtgtataactaccagccatttcccgcttacccgagaagtcccttccaggtcaccgcgggctatcagttgccagtgtacaactatcaggcctttcctgcgtatcccaatagccccttccaagttgccacagggtaccagtttccagtgtacaattaccaaccattcccggcgtacccatcaagcccttttcaggttacagcgggctaccagctacccgtctataattaccaagctttcccagcctaccctaattccccattccaggtggcaacagggtaccagttccccgtttacaattatcaggccttcccagcctatccaaatagccctgttcaggtaaccacgggatatcagctgccagtatataattaccaggccttccctgcctatcccaactcggctgttcaagtgacaacagggtaccaatttcatgtttacaactaccagatgccaccccagtgtcctgtgggagagcagaggagaaacctctggaccgaagcctacaagtggtggtatctggtgtgtctaattcagcgaagagactag

SEQ ID NO: 185135 - DNA, 1746 bp, synthetic construct
  misc_feature 1..1746: note = Description of Artificial Sequence: Synthetic coding sequence
  source 1..1746: mol_type = other DNA
atgatggacgagaccgagatcggcagctgcttcggccggtacggcagcgtgaaggaggttaaaatcataacaaaccgaacaggcgtttcaaaagggtatggctttgtgagctttgtcaatgacgtcgatgtgcaaaagattgttggatcacaaatccattttcatggcaaaaagttgaaattggggccggctatacggaagcagaagctctgtgcacgccatgtccagccaaggcccctcgtcgtcaatccccccccaccgcctcagtttcaaaacgtgtggcgcaatcctaataccgaaacatatttgcagcctcagataacccctaacccagttacacagcatgtgcaagcatacagtgcctacccccattctccaggacaggtcattacaggatgtcagctcctagtgtataattaccaagagtatcccacctaccctgacagcgcttttcaggtgaccactggctaccagctgccagtttacaattaccaacccttcccagcctaccctagatccccctttcaggtcacagctgggtaccagctgcccgtgtacaattatcaggcatttcccgcataccccaacagccccttccaggtggcaactggctaccagttcccagtgtacaactaccagccctttcctgcctacccctccagcccattccaggtgactgctgggtaccagttgcctgtttacaactatcaggcttttcccgcctatcctaattctccattccaagtggctaccggctaccagttccccgtgtataactaccaggccttccccgcataccctaactcacctttccaggttgccaccggataccagttcccagtgtacaactaccaggcattcccagcttatcccaacagcccagtgcaggtgaccaccggataccaattacctgtttacaactaccagccctttcctgcatatccacggtccccatttcaagtgaccgccggttatcagctgcctgtgtacaattatcaagcgttccctgcctaccctaactcaccctttcaagtcgccaccggataccagtttccagtatacaactaccaggcattccccgcctaccctaacagcccggtacaagtcaccactggttatcaactcccagtttacaactaccaggcgtttccagcctacccttcaagtccatttcaagtgacaaccgggtaccagctgcctgtttacaattaccaggcattccctgcctacccctcaagcccttttcaggtgacaacaggctatcagcttcctgtttacaattatcaggcttttccagcatacccatcatctcctttccaagttacaacaggatatcaactgccagtgtacaactatcaggcctttcctgcgtatccctccagtcccttccaagtgactacagggtaccagcttcctgtgtacaattatcaggcgtttccagcttacccgtcaagtccttttcaggtgactacaggctatcagctgccagtgtataactatcaggcgttccctgcctacccctcatctcctttccaagtgactactggttatcagcttcccgtctacaactaccaagccttccctgcctatccgaacagcgctgtgcaggtaaccaccggataccagtttcacgtgtataattaccagatgccaccccagtgcccagtgggcgagcaacgccgtaacctctggactgaggcatacaagtggtggtacctggtttgtctgatccagaggagggattag

SEQ ID NO: 185136 - DNA, 1014 bp, synthetic construct
  misc_feature 1..1014: note = Description of Artificial Sequence: Synthetic coding sequence
  source 1..1014: mol_type = other DNA
atgagcgccgccaaccccgagacccccaacagcaccatcagccgggaggcatcaacccaaagtagttctgctgccgcctcccaaggttgggtcctgcccgagggcaagattgttcccaacactgtattcgtgggcgggatagacgccagaatggacgaaaccgaaatcgggagctgcttcggaagatacggcagcgtcaaggaggtcaaaatcattaccaataggacaggcgtgtcaaaaggttatggctttgtgagtttcgtgaatgatgtcgacgttcagaaaatcgtcggttcccaaatccatttccacggtaagaagctgaaactcgggcccgccatacgaaagcagaagctatgcgcgaggcatgtgcagcccaggccgttggtggtgaatcccccccccccccctcaattccagaatgtctggcgaaatcctaatacagagacctacctgcaaccgcagattactcccaatccagtcacgcagcatgttcaggcctatagcgcatatccgcattcacccggccaagttatcactggttgtcaactactggtgtataattatcaggagtaccctacttatcccgatagcgcattccaggtgaccacaggctatcaactcccggtttacaactatcagccttttcccgcttatccacgatccccatttcaagtcacagcaggctaccaactccccgtatacaactaccaggcttttcccgcttaccctaattcaccctttcaagtggctacaggctatcagttccccgtgtacaattaccaggctttccccgcttacccaaacagccccgtgcaggtgaccactggataccagctgcctgtctacaactaccaggcattcccagcctatcccaactctcccttccaggtagccacaggataccaatttccagtgtacaattaccaggcctttcctgcgtatccaaactcacctgttcaggtaaccactggttatcagctccccgtgtataattaccagatgccaccatag

SEQ ID NO: 185137 - DNA, 1101 bp, synthetic construct
  misc_feature 1..1101: note = Description of Artificial Sequence: Synthetic coding sequence
  source 1..1101: mol_type = other DNA
atgagcgccgccaaccccgagacccccaacagcaccatcagccgggaggcctcaacccaaagttcatcagctgccgcatcacagggatgggttctcccagagggtaagatcgtgcctaataccgtgttcgtgggaggaattgatgccaggatggacgagacagaaattggttcttgttttggacgatatggctccgtgaaagaggtgaagattataacaaacaggacgggtgtttctaagggctacggattcgtgtcatttgtaaatgacgttgatgtgcaaaaaatcgtgggctcccaaattcacttccatggtaagaagctgaagctcggtcctgccataaggaaacagaaattgtgtgcgaggcatgtccagccacgccctctggtggtgaatccccccccacccccccagtttcagaatgtgtggagaaaccccaatacagaaacatacctgcaaccccagattacccctaacccggtgacccagcacgttcaagcttattcagcctatcctcattccccggggcaggtaattactggttgtcagcttctagtgtataattaccaggagtatcctacctaccctgactctgctttccaagtcactacaggctaccagctgccagtctacaattaccagcccttcccagcctaccccagaagtccatttcaggtgactgctgggtaccagttaccggtgtacaactaccaggcttttcccgcctatccaaactctccagtgcaggtgactactggctatcagctgcctgtgtacaattaccaggcttttcccgcctaccctaatagccccgtgcaggtcaccaccggatatcagttgccagtttataactaccaagctttccctgcctatcccaatagccccgttcaggtaacaacaggctatcagctgcctgtgtataattaccaggcttttcccgcctaccccaactctgctgtgcaggttacaacaggctaccaattccacgtctataattaccaaatgccaccccagtgtccggtcggggagcagcgacgcaatctctggaccgaggcctacaagtggtggtacctggtgtgcctgatccaaaggcgtgattag

SEQ ID NO: 185138 - DNA, 1317 bp, synthetic construct
  misc_feature 1..1317: note = Description of Artificial Sequence: Synthetic coding sequence
  source 1..1317: mol_type = other DNA
atgagcgccgccaaccccgagacccccaacagcaccatcagccgggaagccagcactcagtcgagctctgctgccgcttctcaggggtgggttctgccagaggggaagatcgtgcctaacacagtgttcgtgggagggatagatgcgagaatggatgaaacagaaatcggttcctgttttggtcgctacggctctgtaaaggaggtcaaaatcattactaaccgcaccggagtctcgaaagggtacgggttcgtgagcttcgtcaacgacgttgacgtgcagaagatcgttgggtctcaaattcattttcatggcaaaaaactgaagctggggcctgcgatcaggaagcagaaactgtgtgcccggcatgttcagcctcggccgttagttgtgaatcctccccctccccctcaattccaaaacgtgtggaggaatcccaatactgagacatacttacagcctcagattaccccaaaccccgtcacacaacacgttcaggcttactccgcctacccacacagcccaggccaggtgatcactggttgccagttgctggtgtataactatcaggaatatcctacatacccagacagtgcttttcaggttactaccggttaccagcttccggtgtataactaccagcccttccctgcatatcccaggtcgccatttcaggtaacggccggttatcaattacccgtctataactaccaggcatttcctgcttacccgaatagcccatttcaagtggcaacaggatatcagtttcccgtgtacaactatcaggccttccccgcttatccaaattccccggtacaggttaccaccggctaccagttacccgtctataactaccaggctttcccagcgtatcccaatagccccttccaggtggcgacgggttatcagtttccagtctataactaccaggcctttccagcttacccgaattcccctgtccaggtgacgacaggctaccagctgcctgtgtataattaccaggcttttccagcctaccccaactcaccttttcaagtagccaccggataccaattccctgtgtacaattaccaggcgtttccagcctatcctaatagcccagtgcaagtcacaaccggctatcaactgccagtttacaattatcaggcttttcctgcctaccccaatagtgccgttcaggtgacgacaggataccagtttcacgtctacaactatcaaatgcctccacagtgccccgtgggcgagcagcgtcgcaacctgtggacggaggcgtacaaatggtggtatctggtttgccttattcagaggcgagactag

SEQ ID NO: 185139 - DNA, 1086 bp, synthetic construct
  misc_feature 1..1086: note = Description of Artificial Sequence: Synthetic coding sequence
  source 1..1086: mol_type = other DNA
atgagcgccgccaaccccgagacccccaacagcaccatcagccgggaggcctccactcagtcaagttctgcggcagcgagccagggctgggtgctgcccgagggcaaaatagtgcccaataccgtatttgttggtggaatcgacgctcgtatggatgagactgaaataggctcctgctttggtagatatggctccgtgaaggaagtgaagattatcaccaatcggacgggcgtaagcaagggttacgggtttgtttcctttgtaaacgatgtagatgtgcagaagatcgttggctctcagatccattttcacggcaagaagcttaagcttggccccgctattcgcaagcagaagctgtgtgcacgccacgttcaaccccgccctttagtggtaaacccccctcctccaccccagttccagaatgtatggcgaaatcccaacacagaaacctacctgcaacctcagataacccccaatcccgtcacccaacacgttcaggcttactccgcttacccacatagtccaggacaggtcattaccggttgccagctcctcgtttacaactatcaagagtaccctacataccccgactcagcattccaggtgacaactgggtatcaattgccagtgtacaactaccaaccttttccagcatacccccgatccccattccaagtcaccgccgggtaccagctgccggtgtataattaccaggccttccctgcctaccctaactcaccatttcaggtggccaccggttatcaatttccagtgtataattaccaggcatttccagcatatccaaactcgcccgtccaggtgacgaccggttatcagcttccggtgtataattaccaggccttccctgcctatcccaacagcccctttcaggtggctacgggctaccaattccccgtctacaactatcaggcattcccagcctaccctaactcacctgttcaggtgaccaccggatatcaactccctgtgtataactaccaggccttccccgcttatccaaactctcctgtacaagtgaccacaggctatcaactccctgtgtacaattatcaaatgccgccttag

SEQ ID NO: 185140 - DNA, 1173 bp, synthetic construct
  misc_feature 1..1173: note = Description of Artificial Sequence: Synthetic coding sequence
  source 1..1173: mol_type = other DNA
atgagcgccgccaaccccgagacccccaacagcaccatcagccgggaggcaagcacccaatcttcatctgcggccgcttcccaaggctgggtgctcccagaagggaaaattgttccaaatacagtattcgtcggcggaattgatgccaggatggacgaaaccgaaataggatcctgtttcgggcggtatgggtctgtgaaggaagtgaagatcatcactaaccgcaccggagtgtccaagggatacggcttcgtaagctttgtgaatgatgtggatgttcagaagattgtcggtagtcagattcacttccatggcaagaaattgaaattaggacctgcgattcgcaaacaaaagctctgtgcccgccacgtacagccccgaccactggtcgtcaaccctcctccacccccgcagttccagaacgtttggaggaacccaaacactgagacatacctgcaacctcagatcacccccaacccggtgactcaacacgttcaggcctacagcgcttatcctcattcgccaggccaggtgatcaccggctgtcaacttctagtctataactaccaagaatatcctacctaccctgacagcgctttccaggttaccactgggtatcagctgccagtgtacaattaccagccatttcctgcctaccctcggtccccgttccaggtaacagccggataccagctgcccgtgtacaattaccaggcgttccccgcttatccaaatagccccttccaggtcgccaccggctaccagttccctgtctataactaccaagccttccctgcttatcccaatagtcctgtgcaagtgactacaggctaccagttgcctgtctacaattaccaggcctttcctgcttatccgaattctccctttcaggtggcaaccggttaccaatttcctgtttataattaccaggcctttcctgcatatccaaactctcccgttcaggtaactacaggctatcagctgcctgtctataactaccaagcttttcctgcctaccctaactctgcggtgcaagtcaccactggctaccaattccacgtttacaattaccaaatgcccccccagtgtccggttggggaacaaaggagaaatttgtggaccgaagcctataaatggtggtaccttgtttgcttgattcagagaagagattag

SEQ ID NO: 185141 - DNA, 948 bp, synthetic construct
  misc_feature 1..948: note = Description of Artificial Sequence: Synthetic coding sequence
  source 1..948: mol_type = other DNA
atggccgcccccagctgcggcggcgaccggaaggcccggctgaccccatcattaccccacgagtccacagcaaatccggagaccccaaacagcacgatcagtcgggaggcctccacccagtcctctagtgctgccactagtcaaggctacatcctccccgaaggcaagattatgcccaacacagtttttgtgggaggaatcgatgtacgcatggacgagaccgaaattcgatcttttttcgcaaggtatggaagcgtgaaagaggtaaaaatcatcacagatagaaccggtgtctctaaaggctatggctttgtttccttttttaatgacgtggatgtccaaaagatcgtcgagagtcaaatcaacttccacggcaagaaactgaagctagggcccgcaatccgcaaacagaatctgtgtgcctaccacgtgcaacccagacccctggtgtttaaccatccgcccccccctcaatttcaaaatgtgtggaccaacccgaacacagagacctatatgcagcctaccaccactatgaacccgatcactcagtacgtgcaggcgtaccccacatacccaaactccccagttcaggtgattaccgggtaccagttgcccgtgtacaactaccagatgcctccacaatggcctgtgggagagcagagatcatacgtggtgccgccagcctactctgcagtgaactatcattgcaatgaagtggatcccggggctgaggtggtaccgaacgaatgtagtgtgcatgaagcgacaccccccagtggcaacggaccacagaaaaaatctgtcgaccggagcattcagactgtggtctcctgcctctttaaccccgagaacaggttgcgaaacagcgtcgtgacccaagacgactatttcaaagataagcgagtccaccacttccgtcgctccagagccatgctgaagtcagtgtag

SEQ ID NO: 185142 - DNA, 888 bp, synthetic construct
  misc_feature 1..888: note = Description of Artificial Sequence: Synthetic coding sequence
  source 1..888: mol_type = other DNA
atgagcaccgccaaccccgagacccccaacagcaccatcagccgggaagcctccacccagagtagtagcgcggccacctctcaaggctatattttgcccgagggcaaaattatgccgaatactgtgtttgttggcgggatcgacgtccggatggatgagacggaaattagatctttctttgctcgatacggctcagtgaaggaagtcaaaattataacagacagaactggggtctctaagggatatgggttcgtctctttctttaatgacgtggatgtgcaaaagatagttgagtctcagataaacttccacggcaagaagctgaaactgggaccggctattaggaaacagaatttgtgtgcctatcatgtgcaaccaaggcccctcgttttcaaccacccgccaccaccccaatttcagaacgtttggacaaaccctaacactgagacatacatgcagccaacaacgactatgaacccaattacccaatatgtccaagcgtatcctacgtaccccaactctcctgtgcaagtaattacaggctaccaattgcccgtgtataactatcaaatgccaccccagtggcctgtgggcgagcagcgctcttacgtggtccctcctgcctatagcgccgtaaactaccactgtaacgaagtcgatcccggtgctgaggtggttcctaatgaatgttctgttcacgaagcaactcccccctctgggaacggcccacagaagaagtctgtcgacagatctatacagacagtggtatcttgtttattcaacccggaaaatcggctgcggaatagcgtagtgactcaagacgactactttaaagataaacgcgtgcatcacttcagacgctcacgggccatgttgaaatcagtatag

SEQ ID NO: 185143 - DNA, 2286 bp, synthetic construct
  misc_feature 1..2286: note = Description of Artificial Sequence: Synthetic coding sequence
  source 1..2286: mol_type = other DNA
atgaactggcggttcgtggagctgctgtacttcctgttcatctggggcaggatcagcgtgcagcctagccaccaggagcccgccggtaccgatcagcatgtgagcaaggaattcgactggttgatatccgatcgtggtccattccaccatagccgcagctacttatcatttgtggaaaggcaccgacagggattcacaacacggtacaagatttatcgagagtttgccagatggaaggtacggaataccgccattgaaaggcgggacctggtgaggcatccagttccccttatgcccgaattccaacggtccattaggctgctgggccgccggcccactactcagcagtttatcgacaccatcatcaaaaagtacgggacacacctgttgatcagcgccacattaggtggagaggaggcactgacgatgtatatggacaagagtcgccttgatcggaaatccggtaacgcaacccagtctgtcgaagctttacaccagttagcttcaagttattttgtcgatcgcgacgggaccatgcgccggcttcatgagatccagatctccaccggagccataaaggtaacggagacaagaactggacctctggggtgtaacagctatgacaatctagatagcgtgtcatcagtgctcttacagtctacagagagtaagttgcacctgcagggcctgcaaatcattttcccgcagtatctccaagaaaaatttgtacagtcagccctctcttatatcatgtgtaacggggagggggagtatctgtgccagaatagccaatgcagatgccagtgcgccgaggagttcccgcagtgcaattgcccaatcacagatatccagatcatggaatacactctagcaaatatggcgaagtcttgggctgaggcttacaaggatctcgaaaactccgacgaatttaaatcttttatgaaacggctgccttcaaatcactttctgacaattggctcaatacaccagcactggggaaacgactgggacttgcagaacaggtacaagctgctccagagcgctactgaagcacagcgacagaagatccagagaaccgcccggaagttatttggcctctccgtgcgctgtcggcataaccccaaccaccaactcccgcgggagcgaactatccagcagtggcttgctcgggttcagtctctgctctattgtaacgagaatggtttctggggaactttcctggaaagccagcggtcatgtgtttgccacgggtccacaacattatgccagaggcctatcccctgtgtgatcggtggaaacaactcctgtgctatgtgctcactggccaatatatctctgtgtggaagttgtaacaaagggtacaagttgtacagaggaaggtgcgaaccccagaacgtggacagtgaacggtccgaacagttcatcagcttcgagaccgacctcgattttcaagatttggagctgaaatacctcttgcagaagatggattccagactttacgttcatacaacctttatctcaaatgagatccgactggacactttctttgacccgaggtggcgaaagcggatgtctctgactctgaaatccaataaaaatcggatggactttattcatatggtgatcgggatgtccatgaggatctgtcaaatgcgcaacagcagcctcgaccctatgttcttcgtctacgttaatcccttcagcgggtcccactctgagggctggaatatgccctttggagagtttgggtatccacgttgggaaaaaattcggctgcagaacagccagtgctataattggacactcctcctcggaaaccgttggaaaactttcttcgagactgtgcacatctacctgagaagcaggactcgactgcccactctgctgagaaatgaaaccggccaaggtccggtcgatttgagtgacccttctaagagacagttttacattaagatttcggatgtgcaagtgttcgggtacagcttgcggtttaacgcagatcttctccgcagcgcggtccaacaagtcaatcagagctatacacaaggaggacagttttactcatcctcctcagtgatgctgctgctattggatatccgcgacaggattaacaggctagcaccccctgtggcccccgggaagccgcagctggatttatttagctgcatgctgaaacaccgccttaagttgacaaattcagagataattcgcgtaaaccacgccttggatctatacaataccgaaatcctcaaacaaagtgatcaaatgacagccaaactctgctag

SEQ ID NO: 185144 - DNA, 963 bp, synthetic construct
  misc_feature 1..963: note = Description of Artificial Sequence: Synthetic coding sequence
  source 1..963: mol_type = other DNA
atgaactggcggttcgtggagctgctgtacttcctgttcatctggggaaggatttccgtgcagccatcccaccaggagccagctggcaccgatcagcacgtgtccaaggagtttgattggctaatctctgataggggtccattccatcacagtaggagctatctgtccttcgtcgaacgacaccgccagggatttaccacccggtataaaatttaccgcgagttcgccagatggaaagttaggaacactgccatcgaacggcgcgacctggttcgccatccagtacccctgatgcccgaatttcagcgtagtataaggctcctggggcgacgacccacaacacagcagtttatcgacactatcatcaaaaagtacgggactcacttacttatttccgctaccctaggcggagaagaagcactgaccatgtacatggacaaaagtcggctggaccggaagtcaggcaatgccactcaatccgtggaggcactccaccagctggcatcttcatactttgtcgaccgcgatggcactatgaggcgactgcacgagatccagatctccacaggggcaatcaaagttaccgagacgcggactggccctctcggctgcaattcttatgacaaccttgactcagtcagcagtgtcttgctgcaaagtacggaatcgaagcttcacctgcaaggtctccagatcatctttccccagtatctgcaagagaagtttgtgcagtctgcactgtcctatatcatgtgcaacggagagggggaatatttgtgccagaatagccagtgcaggtgccaatgtgctgaggaattcccacagtgcaattgcccgatcactgatattcaaataatggaatatacattggcaaacatggcaaaatcttgggcagaggcctataaagacttggagaatagtggacgtgagtctcattccgtgccgctgcatgagtggccctag

SEQ ID NO: 185145 - DNA, 2286 bp, synthetic construct
  misc_feature 1..2286: note = Description of Artificial Sequence: Synthetic coding sequence
  source 1..2286: mol_type = other DNA
atgaactggcggttcgtggagctgctgtacttcctgttcatctggggaaggattagcgttcagccttcacaccaagagcctgcaggaactgaccagcacgtctcgaaggagttcgattggctgatttccgaccgcgggcctttccatcactcgcgcagctatctgtcttttgtggagcgacacagacaagggttcacaaccagatacaaaatctatcgggagttcgcaaggtggaaggtcaggaatacggcaatcgagcgaagagatttggtccgacatcccgtgcccctgatgcctgaattccaaagatccattagattgctgggcagaagacccaccacacagcaatttattgacacaattattaagaagtatggaacccacctattaatatccgctaccctggggggcgaggaggccttgactatgtacatggacaaatcccgactggacaggaagagtgggaacgccacacagtctgtagaggctttgcatcagctcgcctccagctacttcgtggatcgcgacggcacaatgcgcaggctccatgaaatacagatctcaactggggcaattaaagtcaccgagaccagaaccgggccattaggttgcaatagctacgacaatctcgactctgtgtctagcgtgttgctgcagtcgacagagtcaaaactccatttacagggactccaaatcatctttcctcagtatctgcaggaaaagtttgtgcaatccgccctttcgtacatcatgtgtaatggcgaaggagagtacctctgccaaaatagccagtgcagatgccaatgtgctgaggagttcccccaatgtaactgtccaattaccgacattcagatcatggaatacactctcgccaatatggctaagagctgggccgaggcctataaggatctggagaatagcgacgagttcaaaagcttcatgaaacggctccctagcaaccattttttgacaataggttccatccaccagcactggggcaatgactgggatctgcagaatcggtacaagctgctccaatccgctactgaggcacagcggcagaagatccaacgaacagcaagaaagctttttggtctctctgtgcgttgcaggcacaaccctaaccaccagctgccacgcgagcgcaccatacagcagtggcttgcccgtgttcagagccttctgtactgtaatgaaaatggcttttggggcacgtttctggagtcccagagaagctgtgtgtgccatggttctaccactctgtgccagcgccctataccatgcgtgattgggggaaacaactcttgtgctatgtgtagcttagcaaatattagcctttgcgggtcatgtaacaagggttacaaactgtaccgaggtcgatgtgagccccagaacgtggacagcgagaggagcgaacagttcatcagctttgaaaccgacctggatttccaagatctagagcttaaataccttctgcaaaaaatggactctcgactgtacgtccacaccacgtttatcagcaatgaaatacgactagatactttcttcgacccacggtggagaaagcggatgtcactgaccctgaagagcaacaaaaacaggatggatttcatccacatggttattggcatgagtatgcgcatttgccaaatgcggaattcaagcctggacccgatgtttttcgtttacgtgaaccccttctctggctcacactctgaggggtggaatatgccttttggcgagttcggatacccccgttgggagaagatacggctgcagaacagtcagtgctataattggacactgcttcttggcaatagatggaaaactttctttgagaccgtgcacatatacttgagaagccggacacggctcccaacactgttacgaaacgaaactggccagggacccgtggacctgtcagacccttcgaagagacaattctacattaagatctccgacgtccaagtttttggctactctcttcggtttaacgccgacctcctacggagcgcggttcagcaggttaaccagagctatacccagggcggccagttctatagtagctcaagcgtgatgctgctcctcctcgacatcagagaccgcatcaatagactcgccccacctgtggcccccggaaagccccagctggatctgttctcctgcatgcttaagcacagattaaagcttaccaacagtgagatcattagagtcaaccacgctttggacctctataacaccgagatactgaaacagtccgatcaaatgacagctaaattgtgttag

SEQ ID NO: 185146 - DNA, 1404 bp, synthetic construct
  misc_feature 1..1404: note = Description of Artificial Sequence: Synthetic coding sequence
  source 1..1404: mol_type = other DNA
atgaagcggatcaaggtgcccgactacaaggaccggagcgtgttcggcgttccccttaccgttaacgtgcagaggacaggacagcccctcccccagagcatccagcaggctatgcgttatttaaggaatcactgtttagaccaggtggggttattccggaagagtggagtgaagtccaggatacaagctttaaggcagatgaatgaaggcgccattgattgtgtcaactacgagggtcagtctgcctatgacgtggctgacatgctgaagcaatattttagagatctgcccgaacccctaatgaccaacaaactcagcgagacgtttctccagatttatcaatatgtcccaaaggaccagaggctgcaggcaatcaaggcggccattatgctgcttcctgatgaaaacagagaggtgctgcaaactctgttgtatttcctctctgatgtgaccgctgccgtgaaagagaaccagatgacccctacaaacctggcggtgtgtcttgccccctcgttgttccacctgaacactctgaagcgtgagaattcctcccccagagtcatgcagaggaagcagagcctcggcaaacccgatcaaaaggacctgaacgaaaacttggcagcgacccagggactagcccacatgattgcagaatgcaagaagctgtttcaggtaccggaggagatgtcccggtgtcggaactcctatacagagcaagagctgaagcccctgacactcgaggctctcgggcatctgggcaatgacgattccgctgactaccagcactttcttcaggactgcgtggacggattatttaaggaagttaaagaaaagtttaaaggctgggtttcttacagtacctcagagcaggccgagctaagttataaaaaggtttctgaaggcccgccactccgcctgtggaggtcagtcatagaagttcctgcagtgccagaagagatactgaagcggcttctgaaggaacagcatctttgggacgtggaccttttggacagcaaggtcatcgagatcctggatagtcagacagaaatttatcagtacgtccagaacagcatggcacctcatccagcacgggactatgtggtactacggacgtggcggacaaatctgccaaagggcgcatgtgcgctcctgcttactagcgtggaccatgaccgcgctcctgtggtaggagttagggtgaatgtcctcctcagtagatacctcatcgagccatgtggacctggtaaaagcaagctgacttatatgtgtagggtggatttacgggggcacatgccagagtggtatacaaaaagctttggccatctgtgcgctgcagaagtcgttaaaattcgagacagcttctctaaccagaataccgaaactaaggatactaagagcaggtag

SEQ ID NO: 185147 - DNA, 3378 bp, synthetic construct
  misc_feature 1..3378: note = Description of Artificial Sequence: Synthetic coding sequence
  source 1..3378: mol_type = other DNA
atgggcgaccccaaggcccacgtgatggcccggcccctgcgggccccactgcgccgcagcttctccgaccatatccgggatagcaccgcacgagctcttgatgtgatctggaagaacaccagagaccgacggctggcggaaatcgaggccaaagaggcgtgcgattggctgcgggctacaggctttccacagtatgcacagctctatgaggatttcctcttcccaattgatattagcctggtgaaaagagaacatgatttcttggacagggacgcaatcgaggccctctgtcgtagactgaacactcttaataaatgcgccgttatgaaactggaaatctccccacaccggaagcgcagtgatgatagcgatgaagatgaaccctgcgccattagtggcaaatggacttttcagagagacagtaaaagatggtctaggctcgaggagtttgacgtattctcgccgaagcaggacttagtacccggttcacccgatgactcccaccctaaagatgggcctagccccggaggcacactgatggacctctctgaacggcaagaggtaagcagcgttcggtctctatcgagcaccggatcactcccatcccacgctcccccgagcgaagatgcggccacaccgcggacgaatagcgtcatctcagtatgtagcagctctaacctcgcagggaacgacgattcctttggatcccttccctcccccaaggaactgagcagtttcagcttctccatgaaagggcacgagaagaccgccaagtcaaagaccaggtctctactcaaacgcatggagtctcttaagcttaaaagcagtcatcacagcaaacacaaggccccctctaagctaggtctgattatttcagggccaattctccaggagggcatggatgaggagaagctgaagcaactcaactgtgttgagatctcggcacttaacggaaatagaattaacgttccaatggttaggaagcgaagcgtcagcaatagtacacagacatcgtcatcttcatcacagagtgaaactagcagcgctgtatccaccccgtccccggtcaccagaactagaagcctcagcgcttgcaataaaagggttggaatgtaccttgaggggttcgatcctttcaatcagtcaacattcaacaacgtggtcgagcagaacttcaagaatcgggagagctacccagaagacacagtcttctacattcccgaagaccacaaacctgggaccttcccaaaagcgttgacgaatgggagtttctctccgtctggcaacaacggttccgtgaactggagaaccggatcttttcatggcccaggccacatctccctgcggagagaaaattcatcggacagtccaaaggaactgaagcgaaggaatagttccagcagcatgtccagcaggctttcaatctatgacaatgtccccggttccatactgtatagttcatccggtgacctagcagacttggagaatgaagacattttccctgaactggacgatatcctgtaccacgtgaaaggaatgcaaaggattgtaaatcaatggtccgagaagttctcagacgagggagacagtgactccgcactagactcagtgtccccttgtccttcttctccgaaacagattcatctggacgtcgacaatgaccggaccacaccttcagatctggatagtaccggaaactccttgaatgaacccgaggagccctcggagatcccagagcggagagatagcggagtcggggcatcactcacacgtagcaacagacacaggctgaggtggcactccttccagtcctctcatcgaccctcacttaatagcgtctccctgcagatcaactgtcagtccgttgcccagatgaacctcctgcagaaatactccctgttgaaactaacagcgctgcttgagaagtatacaccctccaataagcacggctttagctgggcggtcccaaaattcatgaagaggatcaaggttccggactacaaagatcgaagtgtctttggtgtcccgctgaccgtgaatgttcagcgaacaggacagccactccctcagagtattcagcaagccatgcgatacctaagaaaccactgccttgatcaggttggcctgttccggaagtcaggggtgaagagcagaatccaggcattgagacagatgaatgaaggggcaatcgattgcgttaactatgagggtcagagtgcctacgacgttgccgatatgctgaaacagtattttcgagatctcccagagcctctgatgaccaataagctgtctgagaccttccttcagatctatcaatatgtgccaaaggaccagcgcctgcaggccatcaaggccgccatcatgctcctccccgacgagaatcgcgaggtgctccaaactctcctgtacttcttaagtgacgtcactgccgccgtgaaggagaatcagatgaccccgactaatttagctgtttgcttggcgccatccctgttccacctcaacaccctaaagcgagagaattcaagtccaagggtcatgcagcgtaagcagagccttggtaaaccagatcaaaaagatctaaacgaaaatctggctgctacacaggggctggctcacatgattgctgaatgtaagaagctgttccaggtgccagaagaaatgtcaaggtgtcgcaattcatacacggagcaggagcttaaaccgctcacactggaggccctcggccatctcggaaatgacgactctgccgactatcagcactttttacaggattgtgtggatggtttgttcaaggaggtgaaggaaaagtttaagggctgggtgagctattccacttccgagcaggctgaactatcctacaagaaagtgtccgagggtccaccgttgcgcctctggcgttccgtgatagaggtgccagccgtgccggaagagattctaaaaagattgctgaaagaacagcatctatgggatgtagacctgctggactccaaggtgatcgaaatcttggatagccaaaccgaaatttaccaatatgtgcagaactcaatggctccgcacccggcaagagactacgttgtgctgaggacatggaggactaaccttcccaagggagcatgcgccttgctgctcacaagtgtcgatcacgacagggcccctgtcgttggtgttcgtgtgaatgtgctccttagtcggtacctgatcgagccttgtggccccggaaagtccaaactgacatacatgtgccgcgttgacctgcgagggcacatgcccgaatggtacacaaaaagttttggacatctttgcgcagcagaagtggtgaagattcgcgattcattttccaaccaaaacactgaaaccaaggataccaagagtaggtag

SEQ ID NO: 185148 - DNA, 3054 bp, synthetic construct
  misc_feature 1..3054: note = Description of Artificial Sequence: Synthetic coding sequence
  source 1..3054: mol_type = other DNA
atgaagctggagatcagcccccaccggaagcggagcgacgacagcgatgaggatgaaccgtgcgctattagcggtaaatggacatttcagcgtgacagtaaacgctggagtcggctcgaggaatttgacgtgttttccccgaagcaggatcttgtcccaggctcccctgacgattcacaccccaaggatgggccgagtccagggggtactctgatggacctctccgagaggcaggaggtcagctccgtgaggtctctaagctccacaggttcactcccatctcacgcccctccaagcgaggacgcagctactccccgcaccaatagcgtgattagtgtatgtagcagcagtaacttagccggcaatgacgattcctttgggtcactgccatctccaaaggaactctcatctttcagttttagcatgaagggccatgagaaaacagccaaaagcaagacccggtccctgctgaagcggatggagagcctgaagcttaaaagcagtcatcactcaaagcataaagcgccatctaaactcgggcttattatcagcggtcccatccttcaggagggtatggacgaagagaagctgaagcagctgaattgcgtcgaaatttcagccctgaacggaaatcggatcaatgttccaatggtccggaagcgctcagtgtctaatagcacacagacctcatcgtcttccagtcagtctgaaacatctagcgctgtgtctaccccatcccctgtgacccgtacacggtccctatccgcctgcaataagcgggtcggtatgtacctcgaagggttcgatccattcaatcaatccaccttcaacaacgtggtggagcagaattttaaaaaccgcgaatcctaccctgaggataccgtgttctacatccccgaggaccataagcccgggacctttcccaaggctttaaccaacggttcattttcgccctcaggtaataacgggtccgttaattggcgaacaggatccttccacggacccgggcatataagtctgcggcgggaaaactcaagtgactcaccgaaagagctaaaacgccgtaacagcagctcttcaatgtcctcccggctgagcatctatgacaatgttcctggtagtatcctgtacagtagtagcggcgacctcgctgacctggaaaatgaggatatattcccagaactggacgacatcctgtaccacgtgaaaggcatgcaacgaatcgttaatcagtggagcgaaaagttcagcgatgaaggagactccgatagtgcactagacagcgtctccccttgtccatccagccccaagcagattcaccttgatgtggacaatgatagaacaacgccatcagacctggacagcacagggaattccttgaacgagcctgaggagccgtcagagattccagagcgtcgggactccggagtgggcgcgagcctaacccggtccaatagacacaggctgcgctggcattcgttccagtcatcccatcgtccttctctgaatagtgtcagcctgcaaatcaattgccaatccgtcgcccagatgaacctgctgcagaaatactcgctgctcaagctcactgcattgctcgaaaaatacaccccaagcaacaaacatggctttagctgggctgtgcctaaatttatgaagcgaatcaaagttccagactacaaagatcggagcgtcttcggcgtgccactgactgttaacgtccagcgcactggccagcccctgccccagtccattcagcaagccatgagatatctgaggaatcattgcctggatcaagtgggactatttagaaaatcgggcgttaaaagtcggattcaagctctccgtcagatgaatgagggtgcaattgactgtgttaactatgaaggccagtccgcgtacgatgtagcggacatgcttaaacaatactttagagatctccctgagcccctgatgacaaacaagctgtccgagactttcctgcagatctatcaatatgtgcctaaggatcagcggcttcaggcaatcaaggcagcaatcatgctgctgcccgatgagaaccgagaggtgctccaaacacttctgtactttttatcagatgtgaccgcagcggtaaaagaaaatcagatgacacctacgaacctcgctgtgtgcctcgctccctccctgttccacctgaacactttgaagcgggaaaattcttcaccacgtgtgatgcagagaaaacagtcactgggaaagcctgatcaaaaagacctgaatgagaacctggcggccacccagggcttagctcacatgatagcagaatgcaagaagctgttccaagtgcctgaagaaatgtcacgttgccgcaactcatacaccgagcaggagctgaagcccctcacattagaggctcttggtcacctcggtaatgacgattcagccgattatcagcatttcctgcaagattgcgttgatgggcttttcaaagaagtaaaagaaaaattcaagggctgggtgagctactccacatcagagcaggctgagctgagttacaagaaagtcagcgagggaccccccctgcggctgtggaggtctgtaattgaggtgccagctgtgcccgaggaaatactgaaacggctgctgaaggagcagcatttgtgggacgtggacctcctagacagcaaggtgattgaaatcttggattcacagactgagatttatcagtacgtccagaactctatggccccacatcccgctagagactatgtggtcctgcgaacatggcgcacaaacttgcctaagggagcctgcgccctgctcctgactagcgttgaccacgatagagcccctgtggtgggcgtcagggtgaatgtgttgctttcgcggtatctgatcgaaccctgtggcccgggtaaatccaagctcacctacatgtgcagggtagatctgcgtggacacatgcccgaatggtacaccaagtccttcggccatttgtgtgccgccgaggtggtgaagatccgggactctttttccaaccagaacaccgagactaaggataccaagtcgcgatag

SEQ ID NO: 185149 - DNA, 972 bp, synthetic construct
  misc_feature 1..972: note = Description of Artificial Sequence: Synthetic coding sequence
  source 1..972: mol_type = other DNA
atgggcaacagcgccagccggagcgacttcgagtgggtgtacaccgatcaaccgcacactcagcgaaggaaggaaattttagctaagtatcctgctattaaagccctgatgcgcccagacccacgcttgaagtgggccgtgctggtgttagttctggtgcagatgctggcctgctggttagtgaggggtctggcctggcggtggttgctgttctgggcttacgcgtttggcgggtgtgttaaccattctcttacactggccatccatgatattagccacaatgccgcattcgggaccggcagggctgccagaaaccgttggttagcagtctttgccaacctgcccgtgggtgtgccttatgcggcaagctttaaaaagtatcatgtagatcatcacaggtatctggggggagatggactcgatgtggacgtgccaactcgtctggaggggtggtttttctgcacccctgcacgtaagctcctctggctggtgctacagccttttttttacagcctgcggcctttatgcgtacatcctaaagccgtgactcgaatggaagttttaaacacactcgtccagctggctgctgatctggctatctttgcactttggggcctgaagcccgtagtttacctccttgcctctagcttccttgggctgggtctacatccaatttctgggcacttcgtagctgaacattacatgtttctcaagggccacgagacgtatagctactacggccctctgaactggatcacgttcaacgttggttaccacgtagagcaccatgatttccctagcatcccaggctataatctccctctcgtccgcaagattgcccccgagtactatgatcacctgcctcagcaccactcttgggtaaaggtcctgtgggactttgtgttcgaggattccttgggtccatacgccagggttaaacgggtgtataggctcgcgaaagatgggttgtag

SEQ ID NO: 185150 - DNA, 2214 bp, synthetic construct
  misc_feature 1..2214: note = Description of Artificial Sequence: Synthetic coding sequence
  source 1..2214: mol_type = other DNA
atgcagccccggcgggcccaggcccccggcgcccagctgctgcccgccttggctctgctcctcctgcttttgggcgcaggacccaggggcagttctctggcaaacccagttccagccgcgcctctgtcagcacctggaccctgtgccgctcagccctgtcgaaacggcggcgtgtgcaccagcaggcctgagcccgacccccaacaccctgcccctgccggtgagcctgggtactcctgtacctgccctgctggcatcagcggggcgaattgccagctggtggctgatccctgtgcttcaaatccttgtcatcacggcaactgttccagttcttcctcctcgtcatccgacggctatctatgtatctgcaacgagggctatgagggccccaattgcgaacaggccttgccatccctgcctgcgaccggctggaccgagtctatggcccctcgtcagctccagcccgtcccagccacccaggagcccgataaaattctcccacgcagccaggctaccgtgacactccccacttggcagcccaaaacgggacagaaggtcgtcgaaatgaagtgggatcaagtggaggtgatcccagatattgcatgcggaaatgcgagttcaaattcatccgctggtggccgattagtgagctttgaagtgccacagaataccagtgtgaagatcaggcaggatgccactgctagtttaattctgctctggaaagtgacagccacaggcttccagcagtgctcgttaattgatggtagatccgttacacctcttcaggcctccggcgggttagtccttctggaagaaatgctagcccttggcaacaatcattttatcgggtttgtgaatgatagtgtcaccaagtccattgtggctctccgcctgaccctcgttgtgaaggtgtctacgtgcgtgcctggggagtctcatgcgaacgacttggaatgctctgggaagggaaagtgcacaacgaagccttcggaagccacgttttcgtgcacctgcgaggaacagtatgttggtaccttctgtgaagaatatgatgcatgtcaacgaaaaccctgtcagaataatgccagctgtatcgatgcaaacgagaaacaggatggctccaactttacttgcgtttgcctcccagggtacaccggagaactgtgccaaagtaagatcgactattgtatcctcgacccctgcagaaacggagccacctgcatttcttccctgagcgggtttacctgtcagtgccccgaaggctattttggaagtgcttgcgaggaaaaggtcgacccttgcgccagctccccctgccagaacaatggtacatgctatgttgacggcgtccacttcacctgcaattgctcccccgggtttacaggtcctacatgtgcgcagttgatagatttctgtgccttgagcccttgcgcacacggaacctgccgcagcgtgggtacaagttataagtgtctatgtgacccaggatatcacggcctgtattgcgaggaggagtataacgagtgtcttagcgctccatgtctgaatgccgcaacttgccgtgatttagtgaacggttatgagtgtgtatgtctggccgagtacaaaggaacccattgtgagctttataaagatccttgtgctaatgtgtcttgcctgaacggggccacttgtgacagtgatggactcaacggcacttgcatttgcgcaccaggctttaccggagaagagtgcgatattgacatcaacgaatgcgattccaacccttgccaccatggcggaagctgcctggaccagcccaacgggtacaactgccattgccctcacggttgggtcggcgccaactgcgagattcacctccagtggaagtctggacacatggcagagtctctgaccaatatgccacggcacagtctgtatataatcattggggccctgtgtgtggcttttattctgatgctcatcatactaatcgtcggaatttgtcggatttccaggatcgagtatcagggctcatcacggcccgcatacgaggaattttacaattgtcgctctatcgattccgagttctccaacgccattgccagcatacgccatgcccggttcggcaagaagtcacggcccgccatgtacgacgtcagccccatcgcatatgaggactacagcccagacgacaagccactagtcactctgataaaaaccaaggatttgtag

SEQ ID NO: 185151 - DNA, 1368 bp, synthetic construct
  misc_feature 1..1368: note = Description of Artificial Sequence: Synthetic coding sequence
  source 1..1368: mol_type = other DNA
atgctggccctgggcaacaaccacttcatcggcttcgtgaacgacagtgtaacaaaatcaattgtagccctgcgcctaacattagtggtgaaagtgtcgacttgcgtacccggggagtctcacgccaatgatttagaatgctcagggaaaggtaaatgcactacgaagcctagcgaagctacattcagctgcacctgtgaggaacaatatgttggcaccttctgtgaagagtacgatgcatgccagaggaagccatgtcagaacaacgcaagctgcatcgatgctaacgagaaacaggacggttctaatttcacctgcgtctgtctcccaggatacaccggggaattgtgtcagtccaaaatagactattgcattctcgacccatgccgaaacggggcaacctgtatttcctcactgtccggcttcacctgccaatgcccagaaggctacttcggctcggcttgtgaggagaaggttgatccttgtgcctcaagcccttgccagaacaacggaacctgttgctctcccggattcactgggcctacttgtgcgcaacttatagatttttgcgccctgtctccttgtgcccacgggacttgcagatcagtcggaacttcctacaagtgtttatgcgacccaggttaccacggcctctattgcgaagaggaatataatgagtgtctaagcgcaccatgcctcaacgcagctacatgcagagacttggtgaatggctatgaatgtgtgtgcctggctgagtacaaaggcacacactgcgaactctacaaggacccctgtgcaaatgtgtcatgtctgaacggggccacctgtgattcagatggactcaacggcacctgcatctgtgccccgggattcaccggggaggaatgtgacattgacataaatgaatgtgactctaacccatgccaccacggcggttcgtgcctcgatcagccaaatgggtacaattgccattgcccccacggatgggttggtgctaactgtgagatccacctacagtggaagagtgggcacatggcagaatccctgacaaatatgcctaggcacagtttatacatcatcatcggagcgctctgcgtggccttcatactgatgctcattatccttattgtgggaatatgcagaatttctagaatcgagtatcagggcagcagtagacccgcctacgaagagttttacaactgtcggagcatcgactctgaattctcaaacgcgatcgccagtatccgccatgccaggttcgggaaaaaaagtcgacccgccatgtacgacgttagccctatagcttacgaggattattcgcccgacgacaagcctctagttaccttgatcaaaactaaagacctttag

SEQ ID NO: 185152 - DNA, 933 bp, synthetic construct
  misc_feature 1..933: note = Description of Artificial Sequence: Synthetic coding sequence
  source 1..933: mol_type = other DNA
atgaccgccaccgaggccctgctgcgggtgctgctgctgctgctggcctttgggcacagtacctatggagccgaatgcttccctgcctgcaacccacagaatggattttgtgaggatgacaatgtatgccggtgccagccaggctggcagggccctctgtgcgatcagtgcgtgacttccccagggtgcctgcatgggctctgtggcgagcctggccaatgcatatgtaccgacggttgggatggagagctctgcgacagagacgtcagggcttgctcaagtgcgccttgtgctaataatcggacctgtgtttccctagacgatgggctgtacgaatgtagttgcgcccccggctacagcggcaaagattgtcaaaaaaaggacgggccatgtgttatcaatggtagtccctgtcagcatggcgggacatgcgtggatgatgaggggcgggctagccatgccagctgcctctgccctccaggttttagcgggaacttctgtgagattgtggccaactcatgcacacccaacccttgtgaaaatgacggggtgtgcacagatatcggcggcgactttcgctgtcggtgcccggctggatttatcgacaagacatgctcccgacctgttacaaactgcgcgtcctctccctgtcagaatgggggcacttgtcttcagcacactcagggtcaggcaatctgcttcaccatcctcggcgtgctgaccagcctggtggtgctggggacggtcggtattgtcttcttaaacaaatgcgagacttgggtgtccaacctgcggtacaaccacatgcttaggaagaagaaaaacttactgctgcagtacaactcaggagaagatctggccgtaaatatcatcttccctgagaaaatcgacatgactaccttctctaaggaggctggtgatgaagaaatatag

SEQ ID NO: 185153 - DNA, 1152 bp, synthetic construct
  misc_feature 1..1152: note = Description of Artificial Sequence: Synthetic coding sequence
  source 1..1152: mol_type = other DNA
atgaccgccaccgaggccctgctgcgggtgctgctgctgctgctggcttttggccatagcacatatggcgcagagtgcttccccgcttgcaatccccagaatggtttctgcgaggatgacaatgtatgccgatgccagccaggatggcagggtcctctctgcgaccagtgcgtgacatcacccgggtgcctccatggtctgtgtggggaacccgggcaatgcatttgcaccgacggttgggacggggaactctgcgacagagatgtgcgggcatgctcgagcgctccctgcgccaataatcgaacctgcgtctcattagatgacggtctgtatgaatgctcatgcgctcctggatacagcggcaaggattgtcaaaagaaagatggcccctgcgtgatcaacggctcaccttgtcagcatggtggaacttgcgttgacgatgaaggtagagcaagccatgctagctgcctgtgccccccaggcttcagcggaaatttctgtgaaattgtggccaactcgtgtacccccaatccatgcgagaatgatggtgtatgtacagatataggaggcgattttaggtgcagatgcccagcagggtttatagataagacttgtagccgccccgtgaccaattgcgcctctagcccgtgtcagaacggagggacctgtctccaacacactcaggttagttatgagtgtctgtgtaaacccgaattcactggactgacatgcgtgaagaaaagggctctgagtcctcagcaggtgactaggttacctagcggttacggtcttgcatatcgcctgacaccaggggttcatgagttgccggttcagcagcccgagcatcgtatcctgaaagtgtcaatgaaggagttgaataagaaaacacctctgcttactgagggacaggctatttgcttcaccatcctgggagtgcttacttctttggttgtcttggggaccgtcggcatcgtgttcctgaacaaatgcgaaacttgggtgtcgaatcttagatacaaccacatgctgcgcaaaaaaaagaacctcttactgcaatacaatagcggagaggatttggcagtgaacattattttcccggagaaaattgacatgaccactttttcaaaagaggcaggagacgaggaaatctag

SEQ ID NO: 185154 - DNA, 294 bp, synthetic construct
  misc_feature 1..294: note = Description of Artificial Sequence: Synthetic coding sequence
  source 1..294: mol_type = other DNA
atgaccgccaccgaggccctgctgcgggtgctgctgctgctgctggccttcggacactctacttatggggccgaatgttttcctgcatgtaatcctcagaatggattctgtgaagatgacaacgtatgtcgctgccagcccggctggcaaggcccactgtgcgatcagtgcgtgacttccccaggatgcctgcacggcctatgcggcgagcctggccagtgcatatgcacagatggatgggatggtgagctgtgcgaccgggatgtgagagcatgctcaagcgcaccttgttag

SEQ ID NO: 185155 - DNA, 3612 bp, synthetic construct
  misc_feature 1..3612: note = Description of Artificial Sequence: Synthetic coding sequence
  source 1..3612: mol_type = other DNA
atggccgcctgcggccgggtgcggcggatgttccggctgagcgccgccctgcatctgttgctgttgttcgctgccggtgctgagaaactgcctggccagggagtgcatagtcaaggtcagggaccaggagccaactttgttagctttgtgggccaagccggtggcgggggtcctgccggccaacagcttccgcaactgcctcaaagctcccaattgcagcagcagcagcagcagcagcagcagcaacagcagccacagccacctcagccacctttcccggcggggggcccaccagcccgacgtggtggcgctggagccgggggcggttggaaacttgcggaagaagagtcctgtcgggaggacgtgacacgggtgtgcccaaagcacacctggagcaataatttggctgttctcgagtgtctgcaggacgtgcgggagcccgaaaatgaaataagttctgactgcaaccatctactgtggaattataagcttaacctcacgacggacccaaagtttgagagcgtggctagggaagtgtgcaaaagcactataacggagattaaggaatgtgcggacgaacctgtgggaaaagggtatatggtcagctgcttagtggatcatagaggtaacatcactgaataccagtgtcatcagtacatcacaaaaatgacagctataatcttctccgactatagattaatatgcggattcatggacgattgcaagaatgatattaacatcctcaaatgtggcagcattcggctgggagagaaagacgcccacagccagggcgaagtcgtgagctgtctggagaagggcctcgtgaaagaagctgaagaacgagaacctaagatccaggtcagtgagctatgcaagaaagccatactaagagtggcggagctcagctctgatgactttcatcttgatagacacctctactttgcttgtagggacgatagagaaaggttttgtgagaatacacaggccggagaaggccgcgtctacaagtgcctgtttaatcacaagttcgaggagagcatgtctgaaaagtgtcgggaagcactaaccacccgccagaagctgattgctcaggattacaaggtgtcctatagtctcgctaaatcttgtaaaagcgacctgaaaaagtatcggtgcaacgttgaaaatctccctaggtcccgagaggcccgcttatcctatctgctgatgtgtctggaatctgccgtgcacagaggaagacaagtgtcatcggagtgccagggtgagatgctcgactaccgacgcatgctgatggaagactttagcttatcccctgagataatcctgagctgccgaggcgagatagaacaccactgcagtggccttcacaggaagggcagaaccctccactgcctgatgaaggtcgtgcggggggagaaaggcaatcttggtatgaattgtcaacaggctctacaaactttgatccaggaaaccgatcccggagccgattatagaattgaccgggccctgaatgaagcctgtgagagtgtaatccagaccgcttgcaaacatattagatccggagacccaatgatcctgagttgtctcatggagcacctgtatacagaaaaaatggttgaggattgcgagcaccggcttctggaattgcagtactttatcagtagggactggaagctcgacccagtgctctatcggaaatgtcagggggatgcctcacgcctttgtcacactcatgggtggaacgaaacaagtgaatttatgcctcaaggtgccgtgttcagttgcctctaccgccacgcttacaggactgaagaacagggacgcaggctaagcagagagtgtcgcgccgaagtacagcgaattctacaccagagggccatggacgttaaactcgaccctgccctgcaggacaaatgtctaatcgatctgggaaaatggtgttctgagaaaaccgaaaccggacaggagttagaatgtctgcaggatcacctcgatgatctggtggtagagtgtcgggacatcgtgggcaatctgactgaattagagtccgaagatattcagattgaagccctgttaatgcgtgcgtgtgaaccaataattcagaacttctgccacgacgttgccgacaaccaaattgacagcggcgacctgatggaatgtctgattcagaataagcaccagaaggacatgaatgaaaagtgtgccattggtgtgacgcactttcagttggtccagatgaaggactttcgcttctcttataagttcaagatggcctgtaaggaggatgtccttaagctctgtccgaacatcaaaaaaaaggtggacgttgtaatctgcctcagcacaacagtgaggaacgacacccttcaggaagccaaggagcacagagtgagtctgaaatgtcgaagacaacttcgtgtggaagaactagagatgaccgaggatattagactcgaacctgacctctacgaagcttgcaaatccgacataaaaaatttttgcagtgctgttcagtacggcaacgcacagatcatagaatgccttaaagaaaataagaaacaactttcaactaggtgtcatcagaaagtattcaagctccaggagactgagatgatggacccagaattagattatacattgatgagggtgtgcaagcagatgatcaagagattctgccccgaagctgatagcaagaccatgctccaatgtctgaaacagaataagaattccgaactcatggaccctaagtgcaagcaaatgatcacgaagagacagattacacagaataccgattaccgcctaaatcccatgctccgaaaggcgtgcaaggcagacattccgaaattttgccatgggatcctgactaaagccaaggacgacagcgaactcgaggggcaggtgatcagttgcctgaagctgaggtacgccgatcagcgactgagtagcgactgtgaggatcaaattcggatcataattcaggaatctgctctggattaccggctcgaccctcaactgcagttgcactgcagtgatgagatatcctcgctctgtgcggaggaggctgctgctcaggaacagacaggtcaggtggaggaatgcctgaaggtgaatctcctgaaaattaagacagaattatgtaagaaagaagtgcttaatatgctgaaagagtccaaggcagatatctttgtggatccggtgctgcataccgcatgcgccctggacatcaagcatcactgcgccgccatcacgcctggacgtggaaggcaaatgtcatgccttatggaagccctcgaggataaacgggtgcgattgcagcctgaatgcaagaaacgtctgaatgaccgtatcgaaatgtggagttacgcagcaaaggtcgccccagctgatggatttagcgatctagctatgcaggtcatgacttccccgagcaagaattacattctctctgtcatttctgggagcatttgcattctgttcctgattgggcttatgtgtggccggatcacaaagcgggtgactagagagttaaaagacagactccaatatcgatctgagaccatggcttacaaaggcctcgtatggagccaagacgtcactggaagccccgcatag

SEQ ID NO: 185156 - DNA, 1764 bp, synthetic construct
  misc_feature 1..1764: note = Description of Artificial Sequence: Synthetic coding sequence
  source 1..1764: mol_type = other DNA
atggtgagcccccggatgagcggcctgctgagccagaccgtgatcctggccctgattttcttgcctcagacaaggccggcaggtgtgtttgagctacagattcactccttcgggcctggaccaggccctggagccccgcggtccccctgctcggcacgcttaccttgccggctgttcttccgtgtctgtttgaagccaggattgtccgaggaagccgcagaatccccttgtgcgctgggcgccgctctgagcgcccgtggacccgtttataccgagcaacccggagctcctgcccccgatcttcctctccccgacggattgctccaggttccattccgcgatgcctggccgggtactttctcatttatcattgaaacctggcgcgaggagctaggcgatcaaattgggggtcccgcgtggtccctccttgccagggttgctggacggcgtcgtctcgcagccggtggtccatgggcgcgcgatatacagagagcgggcgcctgggaattgagatttagctacagggcgcgatgcgaaccccccgccgtcgggactgcttgcacccggctgtgtcgaccgcgttcagccccgtctcggtgtggacctggactgcgcccctgcgcacccttagaagacgagtgtgaggctcctttggtgtgcagggccgggtgttctccggaacacggcttctgtgaacagcctggtgagtgtaggtgtctggaggggtggacaggcccgctgtgcacggtgcccgtctctactagcagctgcttgagccctcgcgggccctctagtgcaaccacaggttgtttagtgccagggcctggcccttgtgatgggaacccctgcgctaatggggggagttgtagtgagacacctagatcctttgagtgcacatgtccacgtggcttctacggcttacggtgcgaagtgtccggggtgacatgcgccgacgggccatgcttcaacggcggactatgcgtgggaggtgccgatcctgactccgcctatatttgccactgccctcctggcttccagggctccaactgcgagaagagagtggaccgatgcagccttcagccatgtcgcaacggggggctgtgcctggacctcggccatgcactgcggtgccgatgcagggccggcttcgccggcccaaggtgtgagcacgatctcgacgattgtgcggggcgcgcctgtgccaatgggggaacatgtgtcgaggggggaggcgctcaccggtgctcatgcgccctggggttcggagggcgcgattgcagagagcgcgcagacccatgtgccgcaagaccttgcgcccatggcggtagatgctacgcccacttttctggcttagtgtgtgcgtgcgccccagggtacatgggagctcggtgtgaattcccggttcatcctgacggcgcaagcgctctgcctgcagcgcccccgggccttcgccccggtgatccacagaggtatttgctcccaccggcactgggactgctggtggcagctggcgtcgcgggagctgccctgttgcttgtccatgtaaggaggcgtggtcatagtcaggatgccgggagtaggttgctagccggcactccagagcctagtgttcatgccctgccagatgctctgaacaacctcaggacgcaggaaggaagtggggacggcccatcgtcttccgtggactggaaccgtcccgaagatgtggacccccaaggaatctacgtgatctccgcccctagtatctacgcacgtgaagcatag

SEQ ID NO: 185157 - DNA, 2058 bp, synthetic construct
  misc_feature 1..2058: note = Description of Artificial Sequence: Synthetic coding sequence
  source 1..2058: mol_type = other DNA
atggccgccgccagccggagcgccagcggctgggccctgctgctgctggttgccctctggcagcaaagggcggctggctctggcgtattccagttgcagttacaggaattcataaatgaaaggggtgtgctagcaagtggcagaccctgcgaacccggctgccgcactttttttcgcgtgtgtttaaagcatttccaggctgttgtgtccccagggccatgtacctttggcactgtgagcacacccgtgctgggaaccaactcttttgctgtgcgggatgacagcagcggcggaggaagaaaccctctgcaactgcccttcaactttacatggcctgggacttttagcctgataatcgaggcttggcatgcacccggggacgatctgaggcccgaagccctgccccccgatgcgctgatctccaagatagctatccaagggtcactagccgttgggcagaattggctcctggatgagcagacctctacactaacccgcctgcggtacagctatcgtgtgatttgtagcgacaattattatggtgacaactgctccagactgtgcaagaaacgcaacgaccacttcggccactacgtgtgtcaacctgacgggaacctgtcctgcctacccgggtggacaggggaatactgccagcagcctatctgtctgagcggatgtcacgaacagaacgggtattgttccaagccggctgaatgtctttgtagaccagggtggcagggccggctctgtaatgaatgcatcccccacaatggctgccgtcacggcacttgttcaacgccttggcagtgtacttgcgacgaaggatggggcgggctcttttgcgatcaggacttaaactattgcacacaccatagtccgtgcaaaaacggcgcgacatgctctaacagcggacagcggtcctatacctgtacatgccgtccaggctataccggggtcgattgtgagctggagttgtcagaatgtgactctaacccatgtcgcaacggcggaagttgtaaagatcaagaagatgggtaccactgtctgtgcccccccgggtattacggactgcattgcgagcactccaccctctcctgcgccgatagcccatgtttcaatggcggatcttgccgagagcgcaatcagggcgctaactatgcctgcgaatgtccaccaaactttactggcagcaattgcgagaaaaaggtggatcgttgcacgagcaacccctgcgctaacggaggccagtgccttaaccggggacctagccggatgtgcagatgtcgccccggattcaccggcacctattgcgaactgcacgtgtccgactgcgccagaaacccttgtgcacacggaggcacctgtcacgatctggagaacggactcatgtgtacttgccctgctgggttctcaggaagaaggtgcgaagtccggactagcattgacgcttgcgcatcctcaccatgcttcaacagagctacgtgttatacggacctgtctacagatacttttgtttgtaactgtccctacgggttcgtgggcagtaggtgcgagtttcccgtgggcttgcctccgagcttcccctgggtcgcagtgtcactgggcgttgggttggccgtcttgctggttctgcttggcatggtcgctgtagccgtacgccagctgagacttcgtcgcccagacgatggatctagagaggcgatgaacaatctctctgattttcagaaggacaatctcattcctgcagctcagttgaaaaacaccaaccagaagaaggagctcgaggtagactgcggactagataagtccaactgtgggaaacaacaaaatcacaccctggactataacttggcacctggccctctgggccggggcaccatgccaggcaagttccctcactcagataagagtctgggtgaaaaagcacccctgcggttgcactcagagaagccagaatgccgcattagcgccatatgctctccacgggattccatgtaccagtccgtctgcctaatatctgaagagcgtaatgaatgcgtcattgccaccgaggtttag

SEQ ID NO: 185158 - DNA, 2223 bp, synthetic construct
  misc_feature 1..2223: note = Description of Artificial Sequence: Synthetic coding sequence
  source 1..2223: mol_type = other DNA
atggccagccacctgcggccccccagccccctgctggtgcgggtgtacaaaagcggacctagggtcaggagaaaactcgagtcatacttccagagcagtaaatctagcggtggcggggaatgcacagtcagcacccaggaacacgaggctccaggcacctttcgagtggagttctcagagcgagctgccaaggaacgggtcctgaaaaaaggcgaacaccagatccttgtagacgagaaaccggtgccaattttcctggtgcctactgaaaactctattaaaaagaacacccgacctcagattagctctctgactcaatctcaagccgagactcctagcggggacatgcaccaacatgagggacacatcccaaatgcagttgattcctgtctgcagaagatttttctgaccgtgaccgcagacctgaattgtaacctcttttccaaggaacagcgcgcatacattacgacgctgtgcccatccattcgcaaaatggaaggccatgacgggattgagaaagtctgcggggatttccaggacattgaacggatccatcagttcctgtcagagcagttcttggaatcggagcaaaaacagcagttttcgccttccatgaccgaaagaaaaccgctgagccaacaggagagagattcatgtatctccccttcagaaccggagacaaaagccgagcagaaaagtaattacttcgaagttccactgccctattttgaatactttaagtacatttgccccgacaagatcaattcaatagagaagagattcggcgtcaatatcgagatccaggagtcttctcctaacatggtctgcctggactttacaagctccagatcaggtgacttggaagcagctagagagagcttcgctagtgaattccagaagaatacggaacccctgaaacaggaatgcgtaagcctagcagactctaaacaggccaacaaatttaagcaggaattgaaccaccagtttaccaaactgctgatcaaggaaaaggggggcgaattaaccttgctcgggacacaggacgatatctcggcagctaagcaaaagatatccgaagcatttgtgaaaattccagtaaaactctttgcggccaattatatgatgaacgtgatagaggtagattcggcccactataaattactcgagaccgaactgctccaggagatttcggagatcgagaaacggtatgacatatgctcaaaagtgagcgagaaggggcaaaaaacttgcattctgtttgaaagtaaggacagacaagtcgatttatccgttcatgcatatgccagtttcatcgacgccttccagcacgctagttgccagctcatgcgtgaggtgctactgttgaagtccttgggcaaggagagaaagcatctacaccaaacaaagtttgcagacgattttcgaaagcgtcatccaaacgtccacttcgtcctgaaccaggagtctatgactttaactggtctgccaaaccatctggccaaagccaaacagtacgtgctcaagggcgggggaatgtcttctctggctggtaagaaattaaaggagggacacgaaaccccaatggatattgacagcgacgactccaaagccgccagtccacctcttaaaggctccgtttcaagcgaggcctctgaactcgacaagaaggagaaggggatctgcgtcatctgcatggacaccatcagtaacaaaaaggtcttacccaaatgtaaacacgaattttgtgccccttgtataaacaaagccatgagttacaagccgatttgtcccacatgccagacatcctatggcattcagaaaggcaatcagcctgaggggtccatggtgtttactgtgagcagggacagcttaccaggatacgaaagcttcgggacaattgtaatcacctattcaatgaaggcggggatccagaccgaggaacacccaaatcccggaaagcgctacccaggtatacaacgaacggcttatctcccagacaacaaggagggacgtaaagtgctgaaactgttgtacagagcctttgatcagaagttgatcttcacggttgggtattctcgggttcttggggtgagtgacgtgatcacctggaatgacattcatcacaagacctctaggtttggcggcccagagatgtatggatacccagatcccagctaccttaagcgggtgaaagaagaactgaaggccaaaggaatcgagtag

SEQ ID NO: 185159 - DNA, 1863 bp, synthetic construct
  misc_feature 1..1863: note = Description of Artificial Sequence: Synthetic coding sequence
  source 1..1863: mol_type = other DNA
atgagccggcccggccacggcggcctgatgcccgtgaacggcctgggtttcccgccacagaatgttgcccgcgtggtagtgtgggagtggctgaatgagcactctagatggcgtccttatacagctactgtgtgtcaccacattgaaaatgttctgaaggaagatgcaagaggctcagtagtgctcggccaggtggacgctcagctcgtgccttatatcatcgatctgcagtcaatgcaccagtttcgccaggatactggaacgatgcgaccggtgcgccgaaatttctatgaccccagctcggcaccaggcaagggtatagtgtgggaatgggagaacgacggcggagcttggacagcatacgacatggacatttgcattaccattcagaatgcctacgagaagcagcacccttggctcgacctgtcctccctggggttctgttacctcatctacttcaactccatgtcacagatgaataggcagacacgaaggcgaagacgtcttagacgccgcctggacctcgcctatccccttactgtcggttccataccaaaatctcagagttggcccgtcggcgcgtcatctggccagccgtgctcatgccagcaatgcctgctggtcaatagtacccgggcggcttctaatgccattctcgcttcgcagcggcgaaaggccccaccggctcctcctctcccgccaccccctccacctggcggaccacctggagcacttgccgtacgaccatctgccacctttacaggtgcagccttatgggctgcacccgccgccgggcccgcagagcccgcaccccctcccggagctcctcccagatctcctggcgctcccggaggagcccggacccctgggcagaacaacctgaatcggcctgggcctcagcgcacaacttctgtttcagccagagcctctatcccacctggagtgcccgccctaccagtcaagaacctgaacggcaccgggcccgtgcacccagcgctcgccggcatgactggtatcctactgtgtgcggctggccttcccgtgtgcttaacccgggcccctaaaccgatcttacatccaccgccagtgtccaaatccgatgtcaagccagtgcccggggtcccgggcgtgtgccgtaaaacaaagaaaaagcacttgaaaaaatccaaaaatccggaagacgtggtgcgccgctacatgcagaaagtcaaaaacccacccgatgaagattgtaccatctgcatggaacgtctggttacagcaagcggctacgagggtgtcctccggcacaagggcgtgcgccccgagctggtcggaagacttggcagatgcgggcacatgtaccatctcttgtgcttagtggccatgtactcaaacggaaacaaggacgggagccttcaatgcccgacgtgcaaggctatttatggtgagaaaactggcacccaacctccaggaaagatggagttccacctgatcccacatagcctgcctggattccccgatacccaaacgatccgtatcgtttacgacatccccaccgggatccaaggtcccgaacatcccaatcccggaaagaagttcacagcgcgcgggtttccgcgccactgctacttgccaaacaacgagaagggacgtaaagtgttgaggctacttattaccgcttgggagcggaggctaatattcacaatagggacctctaacacgacgggtgagtctgatacagtggtgtggaacgaaatccaccataaaacagaatttggcagcaacctgaccggacatgggtaccccgatgccagctatctggacaacgttctcgcagaactcaccgcccagggcgtgagtgaggctgctgccaaggcttag

SEQ ID NO: 185160 - DNA, 1044 bp, synthetic construct
  misc_feature 1..1044: note = Description of Artificial Sequence: Synthetic coding sequence
  source 1..1044: mol_type = other DNA
atgagcttcgtgctgagccggatggccgcctgcggcggcacctgcaagaacaaagtgacagtgtccaaacccgtgtgggacttcctcagcaaggaaactcccgcccgcttggctaggctaagggaagagcatagggtgtccattctcattgatggcgaaacctcggatatctacgtgttacaactgagcccacagggcccgccccccgctcccccaaatggcctgtacctcgcgaggaaagccctgaagggtcttctcaaagaggcggaaaaggagctcaagaaggcccagcgtcagggagagttaatggggtgtctggcattagggggcggcggggaacatccggagatgcatcgggccggaccaccaccactaagagctgctccccttctcccacctggagcccgtggacttccccctccacccccaccccttcctcctcctctgccacctagactgagagaagaagctgaagaacaggagagtacttgtcccatttgcctgggagaaattcaaaatgcaaaaaccctcgagaaatgcagacactcattctgtgagggctgcatcacccgggctctccaagtcaagaaggcatgccctatgtgtggacggttctatggtcagctggtaggcaaccagcctcaaaacggacgaatgcttgtgtcaaaggacgctaccttgctgttgcccagctacgagaagtatggcacgattgttattcagtacgtattccctcccggggtgcagggtgctgagcacccaaatcctggagtgcgctatcctgggaccacacgggtggcatacttgccggactgccctgaaggaaataaggtactgacactctttcgcaaagcttttgaccaacgtttgaccttcacgattgggacatccatgaccaccggcaggccaaatgtgattacttggaacgacattcaccataagacttcttgtacaggaggcccccagctgttcggctatcctgaccccacatatcttacacgggtccaggaagaattgcgtgcaaaggggattaccgatgactag

SEQ ID NO: 185161 - DNA, 1044 bp, synthetic construct
  misc_feature 1..1044: note = Description of Artificial Sequence: Synthetic coding sequence
  source 1..1044: mol_type = other DNA
atgagcttcgtgctgagccggatggccgcctgcggcggcacctgcaagaacaaggtgaccgtgtcaaaacccgtgtgggattttctttccaaagagacccctgcaaggttagctcggctgagagaggagcaccgcgtctccatactgatcgatggggagaccagtgatatctacgtcctgcagctcagtccacaaggtccgccacctgcaccccctaacgggctctaccttgcccgaaaggctctgaagggccttttgaaagaagctgaaaaggaattgaaaaaggctcagcgtcagggagaattgatggggtgccttgccctgggcggagggggtgagcaccccgagatgcaccgagccggcccacccccattgcgcgcagctcctcttctgccacctggcgctcggggcctgcctccacccccaccgcctctgccccctcccctgccaccgagactccgggaagaggccgaggagcaagaatctacatgtcccatctgtctcggtgagatccagaacgctaagaccttggaaaagtgccgccattcattctgtgagggatgcataacgcgcgcactgcaggttaaaaaagcatgtcctatgtgtggtaggttttacggacaacttgtgggaaaccaaccacagaacggtcggatgcttgtatctaaagatgccacactattactgccatcatatgagaaatatggtactattgttatccagtacgtatttcccccaggcgtgcaaggcgccgagcatcccaatccaggagtccgctatcccggaaccactagggtggcttacctgcccgactgtcctgaggggaacaaggttctgaccctttttagaaaagcgtttgaccaaaggctgacgttcaccataggaacatccatgaccacaggaaggcccaatgtcataacgtggaacgatatccaccataaaacatcatgcaccgggggaccgcagttattcggctatcccgaccctacataccttacaagggtgcaagaagagctgcgcgcgaaaggcatcacagatgactag

SEQ ID NO: 185162 - DNA, 1044 bp, synthetic construct
  misc_feature 1..1044: note = Description of Artificial Sequence: Synthetic coding sequence
  source 1..1044: mol_type = other DNA
atgagcttcgtgctgagccggatggccgcctgcggcggcacctgcaagaacaaagtgactgtgagcaagcctgtgtgggacttcttatccaaggagacgcccgctcggctagcccgtctgcgggaggaacatcgggtcagtattctaatagatggagagactagtgacatatatgtattacagctctcacctcaggggcctccccctgctccgccaaatggcttgtatctggctcgtaaggccctgaagggactgctgaaggaggccgagaaagagctcaaaaaagcgcagagacagggagagctaatgggctgccttgctctgggaggagggggagaacaccccgagatgcatcgtgccggcccacccccacttcgggcagctcctttgttgccccctggcgcgaggggcctgcccccaccgccaccccctttaccacctcctctgcccccaagactccgggaggaggccgaggagcaggagtccacatgtcctatttgtttgggcgagatccaaaatgcaaaaactctcgaaaagtgccgccactcgttttgcgaaggatgcattactcgggccctgcaagtcaaaaaggcctgccctatgtgcggccgcttctatggccagctggtcgggaatcagccgcaaaacggacgcatgctggtgagcaaggatgcaactctcctcctgccatcctacgagaagtatgggacaatcgtcatccagtatgtgtttcctcccggtgtacagggcgcggaacatccaaatccgggggtcagataccccggcaccacccgagttgcttacctgcctgattgtcccgagggaaataaggtgttgacgctgttccgaaaggcgtttgaccagaggctcaccttcaccattgggaccagtatgaccaccggtagacccaacgtgatcacatggaacgacatacatcacaagacttcctgcactggaggcccgcagttgttcgggtacccagatcccacttacctcacccgcgtgcaggaggagctaagagccaaagggataacagacgattag

SEQ ID NO: 185163 - DNA, 615 bp, synthetic construct
  misc_feature 1..615: note = Description of Artificial Sequence: Synthetic coding sequence
  source 1..615: mol_type = other DNA
atgcccatcctgagcagcagcggcagcaagatggccgcctgcggcggcacctgtaaaaataaggtgactgtgtcaaagcccgtatgggattttttaagtaaggaaactcctgcccgtttggcacgattgcgggaggaacacagagtgagcatcctcatcgatggcgaaacttctgacatatacgtgttgcagcttagccctcaggggccgccgccagccccaccaaatgggttgtatttggccaggaaggcgttgaagggcctactaaaagaggccgagaaggagctgaagaaggcccaaaggcaaggagaactcatgggttgtctggcactgggtggggggggcgagcatccggagatgcaccgcgccggcccaccacctctcagagctgcaccactcttgccccctggagctcgcggccttcccccaccacccccaccgctccccccccctctgccccctaggctaagggaggaagcggaggaacaggaatcaacgtgtcccatctgtcttggggagattcaaaatgccaagacactggagaaatgccggcacagcttctgtgaaggctgcatcacccgcgcattgcaggtaaagaaggcgtgccccatgtag

SEQ ID NO: 185164 - DNA, 24 bp, synthetic construct
  misc_feature 1..24: note = Description of Artificial Sequence: Synthetic coding sequence
  source 1..24: mol_type = other DNA
atgcccatcctgagcagcagctag

SEQ ID NO: 185165 - DNA, 1053 bp, synthetic construct
  misc_feature 1..1053: note = Description of Artificial Sequence: Synthetic coding sequence
  source 1..1053: mol_type = other DNA
atgcccatcctgagcagcagcggcagcaagatggccgcctgcggcggtacatgtaagaataaggtgactgtatcaaagccagtatgggatttcttgtctaaagagactcctgcccggctcgccaggcttagggaagagcatcgggtgtcgatccttatcgatggcgaaactagcgacatctacgttttgcagctttctcctcagggacctcctcctgcgccacccaatgggctgtatctcgcacgcaaagctctcaaaggactcctgaaggaggctgaaaaggagctgaagaaagcacaaagacagggcgaactgatgggatgtctggctctggggggcggcggggaacatccagagatgcaccgggccggtcctccccctttacgcgctgctcctctgttgccgccaggcgcgcgcgggctacctccaccccccccacccctgccacctcccctcccaccaaggttgcgagaggaagccgaggaacaagagagcacttgccctatctgcttgggagaaatccagaatgcgaagacactagagaaatgtcgccattctttctgtgagggatgtatcactcgtgctctgcaggtcaagaaagcctgtccaatgtgtggtcggttttacggtcaactcgtcggcaaccaaccccagaacggcaggatgcttgtgagcaaagacgcgactcttctcctgccttcttacgaaaagtacgggactatcgttattcagtatgtatttccacctggggtgcagggagccgaacatccaaacccaggtgtgcgatatcctggaacgacacgggtggcttatctgccagactgtcccgagggcaacaaggtgcttacgctgttcagaaaggcttttgatcagcggctaacttttactattggaaccagtatgactaccggtaggcccaatgtgataacatggaacgatatccaccataagacgtcttgcactggcggacctcagctgtttggataccccgaccctacttaccttacgagagtgcaagaggaactgcgggccaaggggatcaccgatgactag

SEQ ID NO: 185166 - DNA, 150 bp, synthetic construct
  misc_feature 1..150: note = Description of Artificial Sequence: Synthetic coding sequence
  source 1..150: mol_type = other DNA
atgagcttcgtgctgagccggatggccgcctgcggcggcacctgcaaaaacaaggttacagttagtaagccagtctgggatttcctctcaaaagagacacccgcaaggctggctcgactgcgtgaggagcatcgagtctccattctgtag

SEQ ID NO: 185167 - DNA, 2136 bp, synthetic construct
  misc_feature 1..2136: note = Description of Artificial Sequence: Synthetic coding sequence
  source 1..2136: mol_type = other DNA
atgctggacggccccctgttcagcgagggccccgacagcccccgggaactccaagatgaggagagcggatcctgcctatgggttcagaagtccaagctcctcgtgatcgaggtcaaaaccatttcttgtcactattcccgaagagccccgagccggcagcccatggattttcaagcctctcattgggcacgaggatttcagaaccggacgtgtggacctagaccaggctctcctcagccgcctcctcgccgcccatgggcatcccgagtgctgcaggaagctaccaattggagagccggccccctggcagaagtaagggcacgcgagcaagagaagcgcaaagcggctagccaggagagagaggcaaaggagacggaacgcaaacgcaggaaggccggaggggcacgacgtagcccccccggtcggcctcgacctgaaccccggaacgcaccccgggttgcccagctcgccggcttacccgcccccttgagacctgagcgactggctcccgtgggccgagcacctcgaccgagtgcacaaccacagagtgaccctggaagcgcgtgggccggcccgtgggggggacggcgccctggccccccttcctacgaagctcacttgctgctccgcggtagcgccggcacagcaccacggcggagatgggacagaccccctccctacgtagcacctccttcgtacgaagggccccacaggactctaggaacgaaaaggggacctggcaattcacaggtgcctacctcctccgcccccgcagcgactccggcgagaaccgatggcggccgaacaaagaagcggctggatccaaggatatatcgtgatgtcctaggagcttggggcttgcggcagggccaggggcttctgggagggagtcccggctgcggagctgcgagggcgagaccagagccagggaaaggggtcgtggaaaagagcttaggcctcgccgccgctgacctcaacagtggatctgactcgcaccctcaggccaaagcgacgggctcagcaggcacagaaattgcccccgccgggtctgcaactgccgccccctgtgcaccgcaccccgcccctaggagccgccaccatctcaaaggttcaagagagggcaaagaaggcgaacaaatctggttccccaagtgttggattccctccccgaagaaacagccccctaggcactcccagaccctgcccaggccctgggctcctggaggaacgggctggagggaaagcctgggtcttggagaaggggccgggcccgagaccctcgagggctggaaggcaacacggcgcgctcacaccctgccgcgcagtagccagggcttgagccgcggtgagggcgtcttcgtcattgatgctacatgtgtcgtaataagaagtcagtatgtgccaacgccccgaactcagcaggtacagctgttgccatcaggggtgacacgagtggtcggagattctccatcacagtcaaagcccggcaaggaggaaggcgagggagcaacagtgttcccatcgccttgccagaaaaggttatccagctcacgactgctgcaccagcccgggggcgggcgtgggggcgaagccgaaggcggaaggcctggagactccaccctggaggaaaggaccttccggatcttaggtctccctgcccctgaggttaatctgcgggatgcgcctacccagcctgggtctccagagcatcaggctctgggacctgcggcctccggagcccagggacgcgctgagggatcggaggtagcagttgtgcagagacgcgccggaagaggctgggcccggactccgggaccctatgcaggagcactgcgggaggcggtctcccggatccggcgacatactgcgccggacagcgataccgatgaagccgaggagctttcagtccattcaggatcttcagacggcagcgacaccgaggcccccggcgcttcatggaggaacgagcggacattgcctgaggttggaaatagctccccagaggaagacggaaagaccgccgaacttagtgacagcgtgggggagatattggacgtgatcagccagacggaggaggtgttgtttggagttcgcgacattagaggtacacagcaggggaaccgaaagcgccagtag

SEQ ID NO: 185168 - DNA, 852 bp, synthetic construct
  misc_feature 1..852: note = Description of Artificial Sequence: Synthetic coding sequence
  source 1..852: mol_type = other DNA
atgggcatctggaccagcggcaccgacatcttcctgagcctgtgggagatatatgtttctcctcgaagccccggttggatggactttatacagcaccttggagtctgttgtctggttgccctcatcagcgtcggactgttgagtgttgcagcctgctggtttttgccttcaataattgctgcggcagcgagctggattattacctgcgtgctgctatgctgctccaagcatgccagatgtttcattctgttagtgttcctgagttgtggcttgagagaaggaaggaatgccctcatcgccgcggggactgggatcgtcatccttggccacgtcgaaaacatctttcacaatttcaaaggattgctcgacggcatgacctgcaacctaagagcaaaatccttctcaatccacttccctctgctgaagaaatacattgaagccattcagtggatatatggcctggccactccattgtctgtctttgatgatcttgtctcctggaaccagaccctcgctgtgagcctcttctcccctagccatgtgctcgaggcacaactgaatgacagcaaaggtgaggttctgagcgtgctgtatcagatggctacaacaacagaggtcctgtcttcactgggtcaaaagttactggccttcgccggattgtctctcgtactgctgggcacgggactgttcatgaaacgattccttggtccgtgtggatggaagtatgagaacatctatatcacgaggcagttcgtgcaattcgacgagagagagaggcatcagcagcgcccctgtgtactccctttgaacaaggaggagcggcgcaagtttatttctggttttcaatcttag

SEQ ID NO: 185169 - DNA, 1401 bp, synthetic construct
  misc_feature 1..1401: note = Description of Artificial Sequence: Synthetic coding sequence
  source 1..1401: mol_type = other DNA
atgctgaagtggcccatccccggccaggtggccctgttccagatcctccggtgtaggggcaactctaggaggacgaccgtgacgtccctaaccgtgagccaggttggccagaattttacatttgtccttacagatatcgacagtaaacagcgttttggtttctgtcggttgtcctccggggccaagtcatgcttttgcattctgagctacctcccctggtttgaggtcttctacaaacttctaaacatcctggccgactacaccaccaagagacaggaaaatcagtggaatgaactactagagacccttcataagctgccaatccccgaccctggggtctccgtgcatctttcggtacattcctattttactgtgccagatacacgtgaacttccctcaattccagagaacagaaaccttaccgaatacttcgtggcagtcgatgtgaacaacatgctccacctatatgcttcaatgctgtacgagcgaagaatcctgattatctgcagtaagctgtccacgctgacagcgtgcatacacggtagtgccgccatgttgtatccgatgtactggcaacatgtctatatccctgtgctcccgccacacctgcttgattattgttgcgcgcctatgccatatctaattggcatccatttatctctaatggagaaggtaaggaacatggcccttgacgatgttgtgatcctaaatgtcgatacaaacacattggagacccccttcgatgatctgcagtctttacctaatgacgtgatcagtagtctgaagaataggctcaaaaaagtatcgaccactacaggtgatggagtggcccgagctttcctcaaagcacaggctgcctttttcggctcttaccgcaatgctctgaagatagaacctgaggagcccatcactttctgtgaagaggcatttgttagtcactatcggtccggcgcgatgagacagttcttgcagaacgcaacacagctccaactgttcaagcagttcatagatggccgtctggacttgctcaatagcggcgagggcttttcagacgtgtttgaggaggagataaatatgggtgaatacgccggaagcgacaaactgtatcatcagtggctctctacggtccgcaagggcagcggagctatccttaacactgtgaagactaaggccaatcccgccatgaagacagtgtataagttcgccaaagaccatgcaaagatgggtattaaagaagtgaagaacagactcaagcaaaaggacattgcagagaatgggtgtgcacctacccctgaggaacaattacccaaaacagcaccgagcccacttgtcgaggccaaggatccaaagctgcgagaggaccgcagaccaatcacagtgcactttggccaagcgctgtag

SEQ ID NO: 185170 - DNA, 1680 bp, synthetic construct
  misc_feature 1..1680: note = Description of Artificial Sequence: Synthetic coding sequence
  source 1..1680: mol_type = other DNA
atgggcagccggatcaagcagaaccccgagaccaccttcgaggtgtacgttgaggtggcctatccccgaaccgggggaactctatccgaccccgaggtccagcgccagtttcccgaagactacagcgaccaggaggtgcttcagacactgaccaaattctgcttccccttttacgttgatagtcttaccgtgtcccaggtgggacaaaacttcacttttgtcctcacagacatcgactccaagcaacgcttcgggttctgtcgactgagtagtggtgccaagagttgcttttgtatactcagctacttgccttggttcgaggttttttataaacttttaaacatactcgccgactatactactaagagacaggaaaatcagtggaacgaactgctggaaactctccacaaactccctattcccgatcccggtgtgtcagtgcatctcagcgttcattcttactttacagtgcctgatactagggaactgccaagcatcccagagaaccgtaatcttacagaatacttcgttgctgtcgacgttaataacatgctgcacttgtacgcatcgatgctatacgagaggaggattctgatcatttgcagcaagctgtccaccctcaccgcgtgcattcacggctcagccgccatgctttatcccatgtactggcagcacgtgtacatccccgtgctgccaccccacttactggactattgctgtgcccccatgccttacctgataggcatccacttaagcttgatggagaaggtgcgtaacatggccttagacgacgttgtgattttgaatgtcgacactaatacccttgagaccccctttgacgacctccagagtctccctaatgacgtgatctccagcctcaagaaccggctgaagaaggtgtctaccactactggagatggagttgcccgcgcttttctgaaggctcaagcagcatttttcggatcgtatcgtaacgctctcaagatcgagcctgaagagccgatcacattttgtgaggaagcattcgtctctcactacagatctggtgcaatgaggcaatttctgcagaatgccactcagctgcagctcttcaaacagttcattgatggccgcctcgatctgctcaactcgggcgaggggtttagtgatgtgtttgaggaagaaatcaacatgggagagtatgccggctccgacaaattgtaccaccaatggctgagcactgtccggaaagggagcggtgccatcttgaataccgttaagacgaaagccaacccagccatgaagaccgtctacaaattcgccaaggaccacgctaagatggggataaaagaagtgaagaacagattgaagcagaaagacatagcggagaatggatgcgccccgaccccagaggagcagctgcccaagacagccccctccccgctggtcgaagctaaagacccaaagctgagggaagaccgcaggcccattaccgtacatttcggacaagtccgccctccacggccccacgttgtgaagagacccaaaagtaatattgcagtggagggacgtcgcacctccgtcccgtcaccagaacaaaataccattgcaacccctgcgaccctgcatatcctgcaaaagagcatcactcacttcgcagctaaatttcccaccagaggctggacctctagcagccactag

SEQ ID NO: 185171 - DNA, 3030 bp, synthetic construct
  misc_feature 1..3030: note = Description of Artificial Sequence: Synthetic coding sequence
  source 1..3030: mol_type = other DNA
atgggcagccggatcaagcagaaccccgagaccaccttcgaggtgtacgtcgaggtcgcttatccgcgcacaggaggaaccttgagcgaccccgaagttcagcggcagttccctgaggactatagtgaccaagaggtgctgcagactttgaccaagttctgctttcccttctacgttgactcgctcactgtcagccaggttggccagaatttcacgttcgtactcaccgatatcgactccaagcagcgtttcgggttttgtagactgagctcgggggcaaagagctgtttctgtattctctcatatttgccctggtttgaagttttctataagctgctgaatattctggctgattacacaacaaagcggcaggaaaaccagtggaacgagttgcttgagacgctgcacaaactgcctatccctgatccgggcgtctccgtgcatttgtccgtccactcctactttactgtccccgacacccgggaacttccgtcaatcccggagaacagaaacttgacggagtacttcgtcgcggtggacgtcaacaatatgctgcacctgtacgctagtatgctctacgaaagaagaatcttaattatctgctctaagctgtccacactcactgcctgtattcacggcagtgccgctatgctgtatcctatgtattggcaacatgtatacattcccgttttacctccccatctccttgattattgctgcgctcccatgccttatcttattggtatccacttgagtctgatggagaaagtgcgtaacatggcactggatgatgtcgtaatcctgaacgtagacacgaataccctggagacacctttcgacgacctgcaaagcctgccaaatgatgtaatatcctccctaaaaaacaggctgaaaaaggtgtctacaacaacaggcgatggcgtcgcgcgggcattcctgaaggcacaggcagcatttttcggctcatatcgaaatgccctcaaaattgaacccgaggaaccaataaccttttgcgaggaagctttcgtttcccactataggtcaggtgcaatgcggcagttcctgcagaacgctacccagctccagctttttaagcaattcattgacgggcgtctggatctgctgaacagcggagaaggcttctccgacgtattcgaagaggaaataaatatgggagagtacgctggctccgacaaactgtaccatcagtggctgtcgacggttcgcaaaggtagtggtgccattctcaacacggttaaaactaaggccaacccggccatgaaaaccgtatataaattcgcaaaggaccacgctaagatgggtatcaaggaagttaaaaacaggttgaagcaaaaggacatcgccgaaaatggctgcgctccgaccccggaggaacagctgccaaagactgcaccttctcccctcgtagaggccaaagacccgaagcttcgcgaagatcggagacctattaccgtccacttcgggcaggtgcggccacccagaccccatgttgtgaagagacccaaaagcaatatcgcagttgagggccgccggacgtctgtgccatctcccgagcaaccccagccatatcggaccctgcgagagtccgacagcgcagaaggcgatgaagccgagagcccagaacagcaggttcgaaaatcaacgggtccagtccctgcgccaccggatagagcggcttctatcgacctgctggaagatgtgttctccaatctggacatggaggccgccttgcagccactgggccaggccaagtcattagaagacctgcgggccccaaaggacctgcgtgagcagccaggaacgtttgactaccaacggctcgatctcggcggcagtgagcgatcgagaggggtgacagtcgccctgaagctgacccacccatataacaagctctggtcattaggacaggacgacatggccatccccagtaagccccctgccgcttctccggagaaacctagcgctctcctggggaactccctggcgctgccaaggcgcccccagaatcgtgattctattctcaatccctccgataaggaagaggtgcctactccaaccttagggagcatcactataccgagaccccagggccgaaagaccccagagctgggcattgtacctcctccaccaattccgaggcctgccaaactgcaggcggcaggcgcagctcttggagatgtctctgaaagacttcaaactgacagggaccgcagggccgccctgtcccccggtctactgcccggggtggttccacagggcccaactgagttgctgcagcccctctcccctggccctggcgcggccggcacatcatccgacgccctgttagccctcctggatccactgagcacggcctggagcggctcaaccctcccatctaggccggcgacccccaatgtggcaactccattcactcctcagttcagcttcccccctgctggcacgccaaccccattccctcagcctcccctcaacccctttgttccctccatgcccgccgctcccccaacactgccactggtcagcactcctgcaggtcctttcggggccccacccgcttctctcgggcccgcattcgcgagcgggttactgctttcctccgctggattctgcgctccccaccgtagtcaacctaatctttccgcattatcgatgcccaacctgtttgggcaaatgcctatgggcacacatacaagtccactacaacccctgggcccccctgcagtggctccttcgcgaattcgcaccctccctttggcccggagtagcgctcgggccgccgaaactaagcagggactggccctgcggccaggagatcccccacttctaccaccacggccccctcaaggcttggagccaacattgcagccctccgccccccagcaggcgagagaccccttcgaggatcttctgcagaaaaccaagcaggatgtctccccatcccctgcacttgccccagcccctgacagtgttgagcaacttcgcaaacagtgggaaacatttgaatag

SEQ ID NO: 185172 - DNA, 1590 bp, synthetic construct
  misc_feature 1..1590: note = Description of Artificial Sequence: Synthetic coding sequence
  source 1..1590: mol_type = other DNA
atgctgaagtggcccatccccggccaggtggccctgttccaggaggtgctccagaccctgactaaattctgctttcctttttacgttgatagtctgacagtgtcacaggttggacagaatttcacctttgtcttgacggacatcgattcaaagcagcggttcggcttctgtcggctgtcctccggcgctaagtcatgcttctgtatcctgagctatttgccttggtttgaggtgttttacaagttgctgaatatcttggctgactataccaccaagagacaagagaaccagtggaacgagctcctggagacccttcataaactgccaattcccgatccaggggtgtccgtccacctttcagtgcactcctactttacagtgcctgacacaagagagttgcctagcattcccgagaatcggaatctgacagagtactttgtcgccgttgacgtcaataatatgctgcacttatacgccagcatgctgtatgagaggcggattttaattatctgtagtaagttgtcaaccctgacagcttgtatccacgggtctgcagctatgctctacccaatgtattggcagcatgtgtacatccctgtcctgcctcctcacttactcgattattgctgtgctccaatgccatacctgatcggtatccacttgagcctgatggagaaagtgcggaacatggccctggatgatgtagtgatcctcaacgtggacaccaataccctagagaccccgttcgatgaccttcagtcccttccgaatgatgtgatctccagtctcaagaacagactgaagaaagtcagtacgactactggagatggagtggcccgggccttcctcaaagcacaagcggccttcttcgggagttatcggaacgctctcaagattgaaccagaagagcccattactttctgcgaggaggctttcgtatcgcactaccggagtggtgccatgaggcagtttcttcagaatgccacccaactgcagctcttcaagcaatttattgatggacggttggacctgctaaacagcggggaaggattctcagacgtgttcgaggaagagatcaatatgggagaatatgctgggagcgacaagttgtatcaccagtggctgtcaaccgtgagaaagggcagtggagctatcttaaatacggttaagacaaaagccaatcccgcaatgaagactgtttataagttcgcaaaagaccacgcaaagatggggataaaggaggtgaagaacaggttaaagcaaaaggacatcgccgagaatggctgcgcacccacaccagaagaacagcttcctaaaacagccccgtcaccactggttgaagctaaagaccccaagctccgagaagatcgccgtcccataaccgtgcacttcggccaggtccggcccccaagacctcacgtcgttaaaaggccgaagtcaaatatcgccgtcgagggccgacgtacgtctgtgccgagtccggaacagaataccattgcaactcctgctaccctgcacatattacaaaagtccattacgcactttgccgcaaagtttcccactagaggctggacctcgtcgagccattag

SEQ ID NO: 185173 - DNA, 3063 bp, synthetic construct
  misc_feature 1..3063: note = Description of Artificial Sequence: Synthetic coding sequence
  source 1..3063: mol_type = other DNA
atgcggcggcccggcgaccacggcctgcaggaccaggaggtgctgcagactctgactaagttctgcttccctttctatgtggacagtcttacagtctcccaggttggtcaaaactttacctttgtactgactgatatcgactcaaagcagcgtttcggcttttgccgactgagcagtggcgccaaatcgtgcttttgtattctcagctacctcccctggtttgaagtattctataaattgctgaacatcctggcagattatacaacaaaaaggcaagaaaatcagtggaatgagctgctggagacccttcacaagttgccaattcccgatcctggagtttctgttcatttgagcgtgcacagctactttaccgtgccagatacaagggagctgccttcaatccccgagaaccgcaatttaactgagtatttcgtagcagtcgatgtgaataatatgctccacctctacgccagcatgctttatgagaggaggatcctgatcatctgttcaaagctgtccaccctcactgcgtgcatacacggatcagctgctatgttgtacccaatgtactggcagcatgtatacatccccgtattgcctccccatttactggattattgctgtgcgcccatgccttatttaataggaattcacctctcactgatggaaaaggtacggaacatggccctggacgacgtcgtgattcttaacgtcgacactaatacactggaaactccattcgatgacctacagagcttacccaatgacgtgatatcttctctcaagaacagactcaaaaaggtgtcaactactactggggatggtgttgcaagggcttttctcaaggcccaagccgctttttttggcagctatcgaaacgctttgaaaattgagccagaggagcctataacattctgtgaagaggcgttcgtatctcactataggtcaggggctatgaggcagttcttgcagaatgctacacagctgcagctgtttaagcagtttattgacgggcgcttggacctactgaattctggcgaaggattcagtgatgtgttcgaggaggaaatcaatatgggtgagtacgccggctcggacaaattataccaccagtggctgagcaccgtgcgcaaggggtctggcgctattttaaacacagttaaaacaaaagccaaccccgccatgaagacagtttacaagttcgccaaggatcatgcaaaaatgggcattaaggaggttaaaaatcggctgaaacagaaagacatcgcagagaacgggtgtgcaccaactcctgaagagcaactacccaagaccgcaccatcccctctggtggaggctaaggaccccaaactcagggaggatagaaggccaatcacagtccatttcggccaggtccgaccgccgaggccccatgtcgtgaaacgtcctaaatcgaatattgcagttgaaggtcggaggacttcggtgccttcccctgagcacctcgttaaaccgttgcgtcactatgccgtttttcttagtgaagacagtagtgacgacgaatgccaacgggaggagggcccttcttccggctttacagaaagtttcttcttcagtgcacctttcgagtggcctcagccatataggacccttcgagagtctgactcagccgagggcgatgaggccgaatcccccgagcagcaagtacgaaaatcaacgggccccgttccggcccctcctgatagagctgcgagcatagatctattggaggacgttttcagcaacttggatatggaggcagcactgcaaccattagggcaggctaaaagcttagaagacctcagagccccaaaagacctgcgcgagcaaccaggaacgttcgattaccagcgcctcgatcttgggggaagcgaaaggagtaggggcgtgaccgtcgccctcaagctgacacatccttacaataaactatggtccttgggacaggacgacatggccatccccagtaaacctcccgctgcatcccctgaaaaaccttctgccttacttggcaactccctggctctgccccggcgccctcagaacagggattccattttaaatcccagtgacaaagaagaagtccctacacctactctcggctctatcacaattccaaggcctcagggccggaaaactcccgagctgggaatcgtgccacctcctcctattcccagaccggccaagcttcaggctgccggcgccgctctcggagacgttagcgaaaggctccagacagatcgcgacaggcgcgctgccctgagtcctggactgttacccggggttgttcctcaggggcccacggagctgctgcagcccttatctccaggccctggcgctgcagggacctcatctgacgctttgttagctctgctagatcccttgtccacggcttggtctgggtccaccctgccctcgcgcccagcgacacccaacgtcgcgacccctttcactccccagttttccttcccacctgcaggaacacctaccccgttccctcaacctcccttgaacccttttgtgccaagcatgcctgctgccccccccacactgccactcgtgtccactcccgccggcccattcggtgctcctccagcatctctgggaccagccttcgcatccgggttactgctgagttctgctgggttctgcgcacctcatcgcagtcagcccaacctgtccgccttgagtatgcctaacctgttcggacagatgccaatgggaacgcacacctcaccactgcagccattaggaccaccagccgttgcaccgtccaggatccgaacattgccactcgctcgcagcagtgcacgggccgccgagacaaaacagggcttggccttgaggccaggggatccgcctcttctgcccccacgcccgcctcagggattggagcccactctacaaccaagtgccccgcaacaagcccgggaccctttcgaggatttattgcagaagacaaagcaggacgtcagtccctcgccagcgctcgcacctgcccctgattcagtcgagcagctgaggaaacagtgggaaactttcgaatag

SEQ ID NO: 185174 - DNA, 2385 bp, synthetic construct
  misc_feature 1..2385: note = Description of Artificial Sequence: Synthetic coding sequence
  source 1..2385: mol_type = other DNA
atgctgtaccccatgtactggcagcacgtgtacatccccgtgctgcctcctcatttgctggactattgttgtgcgccaatgccatacttgattggcatacacctcagtcttatggaaaaagtccggaacatggccttagatgatgttgtcatactgaacgtggatacgaacactctcgagaccccgtttgacgacctccagagcctccctaacgacgtagaggagcctattaccttttgtgaggaggccttcgttagccattaccgctctggcgctatgcgccagttcctgcagaacgccacccagctgcagttgtttaagcaattcattgatggcagattagacctgcttaactcaggggagggcttctcagatgtctttgaagaggagattaatatgggcgaatacgcagggtcggacaagctctatcatcagtggctaagtactgttagaaaggggtccggcgctattctcaatacagtgaaaacgaaggccaaccctgctatgaagactgtctacaagtttgccaaggatcacgccaaaatgggcatcaaggaagtgaagaacagattaaagcagaaagatattgccgagaatggctgcgccccaacaccagaggaacagctcccaaaaaccgccccctctcccctcgtggaggccaaggatccaaagctgagggaggacaggcgcccgataacagtccacttcggtcaagtgcgaccccctcgtccccacgtggtgaaaagaccaaaaagcaatatcgccgtagagggccggagaacgtctgtcccctccccggagcatttggtgaaacctttacggcattacgctgtgtttctgagtgaagactcttctgatgacgagtgtcagcgagaggagggccctagtagtggttttactgaatcgttcttctttagcgcgccctttgagtggcctcagccatatcgcacgttgcgggagtctgactccgccgagggagacgaggctgagagccccgagcagcaagtgaggaaatcaacgggccctgttccggccccccccgaccgggccgcaagtatagatcttcttgaagatgtgttctctaatctggacatggaagcagcccttcagcctctgggccaagcaaaatctctggaagaccttcgcgccccaaaagatttaagagaacaacctgggacattcgactaccaacgactggatctcgggggctccgagagatccaggggcgtgactgtcgctttaaagcttactcatccgtataacaagctctggtccctgggacaggacgacatggccataccttcaaaaccccccgcagcctctcctgaaaagccaagcgctttgctgggcaactctctggcccttccgagaaggccacaaaacagggatagtattctcaacccatctgataaagaggaggtccccactccaaccttgggaagcattaccatccctcgcccgcaaggccggaagacacctgagctagggattgtgccgccaccccctataccgcgacccgcgaagctccaggcagccggggctgcgctcggcgacgtctcagagagactacaaactgatcgcgatcgacgcgctgctctctcccccggcttactgcctggagtggttcctcaggggcccactgaactgctgcaaccgctgtctcctggcccaggggccgccggcaccagcagtgacgcgctgctggccctcctcgatccgctcagtacagcatggtcaggctcaactctgccctctcgtccggccaccccaaatgtcgcaacgccattcaccccacaatttagcttccctcccgccggaacaccgaccccatttcctcagccaccgctaaatccgttcgtgccaagcatgccagcggctccaccaacattgccactggtctctaccccggctggacccttcggggccccgcccgccagtctaggtccagccttcgcatcagggctgttgttatcaagtgcgggtttttgtgccccccatagaagtcaaccaaacctttccgctctgtctatgccaaatctgtttggacagatgcccatgggcacccacaccagtcccttgcagcctctcggtccccccgcagttgctcccagtcgtattagaactctccctttggcgcgatcgtccgccagggctgctgagactaaacagggcctggccctgaggccaggcgatccaccgctgttaccgccccgaccaccgcagggactggagcccactctccaacctagcgctccccagcaggccagggaccctttcgaggacctgttacaaaagaccaaacaggacgtctccccatccccagccctggcaccagcaccggactctgttgagcagctaagaaagcagtgggagactttcgagtag

SEQ ID NO: 185175 - DNA, 1191 bp, synthetic construct
  misc_feature 1..1191: note = Description of Artificial Sequence: Synthetic coding sequence
  source 1..1191: mol_type = other DNA
atggccgccgccccccgggaggagaagcggtggccccagcccgtgttctccaaccccgtggtgttgtggaaattcccagaggacttcggcgaccaagagattctccaaagcgtgccaaagttttgcttcccgttcgacgtcgaacgagtgagtcagaaccaggtcggccagcactttacgttcgtgctgactgatatagagagcaagcagcgctttgggttctgccggctgacatcaggaggcacaatctgtttgtgtattctgtcatatttgccttggtttgaggtctattataagctccttaacacactcgccgattaccttgcaaaagagctggagaacgatctcaacgagaccttgcgttccctctacaatcatcctgtgccaaaagccaatacacctgtgaacctttctgtgcattcctattttatcgcgccggatgtaactggcctgcctaccatccctgagtcacggaatttgactgaatactttgttgcagtagacgttaataacatgctgcagttatacgcctccatgcttcacgaaagaaggatagttatcatcagctctaaattgtccacattgaccgcttgcattcacggctctgcagcgctgctgtaccctatgtattggcagcatatttacatccctgttctgcccccccatttgttggattactgttgcgcacctatgccttatctcattggaatccactcatcgctaatcgaacgagtcaaaaacaagagcctggaggatgtcgtgatgctcaatgtagacacaaacaccctggaatctcctttttccgatctaaataatctaccgagcgacgtcgtgtccgccctgaagaataaattaaaaaagcaaagtaccgcaaccggagatggggtggcccgggcttttctgcgagcacaggccgcgctttttggaagctaccgtgacgccttaagatataaacccggcgagccaatcactttttgtgaagagtcttttgttaagcatagaagcagtgttatgaaacagttcctagagacggcaattaaccttcagctgtttaagcagttcatcgacgggagactggctaagctgaatgctgggcgggggtttagcgatgtcttcgaagaggaaatcaccagcggtggcttttgcggggggaaagacaagctccaatatgactatcctttctctcagtag

SEQ ID NO: 185176 - DNA, 1281 bp, synthetic construct
  misc_feature 1..1281: note = Description of Artificial Sequence: Synthetic coding sequence
  source 1..1281: mol_type = other DNA
atggactgccggaccaaggccaaccccgaccggaccttcgacctggtgttaaaagtcaaatgccacgcttccgagaacgaggacccggtggtgctgtggaagtttccagaagatttcggcgaccaggagattctgcagtcggtccccaaattttgcttccccttcgatgttgagcgcgttagccaaaatcaggtggggcagcatttcaccttcgttcttactgatatcgagagtaagcagcggttcggtttctgtcgattgacatccggcgggactatctgcctttgcatcttgtcatatttgccttggttcgaggtttactataagctcttaaacacgttggcagattatctagcaaaggagctggagaacgatttgaatgagacacttcgcagtctgtataatcatcccgtgcctaaggctaacacgcccgttaatctgagcgtgaatcaagagatatttatagcctgtgagcaggtgctgaaggatcagccagccctagtcccccatagttatttcattgcacctgacgtgacaggactgccaacgatcccagaaagtcgcaatctcactgagtatttcgtagcagttgacgtcaataatatgctgcagttgtacgcgtcaatgctgcatgagcgaagaattgtaattatttcatctaagctgtccacacttacagcgtgtatccatggttcagccgctctgctgtatccaatgtattggcagcacatttacattccagttcttcccccccacttgcttgattattgctgtgcccctatgccctacctgatcgggattcacagcagcctcatagagcgcgtaaagaataagtctctagaggacgtggtgatgcttaacgtggacaccaacacgctcgaatctcccttctcagacctgaataatctgccttcagacgttgtgtctgccctgaaaaacaagctgaaaaagcagtctacagccactggcgacggagtggcgagggctttcctgagggcccaagcagccctattcggatcttaccgcgatgctttaaggtataagcccggcgagcctataacattctgtgaggaatcattcgtgaagcaccgcagctctgtcatgaaacaatttctggaaaccgccataaatctgcagctgtttaaacaatttattgacggtcgcctggccaagctcaacgctgggcgcggcttctccgatgtgtttgaggaggagatcacctctggaggattctgcggaggaaaggataaactgcagtacgactatcctttttcacagtag

SEQ ID NO: 185177 - DNA, 1191 bp, synthetic construct
  misc_feature 1..1191: note = Description of Artificial Sequence: Synthetic coding sequence
  source 1..1191: mol_type = other DNA
atggccgccgccccccgggaggagaagcggtggccccagcccgtgttttcaaatccagtcgtgctgtggaagtttccagaggactttggtgaccaagagatactgcaatctgtaccaaaattctgcttcccctttgacgtggagagagtgagccaaaatcaggttggacagcattttaccttcgttctgactgacattgagtctaaacagcggtttgggttctgtcgtcttacatctggcgggaccatctgcttatgcatcctctcataccttccttggtttgaggtttactacaagctccttaataccctagcggattatctcgccaaggaacttgagaatgacctcaacgagactttaaggtctctgtacaatcaccccgttccgaaagctaacacaccagtcaatctttcagtccatagttatttcatagcccctgatgttaccggacttccaaccattcctgaaagtcgaaacctgacggaatattttgttgccgtagatgtgaacaacatgttacagctgtatgcttcaatgttgcacgagcggcgtattgtgatcatttccagcaaactatctactttaacagcatgtatccatggtagcgctgcgctcctctatcctatgtactggcaacatatttacatccccgtactgccacctcacttgctcgactattgctgtgcgcccatgccatacctcatcggtattcactccagtctgattgagagggtgaaaaacaagtcactagaggacgtcgtgatgctgaatgtggacactaacacattggagtctccattcagcgacctcaataacttaccgagcgacgttgtaagtgccctcaagaataagctgaaaaaacagtccactgctaccggagacggtgttgcccgagcctttctgcgagcacaagcggctctattcggcagttaccgggacgccctccgatacaaacctggcgagcccatcacattttgtgaagagtcctttgtgaagcaccgaagctctgttatgaagcagtttctggagacagccataaatctgcagctctttaaacagtttattgacgggaggcttgctaagttaaatgcagggcgggggttttcggatgtctttgaggaggaaatcacaagcggaggcttctgtggcggaaaggacaagcttcagtacgactaccccttcagccagtag

SEQ ID NO: 185178 - DNA, 2268 bp, synthetic construct
  misc_feature 1..2268: note = Description of Artificial Sequence: Synthetic coding sequence
  source 1..2268: mol_type = other DNA
atcgagaccaagacccgggccaaccccgaccggaccttcgacctggtgttaaaggtgaagtgccacgcttctgaaaatgaagaccccgtggtgctctggaagttccctgaggacttcggtgatcaggaaatactgcagagtgtcccaaaattttgtttcccatttgatgtcgaacgcgtgtctcagaatcaggtcggtcagcactttacgttcgtactcacagacatcgaatctaaacaacgatttgggttttgccgcttaacatcgggcggtactatctgtctgtgcattctgagctatcttccttggtttgaggtgtattacaagctgctgaacaccctggcggactacctggcaaaagagttggagaatgatctaaatgaaactctgcgctcgttatataaccatccagttcccaaggctaacaccccggttaatctgagcgtccactcttatttcatcgctccagatgtgacgggtctgccgacaatacctgagagccgtaacttgactgagtattttgtagccgtcgatgtgaataatatgttgcagctgtacgcctcgatgctacatgaacggagaatcgtaatcatttcctcaaagcttagtactcttacggcctgtatccacggatcagctgcccttctttaccctatgtactggcagcatatctatattcccgttctgcctccccatctgctagactactgctgcgccccaatgccttacctgatcggcattcattcatcactgatcgagagggtgaagaacaagagcttggaggacgtagtcatgctgaatgtcgatactaataccctcgaatcacccttttctgacctcaataatttgccgtcagatgtcgtttccgcccttaagaataagctgaaaaaacagtcaacagctacaggcgatggcgttgccagagcattcctgagagctcaggccgccctctttggaagttatcgggatgcgttgcgttataagccaggcgaacctattaccttctgcgaggagtcgttcgtgaagcacagaagctctgttatgaagcaattcctggagaccgccatcaacttgcagctgtttaagcagtttattgatggccgcctggcaaagttaaatgcaggaagagggttctccgacgtctttgaggaagagataacttccggcggcttctgtgggggtaaccctcgaagttatcaacaatgggtccatactgtgaagaagggcggggctctgtttaacaccgccatgactaaagctactcctgcagtccggactgcttacaaatttgccaaaaatcatgctaagctgggtttgaaggaagtgaagtcgaagctgaaacacaaagagaacgaggaagactacgggacttgctcgtcttcagtccagtacactcctgtatacaagctgcacaatgagaaagggggcaactccgagaagcggaaattggcccaggcacgtctgaagcggccactcaaaagtctggacggcgctctatacgacgacgaagacgacgacgatatcgagagggcgtctaagctttcttcagaggacggggaagaggcaagcgcttacctctacgagagtgatgattctgttgagactcgtgtaaaaactccttatagtggcgaaatggacctcctcggcgagatcctcgacacactttctactcattccagcgaccaaggcaaattggcggccgctaagtcactggatttttttcgctctatggatgacattgactataagccaaccaataagagcaatgctccaagcgagaataacctggcatttctgtgtgggggctctggagaccaggccgaatggaaccttggacaggacgattctgccctgcacggaaaacacctgcccccctccccgaggaaacgcgttagctcttctggcttaacagattcgttgtttatcctgaaggaagagaactccaacaaacacctgggcgccgacaacgtttctgacccaacctctggtctcgacttccagctgacctctcccgaggtgtcacaaaccgacaaaggtaaaactgaaaagagggaaaccctgtcccaaatctctgacgacttgctcatccctgggttgggtcgtcactccagtacctttgtcccctgggagaaggaaggaaaagaagctaaggagacttccgaggatattggcctactccacgaggtagtgagcttgtgccacatgacaagcgatttccaacagagcttaaacatatccgacaaaaataccaacggcaatcagacatag

SEQ ID NO: 185179 - DNA, 2328 bp, synthetic construct
  misc_feature 1..2328: note = Description of Artificial Sequence: Synthetic coding sequence
  source 1..2328: mol_type = other DNA
atcgagaccaagacccgggccaaccccgaccggaccttcgacctggtactgaaggttaagtgtcacgcctcggaaaatgaagatcctgttgtgctctggaagttccccgaggacttcggagatcaggaaatactccagtcagtgccaaagttctgttttccctttgacgttgaaagagtctctcagaaccaggtagggcaacacttcacctttgtgctgactgacattgagtccaagcagaggttcggcttttgcagactgaccagcgggggcaccatctgcctgtgcatcctctcttatcttccgtggtttgaggtgtactataagttgctgaacacgttggccgattatttggccaaagaactcgagaacgatctcaatgaaacactgcggtcactatacaaccaccccgtgcccaaggctaatacacccgtcaatttgtcagtaaaccaagaaatctttattgcctgcgagcaggtgcttaaagatcagccagctctggttccacattcgtattttattgctcccgacgtgaccgggctccccacaatcccggaaagccgaaatctgactgagtatttcgtggccgtggacgtgaataatatgctgcagctgtacgcgagcatgctgcacgagcgacgcatcgttataatctccagcaaactgagtacactgacagcttgcatccatggctcagctgctttactttatcccatgtattggcagcacatctacatccctgtgctgcctcctcaccttctagattattgctgcgcaccaatgccatatctgatcggcatacactcaagcctgatagaaagagtgaaaaacaaatctctggaggacgtggtcatgttgaacgtcgatactaacacccttgaatcacctttctctgatctcaacaatttgccctccgacgtggtctccgccttgaagaacaaactcaagaagcaaagcaccgccacgggcgatggggttgctagggctttcttgcgcgctcaagcagccctatttggctcgtaccgtgatgccctccgttacaaaccgggagagcctattacgttctgtgaggagtcattcgttaaacaccgttcatccgtcatgaagcaattcttggaaaccgccattaacttgcagctcttcaagcagttcattgatggtcgactcgccaaactcaacgccggcagagggttttctgacgttttcgaggaagaaatcacaagcgggggattctgcggtgggaacccccgatcttaccagcaatgggtgcacacggtcaaaaaagggggggccctgttcaataccgccatgacaaaagcaactcccgctgtgcggaccgcttataaatttgccaaaaatcatgccaaactgggattgaaggaagtgaaatccaaattgaagcacaaggaaaatgaggaggactacggaacctgctcaagctcagtgcagtacacaccggtgtataaactccataacgagaaagggggaaattcagaaaagcgtaagctggcccaggctcgcctgaagaggcccctcaaatctttggacggcgcactctacgatgatgaagatgacgatgatatcgagcgcgctagcaaactgtcgagcgaggacggagaagaggcatccgcgtatctgtatgagagtgatgattcggttgaaaccagagtgaaaacaccttacagcggggagatggatcttctgggcgagatcctcgacaccctgtctacccactcctcagatcaaggtaagctggccgcagctaagagcctcgatttctttaggtccatggacgatatagactacaagccaaccaacaagtcaaatgccccgtctgaaaataacctggcctttctgtgtggtggctccggtgatcaagccgagtggaatctgggacaggacgatagtgcgctgcatggtaaacacctaccaccttcaccaaggaagcgggtctcgtccagtgggctcactgactctttatttattttaaaggaagaaaattccaataagcaccttggtgctgacaacgtgtcagaccccacgagtggcttggactttcaactgacgtcgcccgaggtctcccagacagacaaaggcaagaccgagaaacgcgaaacattgagtcaaatctctgacgacctgttgatccccggattagggcgccacagtagcaccttcgttccgtgggagaaagaagggaaggaagccaaagagaccagcgaagacataggcctgctgcacgaggtagtgtccctatgccacatgactagcgactttcagcagtctctcaatattagcgacaaaaatacaaatggcaatcagacgtag

SEQ ID NO: 185180 - DNA, 1248 bp, synthetic construct
  misc_feature 1..1248: note = Description of Artificial Sequence: Synthetic coding sequence
  source 1..1248: mol_type = other DNA
gtgaagcaccggagcagcgtgatgaagcagttcctggagaccgccattaatctccagctgtttaagcagttcatagacggaagattggctaaactgaacgctggacgtgggttctctgacgtgttcgaggaggagatcaccagtgggggcttttgtgggggcaatccaaggtcttatcaacaatgggttcacacagtgaagaaaggcggtgccctttttaataccgctatgacgaaggccactcctgcagtcagaactgcctacaagtttgccaagaatcatgccaaactgggcctaaaggaagtgaagtccaagctcaagcacaaggagaatgaagaagattacgggacctgttctagctcagtgcagtacactccggtgtataagctccacaacgaaaagggagggaatagcgagaagcgaaaattagctcaggctaggctgaagagaccactgaaatctctggacggggccctttatgacgatgaggatgacgatgacatcgaaagggctagtaaactgtcttccgaggatggtgaggaggcctcagcctatctatacgagagtgatgactctgtggagactagggtaaaaaccccgtactccggggaaatggatctcctcggcgagatcctggatacattgtctacacactcaagcgaccagggaaaacttgctgcggccaagtcactcgatttttttcgaagcatggatgacatcgactacaagcctacaaacaaatcaaatgctccttctgagaacaatctggctttcctgtgcggcggctcaggagatcaagcagagtggaatttggggcaggatgatagcgcgctccatggcaaacatttgcctcctagccccagaaaacgcgtgagctcttccggcctgacagactcactttttatcctgaaagaagaaaattcaaacaagcatttaggcgctgacaacgtaagcgatccaacttcaggccttgacttccagttaacatcccccgaggtgtctcaaactgacaagggtaaaaccgaaaagcgggaaactttatctcagatatctgacgatttacttatccctggacttggaagacattcgtctacatttgtcccatgggaaaaagagggcaaggaggcaaaagagacgagcgaagatatcgggctcctccatgaggtggtttctctctgtcatatgacatctgatttccaacagtctctgaatatctcagataagaataccaatgggaatcagacatag

SEQ ID NO: 185181 - DNA, 2406 bp, synthetic construct
  misc_feature 1..2406: note = Description of Artificial Sequence: Synthetic coding sequence
  source 1..2406: mol_type = other DNA
atggagagccgggccgagggcggcagccccgccgtgttcgactggtttttcgaagctgcatgccccgcaagccttcaagaggaccccccaatacttcgccagtttcctcctgattttcgggatcaggaagctatgcagatggtccctaagttctgttttccatttgacgtagagcgcgaacctccctctcctgcagtccaacattttactttcgccttaacagatcttgcaggaaacaggagatttggattctgcaggctccgtgccgggacccagtcatgcttatgcatcctttcgcatctcccatggttcgaagtgttttataaactcctcaataccgtgggggacctgctggcgcaggatcaggtcacagaggccgaagagcttctgcaaaacctgttccagcagtcactgtcaggacctcaggcaagcgtgggcctggagctggggagtggcgtgacagtgagctccggacagggaatacctcctccaacccggggcaatagtaaacctctatcatgctttgtggctccagactctggacgtctgcccagcattccagaaaataggaacctaactgagctggtggtggctgtaacagatgagaacattgtgggcctctttgccgccttgcttgcagagcgtagggtattgctgaccgccagcaaactatccacactgacgtcctgcgtgcatgcaagctgcgctctgctgtatccgatgaggtgggagcacgtgctgataccgacactgccaccacacctgctggattactgctgtgccccaatgccatatctgattggcgtgcacgcgagtttggccgaaagggttcgcgaaaaggcgttagaggatgttgtggtgcttaatgtcgatgctaacactctggagacaacttttaacgatgttcaggccctcccaccagacgtcgtttccctcttaaggctgcgtctcaggaaggtcgctctggctccaggggagggcgtctccagactgtttcttaaagcgcaggcactcctgttcggcggttatagagacgctctcgtgtgcagtcctggccagccagtaaccttttctgaggaagtcttcctcgcccagaagccaggtgcacctcttcaggccttccacagacgggcagtccatctacagctcttcaagcaatttatagaggcgaggctcgagaagttaaacaaaggcgaaggatttagcgaccaattcgagcaggagatcaccggatgcggggcatcaagcggtgctctgcggagctatcagctgtgggccgacaacctcaaaaaagggggcggggcccttcttcatagtgttaaagccaaaacgcagccagctgtgaagaacatgtacagatccgctaagagtggccttaagggagtccaatctctcctcatgtacaaggacggggatagcgtactccagcgtggcggttctctcagagccccagccttgccgtctcggagcgacaggctgcagcagagactgccaatcacccagcacttcggcaagaaccggcccctccggcccagcagacgccggcagctggaagagggaacaagcgagcctcctggggctggtactcccccattgagcccggaagatgaaggctgcccttgggccgaagaggccctcgattcatcttttctgggaagtggtgaggaactagatttactttctgaaatcttggattccttgtcaatgggtgctaagtcagcaggctccttacggccgagccagtcgctagattgctgccaccggggggatctcgatagctgcttctcattgcccaacatccccagatggcagcccgacgataaaaagttgccagagcctgagcctcagcccctgagtcttccaagtctgcagaatgcctctagcctcgacgctacaagttcctcgaaagactcccgctcacagcttataccatcagaatctgaccaggaggtcaccagcccaagccagtcctctaccgcctcagccgacccatctatttggggcgaccctaaaccgtcaccattaacagagcccctgattctgcaccttacccctagccataaagcggcagaggatagtaccgctcaggagaacccaactccctggctatctactgcacctactgagccaagtcctcccgaatccccccaaattttggcccccacaaagccaaatttcgacatcgcttggacgagccagcctcttgatccatcttctgatccatctagcctggaggatcccagggcaagacctccgaaagccctgctggctgaacgcgcacacctacaacctagagaggaacccggcgctttgaatagcccagccacacccacctcgaattgtcagaagagtcagccaagtagccgccctagagttgccgacttgaagaaatgctttgaaggatag

SEQ ID NO: 185182 - DNA, 2274 bp, synthetic construct
  misc_feature 1..2274: note = Description of Artificial Sequence: Synthetic coding sequence
  source 1..2274: mol_type = other DNA
atgcagatggtgcccaagttctgcttccccttcgacgtggagcgggaacctccttcccctgctgtgcagcatttcacctttgcacttaccgacctagccggaaatcgcaggtttgggttctgccgtttaagagcaggtacacagtcttgcctgtgtattttatcgcacctgccctggttcgaggttttctacaaactgctgaatacggtcggtgacctgcttgcccaagatcaagtgaccgaggcagaggaactattacagaatctgttccaacaaagtcttagtggcccacaagccagcgtggggctagaattaggttctggagtgaccgtgagctctgggcaggggatcccccctcccacccgcggcaattctaaacctctgtcctgctttgtggcaccggattccggcagactaccctctattcccgagaaccgcaatctgacagagctcgtggtcgccgttacagacgaaaatatcgtggggttatttgcagcactgttagcagaacgacgggtgcttctgactgcatcgaagctgagcaccttgaccagctgcgttcatgcaagctgcgcgctgctttatcctatgcgctgggaacatgtattaatcccaacactgcccccccacctgcttgactattgctgtgctcctatgccttacctcatcggcgtgcacgcgagcttagcagagcgggtccgggagaaagctttggaggacgtggtcgtacttaacgtcgacgccaacactctcgagaccaccttcaatgacgtgcaggccttgccacccgacgtggtatctctcctgaggttgcgactacgcaaagtggccctggcccctggggagggcgtgagcagactgttcctgaaagcacaggcacttctattcggtggataccgcgacgctctggtgtgcagcccaggacagcccgtcacattcagcgaggaggtgtttttagcacagaagccaggggctcccctgcaagcattccatcgacgggcagtacaccttcaactgtttaagcagtttatcgaggcccgactggaaaagttgaataagggcgaggggttttccgatcaattcgagcaagagatcacaggttgtggcgccagctctggtgcccttagaagctaccagctatgggctgacaacttgaaaaaaggcggcggcgccctgcttcatagtgttaaagcgaagactcagcccgctgtgaagaatatgtataggagcgccaagtctgggctcaagggcgtgcagagcctgcttatgtacaaagacggcgactctgttttgcaacgtgggggctctcttcgggcccccgccctacctagcaggagtgaccggttgcagcagcgacttcctataacacagcactttggtaaaaacaggccgctgcgccctagtagacgcaggcagttggaggaaggcacctcggagcctccaggcgccggcacaccaccgttatctcccgaggacgaaggctgtccatgggccgaagaggcactcgatagttcgtttctcggttcaggagaggaattggacctgctatcagaaattctggattccctcagcatgggagccaagtctgcaggctcactgcggcctagccagtcattggactgctgtcatcgcggcgaccttgactcgtgcttctctctcccgaacatccctagatggcaaccggacgataaaaagctgcccgaacccgaaccccaaccactgagcctgcctagtctccagaacgcttcttccctcgacgccacctcatcttcaaaagatagtaggagtcagctgataccatccgaaagtgatcaagaagtgacctcgcccagccagtcgtccactgctagcgcagaccccagtatctggggcgacccgaagccttccccgctgacggagcctctgatccttcatctgactccatctcacaaggccgccgaggattccacagctcaggagaatcctacaccgtggctgtccacagcccccacggagccttctccaccagagagtcctcaaattttggcgccaacgaagcctaacttcgacatcgcatggaccagccagcccctcgaccctagcagcgatccatccagcctggaagaccctagagctcgcccaccaaaggccttgctagccgaaagggcgcatctgcagcctcgggaggagcctggcgccttgaactcccccgcgactcctaccagtaactgccaaaaatctcaaccgagctccagaccccgcgtcgccgatctaaagaagtgcttcgaggggtag

SEQ ID NO: 185183 - DNA, 2193 bp, synthetic construct
  misc_feature 1..2193: note = Description of Artificial Sequence: Synthetic coding sequence
  source 1..2193: mol_type = other DNA
atgctgttcaacagcgtgctgcggcagccccagctgggcgtgctgcgtaatggctggtcctctcagtacccacttcaaagcctgttgactgggtaccaatgcagtgggaatgacgagcacacatcctacggagagacgggtgttcccgtaccccctttcggctgcacgttctcttccgcccctaatatggaacacgttctagctgtagccaacgaggaaggatttgtgcgcctatataataccgagtcacagagcttcaggaagaagtgtttcaaagagtggatggctcattggaatgccgtattcgacctggcctgggttcctggcgagctgaagcttgtgacagccgctggtgatcagaccgcaaagttctgggatgtgaaagctggtgagttgataggcacttgcaaggggcaccaatgtagtctgaagtctgtggctttctccaaattcgagaaggcagtgttctgtaccggtggtcgcgatggaaatatcatggtgtgggacactcggtgcaacaagaaggatggattctacaggcaggtcaaccagatctccggagctcacaatactagcgacaagcagacccctagcaaacccaagaagaaacagaattcaaagggcttagctccatcagtcgacttccaacagagcgttacggtggtgctgtttcaggatgagaacacactcgtgtccgcaggggctgtggacggaattattaaggtgtgggacctgaggaagaactatacggcttaccgtcaggagcctatcgcttcgaagagctttctgtacccagggtcttcaaccagaaagcttggatacagttccctgattctcgacagtacaggatccaccctgttcgcgaattgtaccgacgacaacatatatatgtttaatatgacagggctgaagacctctccggtggctatttttaatggtcaccagaactccactttttatgtgaagagttctctgagcccagatgatcaattcctcgtgagtgggagttccgacgaagccgcatacatttggaaggtgtcaaccccatggcagccacctactgttctcctaggccactcccaggaggtcactagcgtgtgctggtgccctagcgattttacaaagattgccacttgctcagacgataatacactgaagatatggaggctgaatcgaggactggaggaaaaacctggcggtgacaagctcagcaccgtgggttgggcctctcaaaagaaaaaagagtctaggcccggactcgtcacagttacttcatcccaatccacgcccgccaaggcgcctagggcaaaatgcaatcccagcaatagcagcccttcatctgccgcgtgcgccccgagctgcgccggcgatctcccactgcctagcaatactccgacattcagtattaaaacaagtccagcaaaagctcgcagcccaatcaatcggagaggctccgtgagttccgtctccccgaagccccctagctcattcaagatgtcgatccggaactgggtgacccgcacaccgagcagtagtccccctatcacaccaccagccagcgaaaccaaaattatgagtcctcgaaaggccctgattcctgtctcgcagaagagttcgcaggccgaggcctgcagcgagagtcggaatcgggtcaaaaggcggctcgactcgtcttgtctggagagtgtgaaacagaagtgtgttaagagctgcaattgtgttacagaactcgacggacaagttgagaatcttcatctcgacctgtgctgcctggcaggcaaccaggaagacctatctaaagatagcttagggccgaccaagagcagcaagatcgaaggagccggcacgtccatctcagagccacccagccccatctctccctatgcttctgagtcctgcggtacgttacctcttcctctccggccttgcggggagggatccgaaatggtcgggaaagagaacagctcgccagaaaacaagaattggctcttggcaatggcagccaagaggaaagccgagaatccatcccctcggtctcctagtagccaaacacctaacagtaggcgccagagtggcaaaaagttgccctcccccgtgactattaccccgtcctctatgcgcaagatatgtacgtatttccaccgtaagagtcaagaagacttttgtggccccgagcacagtacagagctgtag

SEQ ID NO: 185184 - DNA, 1230 bp, synthetic construct
  misc_feature 1..1230: note = Description of Artificial Sequence: Synthetic coding sequence
  source 1..1230: mol_type = other DNA
atgctgttcaacagcgtgctgcggcagccccagctgggcgtgctgaggaatggctggtcttcccagtatccactgcagtcattactgaccggctaccaatgcagtggtaacgacgaacatactagttacggggaaaccggcgtgcccgttccaccattcgggtgtacatttagttccgatgacaatacgcttaaaatctggcgcctgaatcgcggcctggaggagaagccaggaggcgacaagctgtccactgtgggctgggcgtcacagaaaaagaaggagagccggccaggattagtcactgtgacctcaagtcagagtaccccggcgaaggctccccgcgccaagtgtaaccctagtaattccagtccctcttctgccgcttgcgcaccctcctgcgctggagacctcccactgccctctaatacacctacttttagcatcaaaacgtccccagccaaggctagaagtcccattaatcgccggggttccgtcagcagcgtgtcaccaaagcccccatccagtttcaagatgtccatcaggaactgggtgaccaggaccccctcctcatcacctcctataactccacccgcctccgaaaccaagataatgtcccctagaaaagcactgatacctgttagtcaaaagtcaagtcaggccgaagcatgttcagagtctagaaatcgtgttaagcgtaggcttgattcatcttgcctggagtccgttaaacaaaagtgcgttaagtcatgcaattgcgttacagaactggacggccaggtagaaaacctacatttagatttgtgttgcctggcggggaaccaggaagacctgtctaaggattcactgggccctaccaagagctctaagatagagggcgccggcacatcgatcagcgaacctccctcacctattagtccgtacgcgagcgaaagctgtggaacattgcccctccctctacggccctgtggcgaagggtctgaaatggtcggcaaggagaacagcagcccagagaacaagaactggctcttagccatggcagccaaaaggaaagctgagaatccttcaccaagaagccctagcagtcaaactccgaactcaaggcgccagagcggaaagaaactcccttcccccgtgaccattacacccagctctatgcgtaaaatttgtacatacttccacagaaaaagccaagaagatttttgcggaccagaacattctaccgaactttag

SEQ ID NO: 185185 - DNA, 2067 bp, synthetic construct
  misc_feature 1..2067: note = Description of Artificial Sequence: Synthetic coding sequence
  source 1..2067: mol_type = other DNA
atgctgttcaacagcgtgctgcggcagccccagctgggcgtgctgcgtaacgcccccaatatggaacatgtgctggccgttgcaaatgaggaaggttttgtgcgtctgtacaacacggagtctcagagctttcgtaagaagtgcttcaaggagtggatggcgcactggaatgcagtgtttgacctagcctgggttccgggggaactgaaactggtcaccgcagccggcgaccaaaccgccaagttttgggatgttaaggccggggaattgatcggcacatgcaagggccatcagtgtagccttaagagtgtcgcattttcaaaattcgaaaaagctgtcttttgtaccggcggacgagacggaaacatcatggtgtgggatactagatgcaataaaaaggatgggttttacagacaggttaaccaaatcagtggagcccacaatacttctgacaagcaaacccccagcaaacccaaaaagaaacagaacagtaaagggctggcaccctctgtcgactttcagcagtcggtgaccgtggtgttgtttcaggacgagaacacactggtgtcggctggggcagtagatggcataatcaaggtttgggatctgaggaagaattatacagcttataggcaagaacccattgccagcaagtcctttctgtaccctgggagcagtactcgaaagctgggatacagctccctcatcttagattcaacaggcagtacactgtttgccaactgcaccgatgataatatttatatgttcaacatgaccggcctcaagacatcccctgttgccatctttaacggccaccaaaatagtactttctatgtaaaaagcagcctgagccccgacgaccaatttttggtgagtggaagctccgacgaggctgcatacatctggaaggtctctacaccatggcagccacctactgttctgctgggtcacagccaagaggtaacctccgtttgctggtgtccaagtgattttactaagatagcgacttgttccgacgacaacaccttgaagatctggcggctgaaccgcggacttgaggagaaacccggcggtgacaagctttcgacggtggggtgggcctctcaaaagaaaaaggaaagccgccccggattagtcacagtgacctcatcccagagtacgccagccaaggctccaagggccaagtgtaaccccagcaactcctcaccatcctctgcagcctgcgcgccctcttgtgccggcgaccttcccttgcctagcaatacaccaacattcagtattaaaacgtcaccagccaaggcacgatccccaatcaaccggcgcggctccgtatcatcagtgtctcctaaacccccctcctcctttaaaatgtccatcaggaactgggtgactcgtaccccctcttcctcccctcccattacgcctcccgcaagcgagaccaaaatcatgtcccctcggaaagctcttatacccgtgtctcagaagtcctctcaggcggaggcctgctctgagagccgtaacagagtaaagagacgcctagatagttcttgtctcgaaagcgtgaagcagaaatgcgtgaaaagctgtaattgtgtgacagagctcgacggccaagtcgagaatctccacttagatttgtgctgtctggctgggaaccaggaagacctgagcaaggattcccttggtcctaccaagagttccaagatcgagggcgcaggaacttccatcagcgaaccaccatctcctatctctccatatgcatccgagtcttgtgggactcttcccctgccactgagaccgtgcggcgaaggatcggagatggtcgggaaggaaaactcctcccccgagaataagaactggctgctcgccatggccgccaaaaggaaagccgaaaatccaagccccagatcaccctcatcacagactcccaactcaaggcgccagtctggaaaaaagctgccgtctcctgtgacgattacaccgtcctcgatgagaaaaatctgtacgtattttcatagaaagtctcaagaagacttctgcggcccagaacattcgacagaactttag

SEQ ID NO: 185186 - DNA, 1494 bp, synthetic construct
  misc_feature 1..1494: note = Description of Artificial Sequence: Synthetic coding sequence
  source 1..1494: mol_type = other DNA
atgaagatcagcatcctgctgatgttcctgtggggcctgagctgcgctctgcccgttacccggtaccaaaataatgagagtgaagacagtgaggagtggaaagggcacctggctcaggcccctaccccgcccctggcaaatgaagacccctcagacagcactcagtccgaggaggggttaggctcagacgatcaccagtatatatacagactggctggtggcttctctcgaagcaccggcaaggggggagacgacaaagacgacgatgaggatgattctggggatgacacgtttggcgatgatgatagtggaccagggcccaaagataggcaggaaggggggaatagccggctcggctccgatgaggactctgatgacacaatacaagcttccgaggagtcagcgccccagggccaggattcagcgcaggatacaacttctgaatcccgcgagctcgataacgaggaccgagttgactctaagccagagggcggggattctacacaggaaagcgagagcgaagagcactgggttggaggcgggagcgatggcgaaagctctcatggagatggctcggaattggatgatgagggaatgcagagtgacgatccggaatcaatcagatcggagcgaggcaactcacggatgaacagcgccggcatgaagtcaaaagaaagcggggagaactccgagcaggccaatactcaggactctggcgggtctcagctgctggaacatccatctcgcaagattttccgaaagtcacgcatcagtgaggaggacgatcgttcggaacttgatgacaataacacaatggaggaagtcaagagcgacagtaccgagaactccaacagccgtgatactggactgtctcaaccaagaagagatagtaagggggattcgcaggaagactcaaaggagaatctttctcaggaggaaagccagaacgttgatggccctagctccgagtcctcgcaggaggcgaacctgagttctcaggaaaacagctccgaatctcaggaggaagtagtcagcgagagccggggtgataatccagaccccacgacaagctatgtcgaggaccaggaggattccgattcgtccgaagaggactctagccacacacttagtcattcaaagtccgaaagtcgcgaagagcaagcggatagcgagagtagtgagtctctaaacttctccgaggaaagccctgagtctcccgaggatgagaacagttcctctcaagagggattgcaaagtcacagttcttctgctgaaagtcaaagtgaggaatcccattccgaggaagacgacagtgactcccaggattcgtcgagaagtaaagaagatagcaactcaacggagtctaagtcctcaagcgaagaggacggacaacttaaaaacatagaaatcgaatctagaaagctaaccgtggatgcctatcataacaaaccgataggtgaccaggacgataatgactgccaggacgggtattag

SEQ ID NO: 185187 - DNA, 1542 bp, synthetic construct
  misc_feature 1..1542: note = Description of Artificial Sequence: Synthetic coding sequence
  source 1..1542: mol_type = other DNA
atgaagatcagcatcctgctgatgttcctgtggggcctgagctgcgcactaccagttacaagatatcagaataatgagagtgaagatagcgaagagtggaagggtcatttagcccaggcaccaacacccccgcttgaaagcagtgagtccagcgaagggagcaaagtgtcttctgaggagcaggcaaacgaggaccccagtgatagcacgcagtctgaagaaggcctgggttcagacgaccaccagtacatctatcgactggctggcggattctcccgatccacgggtaaaggtggtgatgataaggatgacgacgaagatgactccggcgacgacacatttggcgatgatgatagcggacctggaccaaaggaccgccaggaaggagggaattcccgccttggctccgacgaagatagcgacgacaccatacaggcctctgaggaaagcgccccccagggacaggactccgcacaagacaccacctctgaatcgagagagctggataatgaggatcgggtggatagtaaaccagaaggaggcgattcaacgcaagagagcgagtctgaagagcactgggttggcggcggctccgacggggagagctcgcatggggacgggtcagagctggacgacgagggcatgcagtccgatgatcccgagtccattcggagtgaacgaggaaactcgcgcatgaacagtgctggaatgaaatccaaggagtccggagaaaacagtgaacaggccaacacgcaggatagtggtgggtcccaacttctcgagcatccttcccggaagatttttaggaaatcccgtatttccgaagaggacgatcgctctgaactggacgacaataatacaatggaggaggtcaagtctgattccacggagaacagcaattctagagacactggactttctcagccgagacgggacagtaagggggacagccaggaggattctaaagagaacctctctcaagaagaaagccagaacgtggatgggcccagcagtgagtcttcccaggaggccaacctgtctagccaggagaattcatccgaaagccaggaggaagttgttagtgagtctcggggagacaatcccgatcccacaaccagttatgttgaagatcaagaggattccgactcctccgaagaggattcaagccacaccctgagtcacagcaaatccgagtcccgagaggagcaggcagatagcgagagtagcgagtctttaaatttctcagaagagtcccctgaatctccagaagacgagaactcatccagccaagaaggtctgcagtcccacagctcctccgcagagtcccaatccgaggagagccacagtgaggaggatgattccgactcccaggattccagcagaagtaaggaggatagtaacagcactgaatccaaaagcagtagcgaggaggatggccagttaaaaaacattgagatcgagtcacgcaagctgaccgtcgacgcctatcataacaaacctataggtgaccaggacgacaatgattgtcaggacggctattag

SEQ ID NO: 185188 - DNA, 3906 bp, synthetic construct
  misc_feature 1..3906: note = Description of Artificial Sequence: Synthetic coding sequence
  source 1..3906: mol_type = other DNA
atgaagatcatcacctacttctgcatctgggccgtggcctgggccattcctgtacctcagtcgaagcccttggaaagacacgtcgaaaaatccatgaatctgcacctgctggcccgatccaatgtcagcgtgcaggacgagttgaatgcttctggaaccataaaagagagtggcgtgctggtgcacgaaggggaccgcggccgccaggagaacacacaggatggtcacaagggtgaggggaacggctcaaaatgggccgaagtgggaggcaaaagcttttctacctacagcacactggcaaacgaagaaggtaatatagaaggctggaatggggatacaggtaaggcagagacctacggtcatgatgggatccacggcaaggaggagaatattactgcgaatgggatacagggacaggtaagtatcatcgataacgccggcgctacaaacagatctaataccaatgggaacaccgacaagaatacacaaaacggggacgtgggagatgccggccacaatgaagacgtggcagtggtgcaagaggacggaccccaggtagcagggagcaataacagcacagacaatgaagatgaaataatcgagaacagctgcagaaatgagggcaataccagcgagattacccctcagataaacagcaaacggaatggtacaaaggaggccgaagtcacccccgggacgggagaagatgctggtcttgacaattccgatggtagtccttccggcaacggggcagacgaggatgaggacgagggttctggcgatgacgaagatgaagaggctgggaacggaaaggatagcagcaacaactcaaaaggtcaagagggccaggaccatggtaaggaagacgaccacgattcctctatcggccagaacagcgatagcaaagagtattacgaccccgaaggtaaggaagaccctcacaacgaagtggatggcgacaagacatcaaagagcgaagagaactccgcaggcatccccgaggacaatggtagtcaacgcatcgaagacactcagaaactgaaccaccgcgaatcaaagagggtcgaaaatcggatcacaaaggaatcagagacccatgcagtcggaaaatcacaggataaaggcatcgaaattaaagggcccagctccggaaatagaaatattaccaaagaggtgggaaaaggcaatgaaggaaaggaggataaaggccaacatggtatgattctgggcaagggaaacgttaagactcagggggaagtcgtcaatattgaggggcccgggcagaaatctgaacccggaaacaaagttggtcattcgaatactgggagcgacagcaactctgatgggtatgactcatatgattttgatgataagagcatgcaaggggatgacccaaattctagcgatgagtccaacggcaatgatgacgctaatagtgagtcagacaataactccagtagcagaggcgacgcctcctacaatagcgacgagagcaaagataacggcaatggatcggattcaaaaggagccgaagacgatgacagtgactctacctctgatacgaacaacagtgactctaatggcaatggaaacaacggtaatgacgataatgataagagcgattctggaaagggaaaatcagattctagcgattccgattcctctgatagctcaaattcttcagactcctcggattcttccgacagtgactcaagtgatagtaacagcagctcggactcagacagttcggattcagacagcagcgattctagtgacagtgattctagtgactcctccaatagctcggactcctccgattcaagtgatagctctgattcatccgacagctcggacagttccgacagtaagtctgatagttccaagagtgagtcagactccagcgattccgacagcaaaagcgattcgtctgattctaatagctcggactcctcagataacagtgattcgtccgattcctcaaactcttccaattcctccgactcttcagactcaagtgacagtagcgactctagctcttcaagcgatagctctaacagttctgacagttccgactcctccgattcttctaattcctccgaatccagtgactcctctgatagttccgactcagactcctctgacagtagtgatagttcaaacagcaactcctctgatagcgattccagtaattcctcggattcatcagatagcagcaatagctcggacagcagcgatagctcagattcctccaactcttcggactccagtgattcatccgattcctccaatagctccgattcatcagattcaagcgatagcagcgatagttccgatagcagcaacagctccgattctaacgactcatcaaactcttcagacagcagcgatagtagtaactctagcgattcctcgaactcatctgattccagcgacagcagtgactctagcgacagtgacagcagcaattcgagcgatagtagcaatagttcagattcttctgattcttccaattcttcagactcatccgattcctcagattcatctgacggtagtgacagcgattccagtaaccgctctgactcatcaaacagcagcgactcctccgactcatcagatagtagtaatagctctgattctagtgactcaagtgacagtaatgagtcaagcaactcatccgacagcagcgattcgagcaactcttctgatagcgattctagcgatagctccaactcaagcgattccagcgactcatccaatagtagtgattcctcagagtcctccaactcgtctgacaactcgaactcctccgattcgagtaactcctccgacagctcagatagttcagatagctctaatagttctgacagttccaattccagcgatagtagtaatagttctgatagttcagactccaatagctccgacagctccgatagcagcaactcctccgacagtagcgactcctcagattcttcggactctagcgattccagcgacagttccaactctagtgacagcagtgactccagtgactccagtgattcctccaattccagtgactcatcgaactcctccgactctagtaattcctctgacagctccgactctagcgatagctcggatagttccgactcttcggactctagcgattcttccgattcgagtaatagcagtgacagttctgattcgtccgatagttcggattcctctgactcaagcgattcatcagactcatctgattcatctgagtccagcgacagctctgattcaagcaatagttcagacagttccgatagctctgacagttcagactcatccgactcttccgactcctccgatagcagtgattcatctgatagctccaacagctctgattccagcgattctagtgatagctctgactcctctgatagtagcaattcctcggactccagcgactcctctgaatcctctgatagcagtgactctagtgactcgagcgattccagtgacagctctgattcctcagatagctcggacagctctgattcatcaaacagcagtgacagctctgattcatcagacagttcagattcttcagatagctcagactcaagcgatagctccgacagctctgacagctccgactcaagcgattccagcgacagttccgattccagtgacagctctgattcttccgatagctcggattctaacgagagctctgattcaagcgactcctcggatagctctgacagctcgaattcctctgactctagtgacagtagcgattcttccgactcaacgtccgactcaaatgacgagagcgactcacagagcaagtctgggaatggcaacaacaatggatccgactctgattcggacagcgagggaagcgactctaatcactcaacgagcgacgactag

SEQ ID NO: 185189 - DNA, 3906 bp, synthetic construct
  misc_feature 1..3906: note = Description of Artificial Sequence: Synthetic coding sequence
  source 1..3906: mol_type = other DNA
atgaagatcatcacctacttctgcatctgggccgtggcctgggccattcccgtgccccaatcaaagcccttggaaaggcatgtagaaaagagcatgaatctacacctgttagcccgctccaatgttagtgtccaggatgagcttaacgccagcggaactatcaaagagtctggggtgttagttcacgagggagatagggggaggcaggagaatacccaggatggacataagggtgaaggcaacggatcaaaatgggctgaggtcggcggaaagtcattttctacctattctacactggcaaacgaggagggcaatatcgaagggtggaatggggataccggcaaggctgagacctatggtcatgatggtatacatggcaaagaggagaatattacagctaatggaattcaaggccaggttagcataatcgataatgcgggggctacaaaccgatctaacaccaatggcaacactgacaagaatacacagaacggcgacgtcggtgacgctggccataacgaggacgtcgcagtggtgcaggaggatggcccccaggtggctggatcaaacaactctactgataatgaggacgagatcattgaaaattcttgcagaaatgaggggaacactagtgagataaccccccagattaactcaaagcggaatggcacgaaggaagccgaagtcacaccggggaccggtgaagatgctggcctcgacaactccgacgggagtccatcagggaacggagcagacgaggatgaggatgaaggctccggcgacgacgaagatgaggaagctggaaatggcaaggattccagcaataattccaagggacaagaaggccaggaccacggcaaggaggatgaccacgacagttccattggtcagaacagcgatagcaaagaatattatgacccggaaggcaaggaggatccgcacaacgaggttgatggagataagaccagtaagtcagaagaaaacagtgccgggattcctgaggacaacggctcccagcgtatagaggacacacaaaaattgaaccatcgcgagagtaaacgggtcgaaaatcggattaccaaagagtcagagacacatgccgtgggcaaatctcaagacaagggaatcgagataaaaggtccatcatctggtaatcgcaatattactaaagaggtgggaaagggaaacgaaggtaaggaggacaaaggacagcacggaatgatcctgggcaaggggaatgtaaaaacgcagggtgaagtcgtcaatatagaaggtccaggacagaagtcggagccgggcaacaaggttggccactctaatacaggatcagactccaacagtgacggttacgattcttatgatttcgatgataaaagtatgcagggtgacgaccccaacagcagcgacgaaagtaacggtaacgacgatgcgaactcagagtccgacaacaattcatcgagcaggggtgacgcaagctacaactcagacgagagcaaggataatggtaatggctccgatagcaaaggggccgaggatgatgacagtgatagcaccagcgacacgaacaacagcgactctaacggcaacggcaacaatggcaatgacgataacgacaagagcgatagcggaaaagggaaatcggattcctcggactccgattcatccgacagcagcaattcctccgatagctctgacagctctgattctgattcctctgatagtaattcctcctctgacagtgatagttctgactctgattctagcgattcctcggactcagactcctccgattccagcaattcaagcgattcaagtgacagtagcgatagctcagattcgtcggactcttctgacagcagtgattcaaaaagcgactccagcaagagcgaatctgacagctcagatagtgatagtaagagcgacagctctgattccaattcctccgactctagcgacaacagcgattctagcgactcaagtaacagctcgaactcatctgactccagtgactctagcgattcttctgacagttcatcttcgagcgactctagcaatagcagcgacagcagcgacagtagcgactctagcaactcttccgaaagcagtgatagctcagattcctccgattccgacagcagtgatagcagcgattcgagtaattctaattcatcagactcagacagttccaacagttcagacagtagcgatagcagtaattcctccgactcttccgattcatctgacagctccaacagctcagatagctccgactcttccgactccagtaattccagtgactcaagtgattcaagcgacagttctgactcctcggattcaagcaattcaagtgacagcaacgatagctctaattcaagtgattctagcgattccagtaacagcagcgattccagtaattcatcggattcatcggactcctcagattcttcagacagcgatagctccaacagctctgattctagcaactcatccgactcgagcgactctagcaattccagcgattccagcgacagctcggattctagcgatgggagcgatagcgactctagcaaccgaagtgatagcagcaattcctccgacagttcagacagctcagatagctccaattcgtcagacagctccgatagttccgacagcaatgagtcttccaatagtagcgacagcagcgattccagtaattcctccgactccgattcttctgactccagtaatagcagtgacagctctgactcttctaactcatctgacagctccgagagcagcaactccagcgacaattccaacagctcggactcttctaatagctctgactcttctgatagctcagattcttcaaactccagcgactctagtaacagcagcgacagttcaaattccagtgattcaagtgatagcaatagcagcgacagctccgattccagtaactcgtctgattctagtgacagctctgactcctcagactcttctgactctagtgatagctccaattccagcgactcttccgattcctccgattctagtgattctagtaacagcagtgacagttctaacagtagtgatagctcaaattcaagtgactcctccgactcctcggattcctccgacagttcggatagcagcgattcctctgatagcagtgacagctccaactcatcagactctagtgactcatccgactccagcgatagctctgattcttccgactcatccgattctagcgatagctcagaatccagtgacagtagtgactcatccaactcatccgattcaagcgattccagtgattccagcgattcttcagatagcagtgactcctccgattctagcgacagctccgattccagcaattctagtgattcatcggatagcagcgactcttcagatagctctgacagctccaacagctcagactcatcagactcgtcagagagtagcgactcatctgattctagtgattcctctgattcaagtgatagtagtgactccagcgactcaagcgactcttctgactccagcaactctagcgactcatctgacagctccgatagcagcgactcctctgacagcagcgatagctctgacagtagcgactcaagcgattcgtctgactcatcagacagttctgatagctcagactcctcagactcctctgatagctccgattcttcggacagcaacgaaagctcagactccagtgattcatctgactcatccgacagctcaaactcatctgactcatctgactcctccgatagttccgactctacaagtgattcaaatgatgagtcagactcacagtcaaaaagcggaaatggaaataacaacggcagcgatagtgacagcgactccgagggtagtgacagcaatcattctactagtgatgattag

SEQ ID NO: 185190 - DNA, 783 bp, synthetic construct
  misc_feature 1..783: note = Description of Artificial Sequence: Synthetic coding sequence
  source 1..783: mol_type = other DNA
atggccaccccccccaagcggagctgccccagcttcagcgccagcagcgagggtacaagaatcaagaagatctcaatcgagggaaatattgccgccggcaagagtacatttgtcaatatactcaaacagctgtgcgaagactgggaagttgtgcccgaacctgtggccaggtggtgcaacgtgcagagtacccaggacgagtttgaagaactcacgatgtcccagaaaaacggcggcaatgttctgcagatgatgtacgagaagccagagcggtggagtttcacttttcaaacatacgcctgtctctcccggattcgcgcccagctcgctagccttaatggaaagctgaaagatgccgagaaacctgtcctgtttttcgagcgtagtgtgtactccgaccgatacatattcgccagtaatctgtatgagtctgagtgcatgaacgaaacagagtggaccatttaccaggattggcacgattggatgaacaaccagttcgggcagtcgttggaattggatggcatcatctatctgcaagccactccagaaacatgtcttcaccggatttacttgagaggaagaaacgaggagcagggcatcccactcgagtacctcgagaagctccactataagcacgagtcttggttgctgcatcggacactgaagacgaactttgactacctccaggaagtacccattttgaccttagacgtcaacgaggacttcaaggataagtacgagagtctggtggagaaggtcaaggagtttctgtccactttgtag

SEQ ID NO: 185191 - DNA, 48 bp, synthetic construct
  misc_feature 1..48: note = Description of Artificial Sequence: Synthetic coding sequence
  source 1..48: mol_type = other DNA
atggccaccccccccaagcggagctgccccagcttcagcgccagctag

SEQ ID NO: 185192 - DNA, 834 bp, synthetic construct
  misc_feature 1..834: note = Description of Artificial Sequence: Synthetic coding sequence
  source 1..834: mol_type = other DNA
atggccgccggccggctgttcctgagccggctgcgggcccccttcagctccatggctaagagcccacttgagggcgtttccagttctcggggccttcacgcgggaaggggacctagacgcctgtcgatcgaaggcaatattgccgtaggcaaatcaaccttcgtaaaattattgactaagacataccctgagtggcatgtggctacagaaccagtggcgacgtggcaaaatattcaggcagcaggtactcagaaagcatgtacggcccagagtttgggcaacctgctggacatgatgtatagggaacctgcacgatggagctacacattccagaccttttctttcttaagtaggctcaaggtccaattagagccctttcccgagaagctgctgcaggcgagaaagcctgttcagatctttgagagatctgtgtacagcgataggtacatctttgccaaaaacctgttcgaaaacggaagtctctccgacattgagtggcacatctatcaggactggcattcattcctgctttgggaatttgcctcacgtatcactctgcatggctttatttacctgcaggccagtccccaggtgtgtctgaagcggttataccagcgggcacgggaagaggagaaagggattgaacttgcctacctggaacagctgcacgggcagcacgaggcatggctgatacacaagacaaccaagctgcactttgaggccttaatgaacattccagtactggtgctggacgtgaacgatgatttctctgaggaggtcaccaagcaagaggatctgatgagagaggtcaacacattcgtgaagaatctttag

SEQ ID NO: 185193 - DNA, 720 bp, synthetic construct
  misc_feature 1..720: note = Description of Artificial Sequence: Synthetic coding sequence
  source 1..720: mol_type = other DNA
atggccgccggccggctgttcctgagccggctgcgggcccccttctcctccatggccaaaagccctcttgaaggagtgtcctctagccgggggcttcatgcggggcgcggtccacggcggctgagcatcgaagggaacatcgcctgtacagcacagagcctgggaaatctgctggatatgatgtatcgcgaaccagcccgctggtcctacaccttccagaccttttccttcctgtcccgccttaaagtgcagctcgagcctttccccgagaagttgcttcaagcaaggaagcctgtccagatctttgagcgatcggtgtactccgataggtacattttcgcaaaaaacctctttgaaaatggatctctgtccgacatcgaatggcacatctatcaggattggcactctttcctgctctgggagtttgcgagcagaattaccctgcatggcttcatctatctccaggctagcccccaggtgtgcctgaagcggctgtaccagcgtgctcgggaggaggaaaagggaatcgagctggcatacttggaacagctgcacggacagcacgaagcctggctgattcacaagactaccaagctacactttgaagccctgatgaacatcccggtgctggtgctggatgttaatgatgatttttcagaggaggtgaccaagcaagaggatctgatgcgggaggtgaacacattcgtgaaaaatctgtag

SEQ ID NO: 185194 - DNA, 570 bp, synthetic construct
  misc_feature 1..570: note = Description of Artificial Sequence: Synthetic coding sequence
  source 1..570: mol_type = other DNA
atggccgccggccggctgttcctgagccggctgcgggcccccttctctagcatggctaagtccccattggagggcgtttcttccagtcgtgggttgcatgccggccgaggacctcgtcggctatcaatcgagggcaatatcgcggtgggcaaatccactttcgtaaagctgctgaccaagacctatccagagtggcatgtcgccaccgagccagtggccacttggcagaacattcaggcggcaggcacccaaaaggcgtgcactgctcagtcattgggtaacctgctagacatgatgtatcgtgaaccggctaggtggagctacacattccagactttctcttttctctcgcgcctgaaagtgcagttagagcctttccccgaaaagctcctgcaggcgcgcaaacctgtacagatcttcgaacggagcgtgtacagtgaccggttacacttcgaagccttgatgaacatccccgtattggtgttagacgtgaacgacgacttttccgaagaagttacaaaacaagaggatctcatgcgcgaagttaatacctttgtcaaaaacctgtag

SEQ ID NO: 185195 - DNA, 768 bp, synthetic construct
  misc_feature 1..768: note = Description of Artificial Sequence: Synthetic coding sequence
  source 1..768: mol_type = other DNA
atggccgccggccggctgttcctgagccggctgcgggcccccttctccagcatggccaagtctcccctggagggcgtatcttcatccaggggactgcacgcaggacgaggccctaggcggctttctatcgaagggaatattggcaacatcctgaagcaaattcgaatgagggccccaattcaagagacagcctgtacagcccagtccctgggcaatctgctcgacatgatgtatagagagccagcacgctggtcatatacattccaaacatttagctttttatctaggctgaaggtacagctggagccttttcccgagaaactgcttcaggcgaggaaaccagtgcagattttcgagcggtccgtctacagtgacaggtatatcttcgccaaaaatctttttgaaaacggttccctgagtgatatagagtggcacatctaccaggactggcactctttcctgctgtgggagttcgcgtccagaatcacactacacggcttcatttatctgcaagcttctccacaggtctgcctgaaacggttgtaccaaagagctcgcgaggaggagaagggcattgagttagcctacctcgagcagttgcatgggcagcacgaggcctggctaatacacaaaaccaccaagctccattttgaggccctcatgaacatccccgtgttggtactggacgtcaatgatgactttagtgaggaggtgactaagcaggaagacctgatgcgcgaggtgaacaccttcgtcaaaaatctgtag

SEQ ID NO: 185196 - DNA, 1416 bp, synthetic construct
  misc_feature 1..1416: note = Description of Artificial Sequence: Synthetic coding sequence
  source 1..1416: mol_type = other DNA
atggccaagaaggtggccgtgatcggcgccggcgtgagcggcctgatttccctgaagtgttgcgtggatgagggacttgagccaacttgcttcgagaggacagaggacatcggaggagtgtggagatttaaagaaaatgttgaggatggccgcgctagcatatatcaaagtgtggtgactaacacctccaaagagatgtcctgcttcagtgactttccaatgcctgaggacttccccaattttctccacaactcaaagttgctggagtacttccgaatctttgcaaagaaatttgacctccttaagtatatccaatttcagactaccgtgctaagtgtgagaaagtgtcccgatttctcttccagcggtcaatggaaggtcgtgacccagagcaacggaaaagagcagagcgcagtctttgacgccgttatggtttgcagcggacatcatattctgccacacatccctttgaaatcttttcctggcatggaacggttcaagggtcagtactttcattccagacagtacaagcaccccgatgggtttgagggcaaacggattctcgtgattgggatgggaaacagcggctccgatattgccgtggagttgtctaaaaacgcggcgcaggtgttcattagcacgcggcatggaacttgggttatgagtagaattagcgaggatggatatccctgggacagcgtttttcataccaggttccgcagcatgctcagaaatgtgttgcccaggaccgccgttaaatggatgatcgaacagcagatgaatagatggttcaatcacgagaactatggcctagaacctcagaacaagtacataatgaaggagcctgtactaaacgacgatgttccttcgcgccttctatgtggggccatcaaggtcaagtcaacagtgaaggaactcactgagacctctgctattttcgaagatggtacagtcgaagaaaacatcgatgtgattatttttgccaccggctactccttcagcttccctttcctggaggactccctggtgaaggtggagaataacatggtttcattgtacaagtacatctttcccgcacacctagacaaatccaccctggcttgtattggcttaatccagcccctcggctccatctttcctacagccgaactgcaggccaggtgggtcacacgcgtcttcaaaggcctctgcagtctcccttctgagcgtaccatgatgatggatattatcaagagaaacgagaaacggattgacctgttcggggagagtcagagccaaaccctccagaccaattatgtcgactacctggacgagcttgctctggaaattggtgcaaagccagacttctgtagcttgctgtttaaagatcctaaactcgccgtccgcctgtactttggaccctgtaactcttattag

SEQ ID NO: 185197 - DNA, 969 bp, synthetic construct
  misc_feature 1..969: note = Description of Artificial Sequence: Synthetic coding sequence
  source 1..969: mol_type = other DNA
atggagggcagcctggagcgggaggcccccgccggcgccctggccgctgtgctgaaacattcctccacactgccccccgagtctacgcaagtgaggggctacgacttcaaccgaggagtgaactacagagcccttctggaggctttcggaacaacggggttccaagctactaatttcgggcgggccgtacagcaggtaaacgctatgatcgaaaagaaattggagccactgtcacaggacgaggaccagcacgccgatctgacccaatccaggagacctttaactagttgtaccatcttcctggggtatacctccaatctaatctcatctggcattcgtgagaccattaggtaccttgttcagcacaatatggtcgatgtgctggtgaccaccgccggcggagtggaggaggatctgattaaatgccttgccccaacctacctgggagaattttccctgaggggaaaggagctgcgggaaaacggcattaatagaattggcaatttgctggtgcccaacgagaattattgcaaattcgaagattggctgatgcctatcctggaccagatggtgatggagcagaataccgaaggggtcaaatggaccccatctaagatgatcgccaggttgggcaaggaaattaacaaccccgaaagcgtgtattattgggcccaaaaaaatcacatccctgtgtttagccctgcacttaccgatggtagcttgggcgacatgatcttctttcattcttacaagaacccggggctggtactcgacatcgtcgaggcacaggagtttgatggctccgattcaggcgcaaggcccgatgaagcggtttcttggggcaagatccgcgtcgacgcccaaccggtcaaagtgtatgctgatgcctcactggtgtttcccttgttggtggccgagacatttgcgcagaagatggacgcatttatgcacgagaaaaacgaggactag

SEQ ID NO: 185198 - DNA, 984 bp, synthetic construct
  misc_feature 1..984: note = Description of Artificial Sequence: Synthetic coding sequence
  source 1..984: mol_type = other DNA
atgcccatcatccccgccttctgggaggccgaggccggcggcagcagggaggaagagttcgaaactagtctggctaacatgattgaaaagaagttagagcctctcagccaggacgaagatcagcacgccgatctcacccaatctcgccggcccctcacttcttgtaccatcttcctgggctacaccagtaatttaatttccagcggcattcgagagacgatccggtacctcgtgcagcacaatatggtggatgtgctggtaactacggcagggggagtggaagaggacttgatcaaatgtctggcccccacctacctgggcgagttctccctgcgtggcaaggagcttcgtgagaatggcatcaaccgcattggcaatctgctggttccaaatgagaattattgcaaatttgaagattggttgatgcctatcctggatcaaatggttatggagcaaaataccgaaggtgtgaagtggacgccctccaaaatgatcgctcgcttgggtaaggagattaataatccagagagcgtgtactattgggcacagaaaaatcacattcctgtgtttagtccggccctgacagacgggtcccttggggatatgatattctttcattcatacaagaatccaggcctggtgctggatatagttgaagatctcaggttgatcaacacccaggccatcttcgccaagtgtacaggcatgatcatcttgggcggcggggtagtgaagcaccacattgcgaatgcaaacttgatgcgaaatggcgccgattacgccgtctatatcaacacagcccaggagtttgacgggtcggattctggcgctcggcccgacgaagccgtgtcctgggggaagatccgggtggacgcccagcctgtaaaagtgtacgccgacgctagtctcgttttccctctcctcgtcgccgagacattcgctcagaagatggatgcgtttatgcacgaaaagaacgaggattag

SEQ ID NO: 185199 - DNA, 462 bp, synthetic construct
  misc_feature 1..462: note = Description of Artificial Sequence: Synthetic coding sequence
  source 1..462: mol_type = other DNA
atgccccagctgtgcacccgggccagcagcagcgagatccccggccggctgctcaccactctccaaagtgcacaaggacagaagtttctccatttcgcaaagtccgacagcttcctggacgacatctttgccgcatggatggcccagagactgaagacccatctgctgactgaaacctggcaaaggaaacgacaagaactgccatcaaactgcagtcttccataccacgtatataatatcaaggcgattaagctcagtagacactcctattttagttcttatcaggatcacgcgaagtggtgcatctcccaaaaaggtaccaagaaccggtggacttgcataggtgacctaaaccggtctcctcaccaggcgtttagatctggtggattcatctgtacccagaactggcagatctaccaggccttccagggtctggttctgtattacgagtcctgtaagtag

SEQ ID NO: 185200 - DNA, 1086 bp, synthetic construct
  misc_feature 1..1086: note = Description of Artificial Sequence: Synthetic coding sequence
  source 1..1086: mol_type = other DNA
atgaagcagaagatgatggcccggctgctgcggaccagcttcgccctgctctttctcggcctcttcggcgttctcggagccgctaccatctcctgccgcaatgaggagggaaaagccgttgactggtttacattttacaaactcccaaaacgccagaataaggaatctggtgagactggtttggagtatctctatctcgattcaaccacccggtcctggcgaaaaagtgagcaactgatgaatgacaccaagagcgtgctggggcgcacactgcagcaactctacgaggcttatgcaagcaagtccaataacactgcctacctcatctataacgacggagtgccgaaacctgttaactacagtcgaaagtacgggcatacaaaaggcctcttgctgtggaatcgcgtgcagggtttctggcttattcattcaattccccaattcccgcccatcccagaagaaggttatgactaccccccaaccgggaggcggaacggccagtccggaatttgtataaccttcaagtataatcagtacgaagccatcgactcccaactcctcgtgtgtaacccaaacgtgtattcatgttctattccagctactttccaccaagaactcatccacatgccacagctgtgtacccgcgcatcttccagcgaaatcccagggagattactaaccaccctccaatctgctcaggggcagaagttcctccacttcgctaaaagtgattcctttctggacgatattttcgctgcctggatggcgcagcggctgaagacgcatctattaactgagacctggcaacggaagcggcaggagctcccatccaattgttctttaccataccacgtctataatatcaaagctattaaattatccagacacagctactttagtagctatcaagaccacgctaaatggtgcatctcccagaaggggacgaagaaccgttggacctgtataggagaccttaatcggagcccccaccaggctttcaggtcgggaggcttcatctgcactcagaattggcaaatttatcaagcatttcaaggcctggtcctctattacgaatcttgcaaatag

SEQ ID NO: 185201 - DNA, 1317 bp, synthetic construct
  misc_feature 1..1317: note = Description of Artificial Sequence: Synthetic coding sequence
  source 1..1317: mol_type = other DNA
atggccctgcggggcgtgagcgtgcggctgctgagccggggccccggtttacacgtccttcgaacatgggtcagctctgccgcccagactgagaagggcggtcggacccaaagccagctcgctaaaagttccaggccagagttcgactggcaagatcctcttgtccttgaagagcagctaactaccgacgaaatcttgatccgagacactttcaggacttactgccaagagcgcctcatgccaaggatcttgctggctaatcggaatgaagtgttccaccgagagattatttccgagatgggcgaacttggcgtgttaggaccaacaattaagggttacggatgtgccggcgtcagttccgtcgcctacggactactggctcgtgaactagagagagtagattctgggtataggtccgctatgtcagtgcagtccagcttggttatgcaccccatatatgcatacggcagtgaggaacagcgccaaaaatatctgccccagcttgcaaagggcgaactcctaggatgtttcggcctgactgagccaaattccggttctgaccccagttctatggagactcgcgctcactataacagctccaataaatcttacaccttgaatggtacaaagacgtggataacaaatagcccaatggcagacctgtttgttgtatgggcgcggtgcgaagatggatgcattagaggcttcttactggaaaagggtatgagaggattgagcgccccacgaattcaggggaagttttctctcagggctagcgccaccgggatgattatcatggacggagtggaagtgcccgaggagaacgtgctccccggcgccagctccctgggcggaccttttggatgtctgaacaatgctagatacggaatcgcttggggggttttgggtgcctctgagttctgcctacatacggctaggcaatacgcccttgatcgaatgcaattcggagtgcccctggcacgcaaccagctgatccagaagaaactggctgacatgttgaccgagattacacttgggttgcacgcctgcctacaactcgggcggttgaaggaccaggacaaggctgcccctgagatggtcagcctactgaagcgtaacaactgcggcaaggccctggatattgctagacaagcaagagatatgctcggaggaaacggaatcagcgacgagtaccacgtaataagacatgccatgaatctcgaggccgtgaatacgtacgagggaactcatgatattcatgccctcatactcgggagagccattacaggaatccaggcctttacagcatctaagtag

SEQ ID NO: 185202 - DNA, 918 bp, synthetic construct
  misc_feature 1..918: note = Description of Artificial Sequence: Synthetic coding sequence
  source 1..918: mol_type = other DNA
atgatccccctgctgctggccgccctgctgtgcgtgcccgccggcgcattaacttgctacggagattcagggcagcccgtcgattggtttgtggtgtacaaactgcctgcattgcggggatctggagaggcagcccaacgcggactgcaatacaaatatttggatgagagctcggggggctggcgggacggacgcgcactgatcaactccccagagggggccgtgggacgcagcttgcagccgctataccgcagtaacacctctcagttggccttcttgctctacaacgatcagcctccacaaccctccaaagcgcaggactcttctatgcgcggacataccaagggcaagcagctcacgtatacatacccttgggtgtacaattaccagctggaggggatcttcgcccaggaattccccgacctcgaaaacgtggtcaagggtcaccacgtgagccaggaaccctggaactccagtataaccctcactagccaggcaggggccgtgttccagagttttgctaagttcagcaaattcggtgacgatctttatagtggctggcttgccgcagccctgggcactaaccttcaagtgcaattttggcacaaaacagtaggcatcctgccaagtaactgttctgacatttggcaagttttgaatgtaaatcagatagctttccccggccctgccggacctagctttaatagtacagaggaccacagcaaatggtgtgtaagtccaaaaggtccttggacttgtgtcggtgacatgaaccgtaatcaaggtgaagagcaacggggaggcgggacgctttgcgcccagctgcccgctttgtggaaagccttccagcccctcgtgaagaattatcagccctgcaatggcatggccagaaaacccagcagagcctataagatctag

SEQ ID NO: 185203 - DNA, 909 bp, synthetic construct
  misc_feature 1..909: note = Description of Artificial Sequence: Synthetic coding sequence
  source 1..909: mol_type = other DNA
atgcactaccccaccgccctgctgttcctgatcctggccaacggcgcccaggcattcaggatctgcgcctttaacgcccagaggctgacactcgctaaggtggcaagggagcaggtcatggacactctcgtcagaatcctggcgcgttgcgacatcatggtcctccaggaggtagtggactccagtgggagcgcgattcccctgctgctgcgagaactcaatcggttcgatggaagtggaccatattcgaccctgtccagcccgcagctggggcgaagtacttacatggaaacatacgtctatttctatcgctcacacaaaacccaagtactcagttcctatgtgtacaatgacgaagacgacgtgttcgccagagaaccatttgtggcacaattctctctgccctctaatgtgctgccaagtttagtgctggttcctctgcatacaacccccaaggccgttgaaaaggagctgaatgcactatacgacgtctttttggaggtctctcagcactggcagtccaaggacgtcatactcctcggcgatttcaacgctgactgtgcttcacttacaaaaaaacggctagataaactggagcttagaactgaaccaggcttccactgggtgatcgccgacggtgaggacacaacagtgagagcatccacccactgtacatatgatcgcgttgtattgcacggtgaaaggtgtagaagcctcttacacaccgccgccgccttcgattttccaacctcctttcaattgacagaggaggaggctctgaatatatccgatcattatcccgtcgaagtggagctgaaattgtcccaagcccacagcgttcagcccctgagcctgacagtgctcctgctcctctccctccttagtccccagttgtgtcccgccgcctag

SEQ ID NO: 185204 - DNA, 909 bp, synthetic construct
  misc_feature 1..909: note = Description of Artificial Sequence: Synthetic coding sequence
  source 1..909: mol_type = other DNA
atgcactaccccaccgccctgctgttcctgatcctggccaacggcgctcaggcttttaggatttgcgccttcaacgctcagagattaacacttgcaaaggtggcccgggagcaggttatggacaccctggtgcggattctggcccgatgtgatattatggtgcttcaggaggtggtggattcctcagggtccgctatcccattgctattaagagagctaaatcgatttgacgggagcgggccttacagcaccctgagcagcccacagttggggaggtcaacctacatggagacatacgtatacttctaccgcagccataaaacacaggtgctctcctcctatgtttataatgatgaggatgatgtgtttgctagagagcctttcgttgcacagttctcgctgccatccaatgtgttaccgtctctcgtcttggtgccactgcacaccacccctaaggctgtggagaaagagctgaatgcactgtacgacgtcttcttggaggtgtcccagcattggcagtcaaaggacgtgattctgctgggggacttcaatgccgactgcgcaagcctgacgaaaaaacgactagataagttggaacttagaactgagcctggatttcattgggtcatagcggatggggaagacactactgtgcgggcttcgacccattgcacgtacgaccgggtcgtacttcatggagagcgatgtagatctcttctgcatactgcggcggcatttgatttcccaacatccttccaactcactgaggaagaggctctaaatatttctgaccactatcccgtggaagtagaactgaaactttcacaggcacactccgtccaacctctctctttgacagtgctcttgctcctgtccctgctctccccacaattatgcccagccgcttag

SEQ ID NO: 185205 - DNA, 909 bp, synthetic construct
  misc_feature 1..909: note = Description of Artificial Sequence: Synthetic coding sequence
  source 1..909: mol_type = other DNA
atgcactaccccaccgccctgctgttcctgatcctggccaacggcgcccaggcttttaggatttgcgcatttaatgcgcagcgcttgactcttgcaaaagtggccagggagcaagtcatggacacattggtgagaattctagctagatgtgacattatggtactacaggaagttgtggactcatcggggagcgccattcccctcttactgagggagttaaacaggttcgacggatcgggtccatactccactctcagcagtccacagctgggccgaagtacctacatggaaacctacgtgtacttctatagaagccacaagacacaggttctcagttcttacgtatacaacgatgaggatgatgtgtttgcccgcgaaccctttgtggcacagttcagtctgccgagcaatgtgctccccagcttggttctggtaccactgcacaccaccccaaaggcagtggagaaggagctcaatgccttatacgatgtctttctggaagtatctcaacactggcaatccaaagacgtgattctgctgggagattttaatgctgactgtgcttccttaacgaagaagcggttagataaactggagctgcgaaccgaacccggattccactgggttatcgcggacggtgaggatacgacagtgcgggcaagtacgcactgcacatacgacagagtagtgctgcatggtgaacggtgccgatctcttcttcacactgcggccgcattcgatttccctacctcttttcagttgaccgaagaagaggccctcaacatttctgatcattaccccgtggaagtggagctaaagctttcacaagcacactctgtgcagcctctatcccttactgtgctgctcctattgtcattgctttccccccagctctgcccagccgcctag

SEQ ID NO: 185206 - DNA, 909 bp, synthetic construct
  misc_feature 1..909: note = Description of Artificial Sequence: Synthetic coding sequence
  source 1..909: mol_type = other DNA
atgcactaccccaccgccctgctgttcctgatcctggccaacggcgcacaggcattcagaatatgtgcgttcaacgctcaacgcctgaccctggccaaagtggcccgcgaacaagttatggataccctggtgagaatcctggcgcgatgtgatattatggtccttcaggaggtggtggattcctccgggagcgctataccactgcttctgcgggagctcaaccgcttcgacggtagtggcccatactccactttgtcttcacctcagctaggtagaagcacctacatggagacctatgtttacttctacaggtcgcataaaacgcaggtcctgtcctcttatgtttataatgacgaggacgacgtgttcgctcgcgagccttttgtggctcagttctctctgccctctaatgtgttgccctcattggtgctggtcccgcttcataccactcccaaagccgtggagaaagaactgaacgcactgtacgatgtattcctcgaagtgtcccagcattggcaatctaaggacgtcatcctcctgggggactttaatgctgattgcgcatctctcactaaaaagagattagacaaactggagttgcgcaccgaacccggctttcactgggtaatagccgacggcgaagacaccaccgtgcgggcctctactcactgcacttatgacagagtcgtgctgcatggagagcggtgccgaagcctactgcatacagcagccgcatttgacttcccaacgtcttttcaactgaccgaagaggaagctctcaatatttccgatcactatcctgttgaggtggaactcaagctatcccaggcgcacagcgtacagcccctgtcactcacagtgctgttgctactgagcttactctccccccagttgtgccccgcggcatag

SEQ ID NO: 185207 - DNA, 909 bp, synthetic construct
  misc_feature 1..909: note = Description of Artificial Sequence: Synthetic coding sequence
  source 1..909: mol_type = other DNA
atgcactaccccaccgccctgctgttcctgatcctggccaacggcgcccaagcctttaggatctgcgcctttaacgcccagcggctgaccctcgccaaagtcgccagagagcaggtgatggatactttggtgcgcatcttggccaggtgcgacatcatggttttacaggaagtggtggattctagtggctcagccatccccttgctcctgagagagctaaaccgttttgatggaagcggcccctattccacactgtcttcacctcagctgggtcgaagcacttatatggaaacctacgtgtatttctataggtctcacaagacccaggttctttcttcgtacgtgtataacgacgaagacgacgtgttcgcccgcgagccctttgttgcacagttttctctgcccagtaacgtcctcccaagccttgtgcttgtcccccttcacacaactcccaaggcggttgagaaggagctaaacgctctctacgacgtgttccttgaggtatctcagcattggcagagtaaggacgtgatcctccttggcgactttaacgccgattgcgcctctctgaccaagaagcgtctggacaaacttgagttgagaacagagcccggcttccactgggtgattgctgatggcgaggacacaactgtcagagccagcacacactgtacctacgatcgtgtagttctgcatggggaaagatgccgttcccttctccacaccgcagcagcctttgatttcccaaccagctttcagctcaccgaagaggaagcccttaacatatctgatcattatcctgttgaggtcgagctgaagctatcacaggcacactctgtacagcctctgagtctgaccgttctgttactcctgagtctgctgagtccacagctttgtccagctgcatag

SEQ ID NO: 185208 - DNA, 909 bp, synthetic construct
  misc_feature 1..909: note = Description of Artificial Sequence: Synthetic coding sequence
  source 1..909: mol_type = other DNA
atgcactaccccaccgccctgctgttcctgatcctggccaacggcgcacaggctttccggatttgcgcattcaacgcacagagacttaccttggcaaaagtagcccgggagcaggtgatggacaccctcgtgcgtatcctggcgcggtgcgatatcatggtcctgcaggaggtcgtggactcaagtggatcggcgattccactcctgctgcgcgaactaaatcgctttgacggttctggtccgtactctaccctcagctcgcctcaacttggccggagcacctacatggaaacatacgtctatttttaccgatcccataaaacccaggtgctgtcttcctatgtctacaacgacgaagatgatgtctttgccagggaaccattcgtcgcccaattcagcctcccttcaaacgtgttgccatctctggtacttgtccccctccacactaccccaaaggccgtagaaaaggaattaaacgccttgtatgatgtctttctggaggtatcacagcactggcagtctaaggacgtgattctgttgggcgatttcaatgccgactgtgctagtctcacgaagaaaaggctggacaaattggagctgagaactgagccaggattccactgggtaattgcagacggggaggacactacggtgcgagcgtcgacacactgcacctacgacagggtcgtgttgcacggtgaacgatgcagaagccttctccatacagccgccgccttcgacttcccaacttctttccaactaacggaagaggaggccttaaatattagcgatcactatccagtggaagtcgagttgaagctgagtcaggcccatagtgttcagccactttctctgaccgtactgctcttgttgtctctgttatccccgcagctgtgcccggccgcctag

SEQ ID NO: 185209 - DNA, 315 bp, synthetic construct
  misc_feature 1..315: note = Description of Artificial Sequence: Synthetic coding sequence
  source 1..315: mol_type = other DNA
atgcactaccccaccgccctgctgttcctgatcctggccaacggcgcccaggcattccgcatctgtgcgtttaatgcccaacggctgacccttgccaaggtcgctagagaacaagtcatggacacactcgtgcggatcctcgcgcgctgtgatataatggttctgcaggaggtagtggattcttccggctcggctattcctttgctgctgagggaactgaaccggtttgacggttccggcccatactctaccctgagttcccctcaacttggcaggagcacttatatggaaacttatgtgtacttctacaggtag

SEQ ID NO: 185210 - DNA, 81 bp, synthetic construct
  misc_feature 1..81: note = Description of Artificial Sequence: Synthetic coding sequence
  source 1..81: mol_type = other DNA
atgcactaccccaccgccctgctgttcctgatcctggccaacggcgcacaggccttccgaatttgtgcgtttaacgcatag

SEQ ID NO: 185211 - DNA, 627 bp, synthetic construct
  misc_feature 1..627: note = Description of Artificial Sequence: Synthetic coding sequence
  source 1..627: mol_type = other DNA
atgcactaccccaccgccctgctgttcctgatcctggccaacggcgctcaggcatttcgtatctgtgcattcaatgcccagcgcttgacgttggccaaagtggcccgcgagcaggtgatggacacactcgtacgtatccttgctcggtgtgacattatggtgctacaagaagtggtggatagttctggaagtgctatcccactcctgctgcgggaactgaatcgattcgacgggtcaggaccttattcgaccctgtcatctccgcagctagggaggagtacatatatggagacctatgtttatttttacagatcacacaagactcaagtcctctcaagctatgtgtacaacgatgaggacgacgtgtttgcccgggagccattcgtggcccagttttccctcccgtcaaacgttctccctagcttagtcctggttccactccacacgactcccaaagctgtagaaaaggagcttaatgccctctatgacgtctttctggaggtctctcaacattggcagtcgaaggacgtcatactcctcggggatttcaacgctgactgtgcttccctgaccaagaagcgcctggataagcttgaactaaggactgagcccggatttcactggtag

SEQ ID NO: 185212 - DNA, 918 bp, synthetic construct
  misc_feature 1..918: note = Description of Artificial Sequence: Synthetic coding sequence
  source 1..918: mol_type = other DNA
atgagccgggagctggcccccctgctgctgctgctgctgagcatccattccgcccttgctatgagaatttgcagtttcaacgtcagatccttcggggagtccaaacaggaagacaaaaatgccatggacgtgatcgtcaaggtaattaaacggtgcgatattatcctggtcatggagatcaaggactcaaacaatcgaatctgccctatcctgatggaaaagctaaatcgcaatagcagacgtggtataacttataattacgtcatctctagcaggctgggtcgcaatacttacaaggaacagtatgcatttctttataaggagaagctggtttctgttaagagaagctatcactatcacgattaccaggacggagacgccgacgtgttcagtcgagagccctttgtggtgtggttccagagtcctcacaccgccgtgaaagactttgtgattatccccctgcacacaacacccgagacatctgtgaaagaaatagacgaactggtggaggtatacactgacgtcaaacacaggtggaaggctgagaacttcattttcatgggcgacttcaacgccggctgctcctacgtgcccaagaaggcctggaagaatatcaggctgagaaccgatcctcgtttcgtctggctgatcggcgatcaggaagatactaccgttaaaaaaagtactaactgtgcttatgatcgaatcgtcctgcggggccaagaaatcgtgagtagcgttgtgcccaagtccaactcggtttttgacttccaaaaagcctacaagctcacagaggaggaagcattggacgtatccgaccactttccagtcgagtttaagctgcagagctctcgcgcgttcaccaacagcaagaagtccgtgaccctaagaaagaaaaccaagtctaagagatcctag

SEQ ID NO: 185213 - DNA, 918 bp, synthetic construct
  misc_feature 1..918: note = Description of Artificial Sequence: Synthetic coding sequence
  source 1..918: mol_type = other DNA
atgagccgggagctggcccccctgctgctgctgctgctgagcatccactccgccctggctatgcggatatgctctttcaacgtgagatccttcggggaatccaagcaggaggacaaaaatgctatggatgtaatcgtgaaggtgatcaagcggtgcgatatcattctcgtgatggagattaaggactctaacaatcggatctgccccatccttatggagaaactcaacaggaacagcaggaggggcatcacctacaactacgtaatcagttcccgattaggaaggaacacatacaaggaacagtacgccttcctctacaaggagaagctggtttcggtcaagcgctcttatcattaccacgactaccaggatggcgatgccgacgtgttttctcgagagccctttgtggtgtggttccagtccccacataccgccgtgaaagattttgtgatcattccgctccacacgacacctgagaccagtgttaaggagatcgatgagctggtcgaagtttataccgatgtgaagcacaggtggaaagctgaaaacttcatcttcatgggtgattttaatgccggctgtagctatgtgccgaaaaaagcctggaagaacatccggctgaggacagacccgaggttcgtgtggctgattggggatcaggaagataccaccgtcaagaaatctacgaactgtgcctacgaccggattgtgctgaggggccaggaaatagtgagtagcgtcgtgccaaagtccaactctgtgttcgactttcaaaaggcctacaaattaaccgaagaagaggctctggacgtttccgaccattttccagtggagtttaagctgcagtcatctagggcctttactaatagcaaaaaatcagtaaccctaaggaaaaagaccaagtccaagcgaagctag

SEQ ID NO: 185214 - DNA, 867 bp, synthetic construct
  misc_feature 1..867: note = Description of Artificial Sequence: Synthetic coding sequence
  source 1..867: mol_type = other DNA
atgagccgggagctggcccccctgctgctgctgctgctgagcatccacagcgctttagccatgcgcatctgctcatttaatgtaagatcattcggcgagagcaaacaggaggataaaaacgcaatggacgtgatagtgaaggtgatcaaacgctgtgacatcattctggtcatggaaataaaagatagcaacaatcgcatatgccctatactcatggagaagctgaacaggaatagccggcgcggaatcacttacaactacgtgatcagctctcgactgggccggaatacatacaaagagcagtatgcatttctctacaaagagaaattggtgtcggtgaagaggtcttaccattaccatgattaccaggatggtgacgcagacgttttcagtcgagagccctttgtggtatggtttcagtctcctcataccgccgtgaaagattttgtgatcatacccctgcacaccaccccagaaacctcggttaaggagattgatgaactggtagaagtttacaccgacgtgaagcatcggtggaaagccgagaatttcatctttatgggcgatttcaatgcggggtgcagttacgtgcctaaaaaggcctggaagaatattcgactgcggacagatccacgattcgtgtggcttatcggagatcaggaagatacaactgtgaagaagagcacaaactgtgcctacgatcggatcgtactgagaggccaggagattgtgtctagcgtggtccccaagtctaatagcgtgtttgattttcaaaaggcttacaagctcaccgaggaagaggtccggcttccgagttgcctgtccatgccgctgtcttggaaggacgagttggcttgggctacttag

SEQ ID NO: 185215 - DNA, 303 bp, synthetic construct
  misc_feature 1..303: note = Description of Artificial Sequence: Synthetic coding sequence
  source 1..303: mol_type = other DNA
atgagccgggagctggcccccctgctgctgctgctgctgagcatccactctgcacttgctatgcgtatctgttcctttaacgtgcgttcattcggagaatcgaagcaagaagataaaaatgctatggatgtgatagtgaaagtgatcaagaggtgtgacattattttggtgatggagataaaggacagtaacaatagaatctgccctattttaatggaaaaactcaatcggaattcccgcagagggattacatataattacgtcataagtagccgcctcgggcgcaatacgtataaagagtag

SEQ ID NO: 185216 - DNA, 828 bp, synthetic construct
  misc_feature 1..828: note = Description of Artificial Sequence: Synthetic coding sequence
  source 1..828: mol_type = other DNA
atgagccgggagctggcccccctgctgctgctgctgctgagcatccacagtgcacttgcaatgagaatttgcagcttcaatgtgcgttcttttggcgaatctaaacaggaagacaaaaatgccatggacgtaattgtaaaggtgattaagcggtgtgatattatattagtgatggaaattaaagactctaacaaccgtatctgtcctatcctgatggagaagctcaatcgggagaagttagtctcggtcaaacgctcataccactatcacgactatcaggacggagacgccgatgtcttctcaagagagccatttgttgtctggttccagagtccccacacagccgtgaaggattttgttattattccactccatactacgccagaaacatcagtgaaggaaattgacgagctagtagaagtttacaccgatgtgaaacatcggtggaaggcagaaaattttatcttcatgggggactttaatgccgggtgctcatacgtgcctaagaaggcttggaaaaacatccgtctacgcactgaccctagatttgtttggttgataggcgatcaggaggataccacggtcaaaaagagcaccaactgcgcctacgaccgaatcgtgctgagagggcaggagatcgtatcttcagtggtgcctaagtccaactctgtgttcgatttccagaaagcttataagctgaccgaggaagaagcgctcgatgtttccgaccacttcccagtcgagtttaaattacagagctcccgggcgttcaccaactcaaaaaagtcggttactctgcgtaagaagacaaagtcgaagcggtcgtag

SEQ ID NO: 185217 - DNA, 753 bp, synthetic construct
  misc_feature 1..753: note = Description of Artificial Sequence: Synthetic coding sequence
  source 1..753: mol_type = other DNA
atgacccccctgtgcccccggcccgccctgtgctaccacttcctgacatcactcttacgaagcgcaatgcagaatgccaggacagccgaaggccggagccgggggaccctgcgcgcaaggccggccccgcgtcctgccgctcagcacggtattccccgcccgctgagctcagcaggaaggctctcccagggatgccgtggcgccagtaccgtaggagctgctggatggaaaggggagcttccaaaagccggcggcagccccgctccgggaccggagacacctgcaatttccccctccaaacgagctagaccagccgaggtcggaggaatgcaactcaggtttgctcgactatccgaacatgccaccgcccctacgcggggctcagcacgcgccgctggatacgacctctattccgcgtacgattacacaatcccgcccatggaaaaggcagtggtaaaaacagacatacagatcgccttgccttcagggtgctacggcagagtggccccccgctccggactggccgccaagcactttatcgatgtgggcgccggggtgatcgatgaagattaccgcggcaacgtgggcgtagtcttgttcaatttcgggaaagagaagtttgaggtgaaaaagggcgatcgaattgctcagctgatttgcgaacgaatcttctaccccgaaattgaagaggttcaagccctcgatgacacagaaagaggatctggaggatttggttcaaccggaaaaaactag

SEQ ID NO: 185218 - DNA, 759 bp, synthetic construct
  misc_feature 1..759: note = Description of Artificial Sequence: Synthetic coding sequence
  source 1..759: mol_type = other DNA
atgacccccctgtgcccccggcccgccctgtgctaccacttcctgacctccctgctccggtcagccatgcagaacgcgcgtggcgcccgccagcgggcagaggcggccgtactctccggcccgggtcccccattaggaagggctgcccaacatggaatccctcggcccctttcttcagccggaaggttgtcgcaagggtgccgaggggcttcaacggtgggcgctgccggttggaagggtgaactgcctaaagcaggagggtcccctgcccctggacctgaaactcccgcgatctcaccatctaagcgcgcgagacccgccgaggtaggcggaatgcagctacgattcgctaggctgagtgaacacgctaccgcgcctacaagaggatcagcccgagccgcagggtacgacttatactcagcttatgactatactatacctcctatggaaaaggccgtggtcaaaaccgatattcagatcgccctaccgagcggctgctacggccgagtggccccccgctctggactggccgccaagcactttattgatgtgggtgccggagttattgatgaggattatcggggaaatgtcggagtagttctgtttaacttcggtaaggagaagtttgaggtaaagaaaggcgaccgcatagctcagttgatctgcgagcgcatcttttaccctgagatagaagaggtccaagcgctcgatgatacggagcgcggctccggaggattcgggagcaccggtaagaactag

SEQ ID NO: 185219 - DNA, 495 bp, synthetic construct
  misc_feature 1..495: note = Description of Artificial Sequence: Synthetic coding sequence
  source 1..495: mol_type = other DNA
atgccctgcagcgaggagacccccgccatcagccccagcaagcgggcaagaccggcagaagtgggcggaatgcagcttcgctttgctcggttgagcgagcatgccactgccccgacgaggggtagtgccagggcggcgggctacgatttatacagtgcttacgattacaccatcccaccaatggaaaaggccgttgtgaagactgacattcagatcgcgctgccttccggatgctacgggagagttgctcctagatccgggctggcagccaagcattttatcgacgttggagccggagtaatagacgaggattaccgcgggaacgttggtgtagtcctcttcaatttcggtaaagagaagtttgaggtcaagaaaggtgacaggatcgcacagttaatctgcgaaaggatcttctatccggaaatcgaggaagtgcaagcacttgacgacactgagaggggttccggtggcttcggatctaccggaaagaactag

SEQ ID NO: 185220 - DNA, 426 bp, synthetic construct
  misc_feature 1..426: note = Description of Artificial Sequence: Synthetic coding sequence
  source 1..426: mol_type = other DNA
atgcagctgcggttcgcccggctgagcgagcacgccaccgcccccacccggggatccgcacgggctgctggatatgatttatacagtgcatacgactatacgatccctccgatggaaaaagccgttgtgaaaacagacatccagatcgccttgccttccgggtgctatggccgggtcgccccaagatcaggactggccgccaagcactttatagacgtaggagcaggagtgatcgacgaggattacagagggaacgtgggagtagtattgttcaattttgggaaagaaaagttcgaggtgaagaaaggagaccgcattgcacagcttatttgcgaacggatcttctacccagaaatagaggaggtgcaagctcttgatgacaccgaacgcggatctggtggttttggttcaaccggcaagaattag

SEQ ID NO: 185221 - DNA, 1056 bp, synthetic construct
  misc_feature 1..1056: note = Description of Artificial Sequence: Synthetic coding sequence
  source 1..1056: mol_type = other DNA
atgcccctgcggaagcaccggcagcacttcaagaagtacggcaactgttttactgcgggcgaagctgtggactggctgtacgatctgctgcgaaacaactctaactttggtccagaggtcaccaggcagcagaccatccagctcctgagaaaattcctcaagaaccacgtgattgaggatatcaaaggtagatggggctccgagaacgtcgacgacaacaaccagctatttcggttccctgcgacttcaccactgaagaccctgccaaggagaacccccaaacgccatggacttcacttatcacaagagaatggggagaaaattaaacacgaaatcatcaacgaggaccaggagaacgctatcgacaaccgggagctgtcacaggaagacgtagaggaggtgtggcgatatgtaatccttatctacctacaaactatcctgggagtgccctcacttgaggaggtcataaaccctaagcaggtgatcccacagtacattatgtacaatatggctaacacatccaagcggggcgtagtcattctccaaaataagagtgacgacctgccccattgggtgctttcagcaatgaagtgcctcgctaactggcccaggagtaacgatatgaacaatcctacgtacgtaggcttcgagcgggatgtttttcgaactatcgcagattacttcctcgacctgcccgaacctctcctgacatttgagtactacgaactatttgtcaatatcctcggtaattttaaagatttccggtcatcaatccctgtggtttgtggttacatcactgtgtcggacagaagttcaggaatccataaaatccaggacgacccacaatcatcaaaattcttgcacctcaataacctgaattcctttaagtctactgagtgcttgttgctcagtcttctgcacagggagaaaaataaagaagaatctgactctaccgaacgcctccagataagtaatcctgggtttcaagagagatgtgcaaaaaaaatgcaactggtcaatctgcgcaacaggcgcgcctgttgcaacttgatctag

SEQ ID NO: 185222 - DNA, 1584 bp, synthetic construct
  misc_feature 1..1584: note = Description of Artificial Sequence: Synthetic coding sequence
  source 1..1584: mol_type = other DNA
atggagagccagggcgtgccccccggcccctaccgggccaccaagctctggaatgaagttacaaccagcttccgcgctggtatgcccttgcggaagcataggcagcacttcaaaaaatacggtaattgttttactgcgggtgaagccgtggactggctctacgatctgctgcggaacaattcaaattttggccctgaagtgacccgtcagcagactattcaactgctcagaaagtttttgaaaaaccatgtgatcgaagatatcaaggggcgctggggaagcgagaacgttgacgacaataaccaactcttccgattccctgcgacatcaccgctgaaaaccctccctcgcagatatccagaattacgaaagaataatattgagaacttcagcaaggacaaggactcaattttcaagctccgcaatctttctagaaggacacctaagcgtcacggccttcatctttcccaggagaatggggaaaaaatcaaacatgaaatcattaatgaggatcaggaaaatgccatcgacaacagagagctgtcgcaggaggacgttgaggaggtctggcgctacgtcattctcatttacttgcaaacgattttgggcgtcccatcccttgaggaagttattaatccgaaacaggtgatcccacagtatatcatgtataacatggcaaacacgagcaaacgcggggtggttatattgcagaacaagtctgacgaccttccccactgggtactcagtgccatgaagtgtctcgccaactggcccaggagtaatgacatgaataaccccacttatgtcgggtttgaacgcgatgtgtttagaactatcgcggactattttctggacctgcctgaacctctgttaacatttgagtattatgagttgttcgtcaatatcctcggtctactgcaacctcatctcgagcgcgtggcgattgacgcgctgcagctttgctgtcttctgcttcctccaccaaataggagaaaattgcagctgctcatgcgtatgatttcaagaatgagccagaatgtggatatgcccaaactccatgacgccatggggacaagaagcctaatgatccacactttttctaggtgcgtcctctgttgtgcagaggaggtggacctggatgaacttctagcgggccggttggtgagcttcctcatggaccatcatcaggaaatcctgcaagtcccatcatacctacaaactgccgtagagaaacacctggactatctaaagaaaggccacattgagaatcccggtgatggactgtttgcgcctttgccaacctattcatattgtaagcaaattagcgcacaagagtttgacgagcagaaagttagcaccagccaggcggcaattgccgagttgttagagaacattattaaaaaccggagcctgcctttgaaagaaaaacgcaaaaaattaaaacagtttcaaaaggagtaccccctcatctatcaaaaacggttcccaactaccgagtctgaagctgcgctctttggggataagcctactatcaagcagccaatgctgatcctgagaaaacccaagttcagaagcctgcgctag

SEQ ID NO: 185223 - DNA, 2436 bp, synthetic construct
  misc_feature 1..2436: note = Description of Artificial Sequence: Synthetic coding sequence
  source 1..2436: mol_type = other DNA
atggagagccagggcgtgccccccggcccctaccgggccaccaagctgtggaacgaagtgacgacctcctttcgggccggtatgccgttgaggaaacaccggcagcacttcaaaaagtacggaaactgctttacagccggcgaggccgttgactggttgtacgatttactccgcaacaatagtaatttcggtcctgaagtgactaggcaacaaacaatccagctgctacgaaagtttctgaaaaaccatgtcattgaggacatcaagggtaggtgggggagcgagaatgtcgatgacaataaccagctatttcgcttcccagcgacatcccctctgaagaccctgcccagacgttaccccgaacttcgaaagaacaatatagaaaacttctctaaggataaggactccatctttaagctcagaaatctcagtcgcaggacccctaagagacacgggttgcacttaagccaggaaaacggggaaaaaataaagcatgaaattattaacgaggatcaggagaacgccatcgacaacagagagctgagccaagaggatgttgaggaggtgtggcgatatgttattctgatctacttacagacaatactgggagtaccaagtctggaggaggtgatcaatcccaagcaggtgattccccagtatattatgtacaatatggctaatacttccaaaaggggagtggttattttgcagaataagtcagatgatctccctcattgggtgctcagcgccatgaaatgcctggccaactggccacggtctaatgacatgaataaccctacatatgttggatttgaacgggatgttttcagaacaatagcggactacttcctggacctgccagaaccactgttaaccttcgagtattacgagctgttcgtaaatattctcgtggtgtgtggctatattaccgtgtctgataggtcttctggaatccataagatccaggacgacccccaatcttctaaattcctccatctgaataaccttaactcgttcaagtctactgagtgtctgctactgtctttgttgcatcgcgaaaaaaataaagaagagtcagattcgacggaacgtctccagatctcaaatccagggtttcaagagcgttgtgcgaaaaaaatgcagttggtgaaccttaggaacagaagggtgtccgccaacgacattatggggggatcttgtcataatctcataggcttatcaaacatgcacgatctttcaagtaacagtaaacccagatgttgcagcctcgaggggattgttgatgttccgggaaatagcagcaaggaggcttcatctgtgtttcatcagtcatttcctaatattgaaggacagaacaataagctatttttagagtctaagcctaagcaagagttcctgctgaatctgcattctgaagaaaacatccaaaaacccttcagcgcgggcttcaaacggacatccactctgaccgtgcaggaccaggaggagttatgcaatgggaagtgtaaatcgaagcaattatgccgatctcaatctctcctgcttaggtcctcaacacgccgtaatagctacatcaacacacctgtggccgagatcattatgaagcccaacgtgggacagggctcaacaagcgtccagaccgcaatggaaagtgaactgggcgaaagttctgcaacaattaacaaacgtctctgcaagtccaccatcgagctatccgagaactccttgttaccggccagctcaatgctaacaggaactcagagtcttttgcagccacacctggagcgggtggctatagatgctctccagctatgctgcttgctgctgcctccgcctaaccgcagaaagttgcagctgctgatgaggatgattagccgcatgagccagaatgtggatatgccgaagctccacgatgcaatgggcactcggtccctgatgattcatactttttcacgctgtgttctgtgctgcgccgaagaagttgatctggacgagctgctcgccggccgactcgtgagcttcctcatggatcatcatcaggagatacttcaggtgccgagttacctgcaaactgctgtggagaagcacctggattatctgaaaaagggtcatatagagaaccctggggacggcctattcgcccccctgccaacatattcctactgtaagcagatcagcgctcaagaattcgacgaacagaaagtttcgacttcacaggccgccatcgccgagctgctggaaaatatcataaagaaccgcagtctgccactgaaagagaagcgcaagaaactgaagcaatttcagaaggagtatcctctcatctaccagaaacggttccccaccacagaaagtgaggctgctctgttcggggacaagccaaccatcaagcaacccatgttaattttgaggaagccgaaattccgtagcctgagatag

SEQ ID NO: 185224 - DNA, 1590 bp, synthetic construct
  misc_feature 1..1590: note = Description of Artificial Sequence: Synthetic coding sequence
  source 1..1590: mol_type = other DNA
atggagcaccggatcgtgggccccggcccctaccgggccacccggctgtggaacgaaacagtcgaactgtttagagcaaagatgcctcttagaaagcatcggtgtcgatttaagagttacgagcattgtttcacagcagcagaagccgtggactggctgcatgagctgctgcgttgtagtcagaactttggacctgaagtcacccgtaagcagactgtccaactgttgaagaaattcttaaagaaccatgtgatcgaggatattaaaggcaaatggggggaagaggactttgaggacaaccgccacttatacagattccccccctcatcaccactgaagccataccctaaaaaaccgcctaatcagaaagacgtgattaaattccccgaatggaacgacctcccccccggaacctcccaggagaatattcctgtcaggccggtcgtgatgaatagtgagatgtggtataaacggcactccatcgcaattggagaggttccagcctgtaggctagtgcacaggagacagctgaccgaggcaaacgttgaggagatctggaagtccatgactctatcctacctgcagaagattctaggcctggattccttggaagaagtgcttgacgtgaaactagtaaatagcaaattcataattcataatgtctacagcgtgtccaaacagggcgttgtcattttagatgataagtctaaagaattgcctcactgggtcctttccgccatgaagtgcttagcaaactggcctaattgttccgatttgaaacagcctatgtatctagggtttgagaaagatgtgtttaagactatcgctgactattacggacacctcaaggagcccctgctaacctttcacctgttcgacgcttttgtctctgtgctaggattgcttcaaaaagagaaggtggccgttgaagcctttcaaatttgttgcctcctacttccccccgagaaccgtcggaaactccagttgctgatgcgcatgatggcgcggatctgtttaaataaggaaatgcctccgctatgcgacggattcgggacgcgaactctaatggtgcagacttttagtagatgtatcctgtgtagcaaagacgaagtggatctggacgaattgctcgcagctcgacttgtgacattcctgatggataactatcaagagatacttaaagtgcccttggcgctacagaccagcatcgaggagcgcgttgctcacttacgtcgtgtgcaaatcaaatatccaggcgcagatatggatataaccctatcagcacccagcttctgcagacagattagcccagaggaatttgaataccagaggagttacggatcccaggagccccttgccgccttattggaagaggtgatcacagatgctaaactgtccaataaggaaaagaagaagaagctgaaacaattccagaagtcgtatcccgaagtgtatcaagaacgattccctacccccgaatcagcagcgttgctgtttcccgaaaaaccaaagcctaaaccccagttactgatgtgggcacttaaaaaacctttccagccctttcagcgcacccggtcctttcggatgtag

SEQ ID NO: 185225 - DNA, 1404 bp, synthetic construct
  misc_feature 1..1404: note = Description of Artificial Sequence: Synthetic coding sequence
  source 1..1404: mol_type = other DNA
atggagcaccggatcgtgggccccggcccctaccgggccacccggctgtggaacgagacagtggagcttttcagggcaaaaatgcctctcagaaagcaccggtgcagatttaaaagctacgagcactgtttcactgcagcggaagcggtagattggctccatgagttgcttcgatgtagccagaatttcgggcctgaagtgaccagaaagcagaccgtgcagctgctaaaaaaatttttgaaaaatcatgtgatcgaggacatcaaaggcaagtggggcgaggaggattttgaagacaatcggcatctataccgtttccctccatcaagccctttgaagccatacccaaagaaaccaccaaaccagaaagacgtcattaaattccccgagtggaatgacttgccacctggcacatcccaggagaacatccccgtccgcccggtagtgatgaactctgaaatgtggtataaaaggcattcgattgcaatcggggaagtacccgcctgtcggcttgtccacaggaggcagttgactgaggcaaacgtggaagaaatttggaagagtatgactctgagctacctgcagaaaattctgggcctggattcccttgaagaagtcctggatgtgaagctcgtcaacagtaagtttataattcacaacgtgtactcggtctcgaagcaaggcgtggtgatcctcgacgataagagcaaggagctcccccactgggtgttaagcgcaatgaagtgtctagccaactggccgaattgcagtgacctgaaacagcctatgtatctgggcttcgaaaaggatgtgttcaagactatagccgattactacggacatctcaaggaacctctgctgactttccatctgttcgatgcctttgtttccgttctgggtctactccagaaggagaaagttgctgtggaggcgtttcagatctgctgtcttctgttgccccccgagaaccgtagaaaactgcagttgctgatgcgcatgatggcacgcatttgcctgaataaggagatgccacctctatgtgatggtttcggcacaaggacactgatggtgcagactttttcccgctgtatcctgtgctctaaagatgaagtggaccttgatgagttactggcagccaggctggtgacatttctcatggataactaccaagaaatccttaaggtgccactggctcttcaaacttccatagaagagcgggttgcacacctccggcgcgtccagttccagaagtcatatccagaagtctaccaggagcgcttcccaaccccagagtccgcagccctgctcttcccagaaaaaccaaaaccaaagcctcagttgctgatgtgggccctgaaaaagcctttccagccgttccagagaaccaggagcttccgcatgtag

SEQ ID NO: 185226 - DNA, 1323 bp, synthetic construct
  misc_feature 1..1323: note = Description of Artificial Sequence: Synthetic coding sequence
  source 1..1323: mol_type = other DNA
atgcccctgcggaagcaccggtgccggttcaagagctacgagcactgcttcaccgccgcggaagctgtggattggctccatgagctgctccgctgttctcagaactttggacctgaggtaactagaaagcagactgtgcagttgctgaaaaagtttcttaagaatcatgttatcgaggacatcaaaggcaagtggggggaggaagactttgaggacaatcgccacctgtaccggttcccacccagcagcccactgaagccttatccaaagaaacctccaaaccaaaaggatgtaattaagtttccagaatggaatgatctgccaccgggtactagtcaggaaaacattcctgtgcggccggtggtgatgaactcagagatgtggtataagagacactcaatcgccatcggagaggtgccagcctgtaggctcgtccacagacgccagttgacagaggctaatgtggaagaaatatggaaatcaatgaccctgtcttacctccaaaaaattctcggcctggactcgttggaggaggtccttgacgttaagctggtcaactctaagtttattatacacaatgtttactccgtcagcaaacagggcgttgtcattctggatgacaaatccaaggaactgccacattgggtgctaagcgccatgaagtgcctggcaaattggcctaactgctccgacctgaagcagccaatgtatttagggtttgagaaggacgtctttaagactattgcagactattatggacatcttaaggagcccctgctgacgttccatctctttgacgctttcgtaagtgttctgggccttttgcagaaggagaaggtcgctgtggaagcttttcagatctgttgcctgttactgcctccggagaataggagaaagttgcagctgcttatgaggatgatggcccggatctgcctgaacaaagaaatgcccccgctgtgcgacggattcggcactcgcaccctcatggttcagacgttctcgagatgtatcctgtgctcaaaggatgaggtggacctcgatgagctccttgctgctcgtctggtgactttcttgatggacaactatcaggagatactcaaagtgcctctcgccctccaaacctcaatagaagaacgagtcgcgcacttgcgcagagtccagtttcagaagtcgtacccggaagtgtatcaagagagattccccaccccagagagtgccgctctcctgttcccagagaaaccaaaaccaaagccccagctgctgatgtgggcactcaaaaagccctttcaaccctttcagcgtacccgttcatttaggatgtag

SEQ ID NO: 185227 - DNA, 4746 bp, synthetic construct
  misc_feature 1..4746: note = Description of Artificial Sequence: Synthetic coding sequence
  source 1..4746: mol_type = other DNA
atgcggaccaccaaggtgtacaagctggtgatccacaagaagggcttcgggggcagcgacgatgagctagtggtaaatcccaaggtgttccctcacatcaagcttggcgacattgtggaaattgcgcatcccaacgatgaatattctcctctgctcctgcaggtgaagtcactgaaggaagacctgcagaaggaaaccatatctgtggatcagaccgttacccaggtgttcagactccgaccttatcaggacgtgtacgtgaacgtagtagatccaaaggacgtcacactggacctagtcgagctgacgttcaaggaccagtacatcgggcggggggacatgtggcgcttaaagaaatccctcgtatccacttgcgcctacattacacagaaagtggagttcgccggcatccgggcacaggccggtgaactgtgggtgaagaacgagaaagtgatgtgcggctacatcagtgaggataccagagtggtcttcaggagtacctcggccatggtgtatatattcattcaaatgtcatgcgaaatgtgggattttgacatctacggagatctctatttcgaaaaagccgttaatggttttctcgccgatcttttcacaaaatggaaagaaaagaactgtagtcacgaagtaactgtggtgctgttctccaggactttttatgacgcgaaatccgtcgacgagttccctgaaatcaatagggccagcatcagacaggaccataagggcagattttatgaagatttttacaaggtcgtcgttcagaatgagcggcgcgaagaatggacctcccttcttgtgacaatcaagaaactatttatacagtaccccgtgcttgtccgattagaacaggccgagggctttccccagggggacaacagcacatccgcacagggcaactatcttgaagctatcaacctcagcttcaatgtgtttgacaaacactatattaacagaaacttcgacaggacaggacagatgtccgtggttattacccctggcgtgggagtttttgaagtcgaccggctacttatgatcctgactaagcagagaatgatcgacaacgggatcggggtggatcttgtatgcatgggtgagcagcccctccacgcagtgccactgttcaaattgcacaatcggtcagccccaagggacagccgactcggagacgattataacatccctcactggattaaccattcattctacacctcaaaatctcagcttttctgcaattcattcaccccaagaatcaaactggccggaaaaaagcctgcgtctgagaaggccaagaatggtcgcgataccagcctgggatctccaaaggaatctgagaacgccctcccaattcaagtcgactatgatgcctatgacgcccaggtcttccggcttccaggcccatccagagctcagtgtttaacaacatgccgatctgtgcgagaacgcgagtcccacagcaggaagtctgcctcctcttgcgacgttagttctagccccagccttccctctcgcacactcccaactgaggaggtgcgctcacaagcatccgacgatagcagtttgggcaagtctgccaacatactgatgatcccacaccctcacctacaccagtatgaggtgtccagctcattgggttacacctctacccgggacgtgctggaaaatatgatggagcccccccagagggacagttccgcgccaggccgcttccacgtaggcagcgctgagagtatgctgcacgttcgccccggaggttatactcctcaacgggccttaattaatcccttcgctccatcaagaatgcctatgaagttaacctccaataggcggaggtggatgcacacatttcctgtaggcccttccggcgaagccatccagattcatcaccagacgcgccaaaatatggccgagctgcagggatccggacagcgggaccctacacatagctctgcagagctcctcgaacttgcctatcatgaagccgctggccggcactccaattctcgccagccaggggacgggatgagctttctaaatttttcgggaactgaggagctgtccgtaggactgctcagtaactccggcgcagggatgaatccccgcactcagaataaagactcgctggaggacagcgtatccactagccctgatccaatactcacgctgtctgcccctccggtggtaccaggtttttgttgcaccgtgggcgtcgactggaaaagtcttacgactccagcatgtctcccattaactacagactatttccccgaccgtcagggccttcaaaacgattataccgagggctgctatgatttactcccggaagccgatattgatcgccgtgacgaggacggcgtccagatgaccgctcaacaggtctttgaggagtttatctgccagagactcatgcagggctatcagatcatagtgcaacccaaaacccagaaacccaacccagccgtccccccacccttaagctcatctccattatatagtcggggcctagtatctcggaacagaccggaagaagaggaccagtactggctctcaatgggtcgcaccttccacaaagttacgcttaaggataagatgatcaccgtgactcgatacctgcctaagtatccctacgagtctgcacagatccattatacctactctctgtgtcctagtcattccgactccgagtttgtgtcctgttgggtagagttctctcacgagcgcctggaggagtacaagtggaactatctggatcagtacatctgttccgctgggagtgaggatttcagtctgatcgagagtctcaagttctggaggactcgttttttactcctacccgcctgtgtcaccgcaactaaaagaattaccgagggcgaagctcattgtgatatttacggggacagacccagagccgacgaagatgagtggcagttattggatggatttgtgcggtttgtggaaggtcttaaccgaatcaggcggaggcatcgttctgatcgtatgatgcgtaagggcactgctatgaaaggcctccaaatgaccggccctatctctacccactccctcgaaagcacagcgccacccgtgggcaagaaaggaaccagcgcactctccgctctcctggaaatggaggcatcccaaaagtgtctgggggaacagcaagccgctgtgcacggcggtaaatccagcgcccagtcagccgagtcatcgtcagtggccatgacgccgacatacatggacagtccccggaaggtctctgtggaccagaccgcaactcccatgctggatggaacatccctgggaatctgcacgggacaatcaatggaccgtgggaacagccagacctttggaaatagccaaaacataggggaacagggctactctagtactaactcgagcgacagcagttcccagcaacttgtcgcctcctcactgacctcttcctcaacgctaaccgagattctcgaagcgatgaagcacccaagcaccggagtccaattgctgtccgaacagaaaggcttgagcccctattgcttcattagtgcagaggtggttcactggctcgtaaatcatgtggaagggatacaaactcaagccatggctatagatattatgcagaagatgttagaggagcagcttatcacccacgctagtggcgaggcttggcgcaccttcatctacgggttttacttttacaaaatcgtgaccgataaggagcccgacagggttgccatgcaacaaccagccaccacttggcacacagcgggggtcgatgacttcgctagcttccaacgaaaatggtttgaggtcgcgttcgtggcagaggagctcgtgcatagcgagatacccgcgttcttgctcccttggttgccctcgaggcccgcctcctatgcttccagacattccagcttcagtcgatctttcggaggcaggtctcaggccgccgccctgttagcagccacagtgcctgagcagagaaccgttacgctggacgtcgatgtgaataaccggactgacagactggagtggtgttcctgttactatcatggaaacttctcgttaaatgccgcctttgaaatcaaactgcattggatggccgttacagccgccgttctgttcgagatggtccaagggtggcataggaaggccactagctgtggatttctcctagtcccagtgctggaaggccctttcgcactgccgtcatatctgtatggtgacccactgcgcgcccaactttttatccccctgaacattagctgcctgctgaaggaaggttccgagcaccttttcgatagctttgaacccgagacctattgggaccgaatgcatcttttccaggaagctattgctcacagattcgggtttgtacaagacaaatactcagcatccgctttcaacttccctgcagagaacaaaccacagtatatacacgtcacgggaactgtcttcttgcagctaccatactccaaacgcaagttttcaggccagcagagacggaggcggaactcgacgagttcaacaaatcagaacatgttttgtgaagagagggtggggtacaactgggcttacaataccatgcttactaagacatggagaagcagtgccaccggggacgagaagttcgccgatagactgctgaaagatttcacagatttttgcattaatcgagataataggcttgtgactttctggacatcatgcttggagaaaatgcatgcttctgcgccctag

SEQ ID NO: 185228 - DNA, 3690 bp, synthetic construct
  misc_feature 1..3690: note = Description of Artificial Sequence: Synthetic coding sequence
  source 1..3690: mol_type = other DNA
atgcggaccaccaaggtgtacaagctggtgatccacaagaagggcttcggcggctccgatgacgagctcgtggtgaacccaaaggttttccctcacattaagctgggagacattgtggagattgcacatccgaatgatgagtacagccctctcctcctccaggtcaagtctctcaaggaggacctccagaaggaaactatctctgtcgaccaaacagtaacgcaggtgttcagactaaggccataccaggatgtctacgtgaacgtggtcgaccccaaggatgtaaccctcgatctagtggagctcacattcaaggatcagtacataggccgaggagatatgtggcggcttaagaagtccctggtgtcaacctgtgcatacataacccagaaggttgagtttgcaggtatacgagctcaggctggcgaactttgggtgaagaatgagaaggtgatgtgtggttacataagcgaagacactagagtggttttcaggtcaactagtgccatggtctatatcttcatccagatgagctgcgagatgtgggacttcgatatatacggcgatctttatttcgagaaagcggtcaatgggttcctggctgacctgttcaccaaatggaaggagaaaaactgttcccatgaagtaacagtggtgttgttctccagaaccttctatgacgcaaaatccgtggacgaatttcccgagattaaccgggcttcaataaggcaagaccacaagggaagattctacgaagacttttacaaggttgtcgttcaaaacgagaggcgggaagaatggacgtccctgctggtcacgatcaagaagctgttcatccagtaccctgtgctagtgaggttggaacaggccgaaggtttccctcagggggacaactcaacctcggcccagggcaactatctcgaggctattaatttaagtttcaacgtctttgacaaacactatatcaaccggaatttcgaccgtacaggtcaaatgtccgtggttatcacaccaggagtaggtgtcttcgaagtggacagactgctcatgatcctgactaaacagcgaatgatcgataacggaataggcgtagacttggtttgcatgggagagcagcctcttcacgcagtgccactttttaagctccataaccgctcagcccctagagattcccgtctcggtgacgattataatattccccactggataaaccacagcttctatacctctaaatcacagctgttctgcaacagcttcacccccagaatcaaactcgctgggaaaaaacctgcgtccgagaaagctaagaacggcagagacacctctctggggtctccaaaggagtctgaaaatgctctgcctattcaggtggactacgatgcatatgacgcccaagtcttcagactgcccggcccaagccgtgcccagtgtctcaccacatgtcgaagcgtccgggaacgggagtcccatagtaggaagagcgcatcatcctgtgatgtgagctcctcaccttctctgcccagcagaaccctgcccaccgaggaagtgcgatctcaggcgtcagacgattcttctctcggtaaatcagccaatatccttatgatccctcatcctcacctacaccaatatgaagtgagtagctccttgggctatacgtccacacgagacgttctggaaaatatgatggagccgccccagagagatagcagtgctcctggacgctttcatgtggggagcgccgagtcgatgctgcacgtgcggcccggcggatatacgcctcagcgcgccctcatcaatccttttgcgcccagcaggatgccaatgaagctcacgtctaatcgtaggcgttggatgcacaccttccccgtaggaatgaatcccaggacacagaacaaagacagcctggaagacagcgttagcacaagccccgacccaatcctaacattaagcgccccacctgtcgtccccggattctgttgcaccgtgggtgtcgactggaagtccctaacaacgcctgcttgcctgcccctgaccactgattacttccccgatcgacaggggttacagaacgattacacagaaggttgttacgatctgctgcctgaagccgacatcgaccgccgtgatgaggatggagtccagatgacggctcagcaggtcttcgaagaatttatctgccaacggctgatgcagggatatcaaatcatcgttcagccaaagacacagaagcctaaccccgcggttccccctccgctttcttcctcaccactctattctcggggcctagtgtctagaaaccgcccagaggaagaagaccagtattggctctccatgggccgcacttttcacaaggtaacccttaaggataagatgatcaccgttactagatacctccccaaatatccttacgagtctgcgcagatccattacacatactctctgtgtcctagccactctgacagcgagttcgttagctgctgggttgagttttcccacgagcggctagaggaatacaaatggaattatctggatcagtatatctgttcagccggatccgaagacttctccctaatagaaagtctcaagttttggagaacaagattcttgctgctacccgcatgtgtaacggctacaaagagaatcaccgagggtgaagcgcactgtgatatctatggcgaccgcccgcgggcagatgaggatgagtggcagttactggatggattcgtgcgtttcgttgaaggactgaataggatcagacggcgacacagatcggaccggatgatgcggaaggggactgccatgaagggtctccagatgacgggacctattagtacccacagcttggaatctacagcaccacccgtcggcaagaagggaacttctgctctgtctgccctgttggaaatggaagcgtcacaaaagtgcctgggcgagcaacaggcagccgttcacggggggaaatcatcagcccaatctgccgagagttcgtctgttgcgatgactccgacttatatggatagcccacggaaggatggcgccttctttatggagttcgtcaggtctccacggacggcatcctccgccttctatccgcaggtcagtgtggaccagaccgctactcccatgttagatggaacttccctgggtatttgtacaggccagtccatggacagaggaaattctcagacgtttggtaactcacaaaacattggggagcagggctactccagcacaaattcttccgactcttccagccaacagctggtggcttcatccctaaccagcagcagcacattaaccgagatacttgaagccatgaaacatccctctactggggtgcagttgctgagcgagcaaaaggggctcagtccttattgctttatcagcgcggaggttgtgcactggctggtgaatcatgtggaggggatccaaacccaggccatggcaattgatataatgcagtggccttgttcaagtcctcccccgcccggaacgcaacaagagtggaccacttcccctgcgagctcggctagcggcttgcggtggcccctgtggcagaaaagcagctgtacacttcgtttcctgcccttttcatgcccagggtgcctggccgggcagccacctatgcaggtgggtaccgcccccctcgctgaagtgctggaggatggagctagacggcagcacttttag

SEQ ID NO: 185229 - DNA, 4512 bp, synthetic construct
  misc_feature 1..4512: note = Description of Artificial Sequence: Synthetic coding sequence
  source 1..4512: mol_type = other DNA
atgcggaccaccaaggtgtacaagctggtgatccacaagaagggctttggaggaagcgacgacgagctcgtggtgaacccaaaagtgttcccccatatcaagctgggagacattgtggaaatcgctcacccaaatgacgaatacagccccctgttactgcaagttaaatctttgaaagaggatctgcaaaaggaaaccatctccgtggaccagaccgttactcaggtattcaggttgagaccgtaccaggacgtgtatgtgaacgtggtcgatcccaaagatgtgacactggatctggtggaactcacctttaaagatcagtacatcggtagaggagatatgtggcgtttgaagaaatccctcgtcagcacctgtgcctatatcactcagaaggtcgagttcgccggcatccgagcccaagccggtgagctgtgggtaaagaatgagaaagtcatgtgcggttacatcagcgaagacaccagagtggtctttaggtctacatcagcgatggtatatatctttatccagatgagttgtgagatgtgggattttgacatctacggcgatctgtactttgagaaagccgtcaacgggttcttggcagatcttttcaccaagtggaaagaaaagaactgttcacatgaggtaaccgtcgtgctcttctccaggacattttacgacgcaaaatcagtcgacgagttcccagagatcaaccgtgcctccatacggcaggaccacaaaggcagattctatgaggatttttataaggttgtggtccagaatgaacggcgcgaggaatggacaagcctgctggtgactataaaaaagctgtttatccagtacccagtgctagtgcggctggagcaggctgaagggttccctcagggagataatagcactagcgctcaaggaaattatctagaggcaatcaacttaagtttcaacgtttttgataagcactatataaatagaaatttcgataggacaggccaaatgagcgttgtgatcacgcccggagtaggggtatttgaagtggacagactactgatgatcctgaccaaacagaggatgatcgataatgggattggcgtggacttagtgtgcatgggcgaacagcctctgcacgcagtgcccctattcaaattgcataaccggtccgcccctagagactcccgtttaggagatgactataacatcccccactggattaaccacagcttctatacgagtaagagtcagctgttctgtaattcctttacccccaggattaagctcgcagggaaaaaacccgctagcgagaaggctaagaatggcagggatacctcactcggttctcctaaggaaagcgagaacgccctcccaattcaagtagactacgatgcctatgatgctcaagtgttccgcttaccaggcccttctagagcccagtgcctcaccacctgtaggtccgttcgggagcgggagtctcattcacggaaaagcgcatccagctgtgacgtgtcaagtagcccctcactgccatcacgaaccctgcccaccgaagaggtgaggagccaggcgagcgacgactcttctctcggaaagtctgccaatatcttgatgatcccccaccctcacctgcaccagtatgaggtgagttcatctctcggctacacaagtacaagggacgtgcttgagaacatgatggagcccccccagcgagactcatctgctccaggcaggttccacgtaggcagcgccgagtccatgttacacgtccgacctggcgggtacactcctcagcgggccctgattaatccctttgccccatcccggatgcctatgaagctgacttctaacagacgcaggtggatgcatacgttcccggtggaaacttcctgtttctacctcagcattggaatgaatcccagaacacaaaacaaggacagcctggaggatagcgtcagcacttcgcccgaccccatgcctggattttgttgtaccgtgggagtcgattggaagtccctaacgaccccggcttgcttgccacttactaccgactactttcctgaccgccaggggttacagaacgactacactgaaggctgttacgatctgttgccggaggccgatatagaccgccgggacgaggacggcgtccagatgaccgcccagcaggttttcgaagagttcatctgccagcgcctcatgcagggttatcaaatcattgtccagccgaaaacgcaaaagcctaacccagctgtaccaccccctctctcaagctctcccctctacagccgaggcctcgttagccgcaacaggcccgaagaggaagaccagtactggctgagcatgggacggaccttccataaagtaacattgaaagacaagatgattacggtgacccgctaccttccgaagtatccttatgagtcggcccaaatccactatacatatagtctttgcccaagccactccgattctgaatttgtctcttgctgggtggaattcagtcatgagaggctcgaagaatataagtggaattacctcgatcagtacatttgcagcgcgggttccgaagatttttccctgatcgagtccctgaaattctggcggacgcggttccttctgctgcctgcatgcgtgaccgccaccaagaggatcactgagggggaggcccactgcgacatttatggcgacagaccaagagcagatgaagacgaatggcaactgttagacgggtttgtcagattcgttgaaggactgaatcgaattcgcaggaggcatcgcagtgacagaatgatgaggaaggggactgcgatgaagggcctgcagatgaccgggcctataagcacccatagcctcgagtctactgcccctccggttgggaaaaagggaacctctgccctgtccgctctactggagatggaggcctctcagaagtgcctgggagagcagcaagctgcggttcacggaggaaagtcctccgctcagtctgccgagtcctcatcagtggcaatgacccctacttatatggacagtccacgaaaggtatcagttgatcaaactgccaccccaatgttagacggaacctccctgggcatttgtacaggccagtcaatggatcgcgggaactcccagacctttggtaattctcagaatattggagagcagggttattcctcaactaacagctctgacagctcctcccagcagttggtcgcgtcaagcctgacaagcagcagcaccctaactgaaattctggaagccatgaagcacccatcaacaggcgttcagctgctgtcagaacagaaggggctttccccgtactgtttcatttctgctgaagttgttcattggctggtcaaccatgtcgagggaatacagacacaggccatggccatcgacattatgcaaaagatgttagaagagcagctcattacacacgctagcggggaggcttggaggacctttatttatggcttctacttttacaagatcgtcaccgacaaagagcccgaccgcgtcgcaatgcagcagcctgccacaacctggcacacagcaggtgttgatgactttgcttcgttccagaggaagtggtttgaggttgctttcgtggcagaggagctcgtccacagcgaaattcccgctttcctgcttccatggctcccgtcgcggcctgcatcatacgctagcaggcattcctcattctcacgttcattcggtggacgctcccaagccgctgctctcctggcggctaccgtgccggaacagcgaaccgtcactctagacgtggacgtaaataaccggacagatcgccttgagtggtgttcttgctattaccacggaaacttctcacttaacgctgcctttgagattaaactgcactggatggctgtgacagccgcagtgctgtttgagatggtgcaggggtggcaccgtaaggccacaagctgcggcttcctgctcgtccccgtgcttgaagggcctttcgctctgccttcttacctctacggcgaccccctacgagcccagttgttcatccctctgaacataagctgccttctgaaggagggctccgagcatttgttcgattccttcgaacccgaaacctattgggaccgcatgcatttatttcaggaggccatcgctcaccgcttcggattcgttcaggacaaatactccgcttcagctttcaactttccggccgaaaacaaaccccagtatattcatgtaactggcacggtgtttcttcaactaccatactcaaagaggaaatttagcggccaacaaagaagacggagaaattcgacatccagcacaaaccaaaatatgttttgtgaagaacgcgtgggatataattgggcttataacaccatgctgaccaagacctggagatcatccgcaaccggcgacgagaaattcgccgacagactgcttaaagatttcacagatttctgcatcaacagggataaccgactggtcaccttctggacctcctgcttagagaaaatgcatgccagtgcaccatag

SEQ ID NO: 185230 - DNA, 1680 bp, synthetic construct
  misc_feature 1..1680: note = Description of Artificial Sequence: Synthetic coding sequence
  source 1..1680: mol_type = other DNA
atgcggaccaccaaggtgtacaagctggtgatccacaagaagggctttgggggctctgacgacgaactcgttgtgaaccccaaagtgtttccacatatcaaactgggggatatagtggagatagcccaccctaatgatgagtactcccctctcctgcttcaggtgaaatctctgaaagaggatcttcaaaaggaaacaatatcagtcgaccaaaccgtcacgcaagttttccgtcttcggccctaccaggacgtgtacgtcaacgtggttgaccctaaggacgtgactctggatttggtggagttaaccttcaaggaccagtacattggccgtggagacatgtggcgccttaagaagtccctggtatcaacatgtgcctacataactcagaaggttgagtttgccggaatcagggcccaagccggcgaactgtgggtcaagaacgagaaggttatgtgcggttatatctctgaagatactagagtcgtgttcagatccaccagcgccatggtctatatttttattcaaatgtcttgcgaaatgtgggatttcgacatttacggcgacttatattttgagaaggccgttaacggttttctggcggacctgttcaccaaatggaaagagaaaaattgtagccatgaagtgacagtagttctgttctctcgtaccttctacgatgccaagagcgtcgacgaatttcccgaaatcaaccgcgcctccatacgacaagatcataaaggccgattctacgaggacttctacaaggtggtggtacaaaatgaaagacgagaagaatggaccagtctactagtgacgatcaaaaagcttttcatccagtatccggtgctagtacggctggagcaggcagaggggtttccccaaggagacaattcaacatcagcccagggcaattatctggaggctatcaacctgagcttcaatgtcttcgacaaacactacataaacagaaactttgacaggacaggtcagatgtcggtggtgatcactccaggggtcggggttttcgaagtggaccggttactgatgatccttaccaaacagaggatgattgacaacggaatcggggttgacctggtgtgcatgggcgagcagccactgcacgccgtgccgctgtttaaactccacaatcgctcagcaccaagagactcacgactgggagatgactacaacattccacattggataaatcattccttctacacctccaagtctcagctgttttgcaactcctttacccctaggatcaagctcgccggtaaaaaacccgcctctgagaaggctaagaatggacgcgacactagtctgggtagccctaaggaatccgagaacgcacttcccatccaggttgattatgatgcctacgatgcccaagtgttcaggttgcccggcccgtcaagggcacagtgtctgactacatgccgctccgtgagagagagagagagccattctaggaaatctgcctcctcttgtgacgtgagttcctccccctctttaccaagccgcactttacccactgaagaagtgagaagtcaggcatcagacgactcctcccttgggaagagcgccaacatcttaatgattccccacccccatcttcatcaatatgaggtatcttcttcacttggatacacctccacgagggagcacctgggctag

SEQ ID NO: 185231 - DNA, 4659 bp, synthetic construct
  misc_feature 1..4659: note = Description of Artificial Sequence: Synthetic coding sequence
  source 1..4659: mol_type = other DNA
atgcggaccaccaaggtgtacaagctggtgatccacaagaagggcttcgggggatctgacgacgaactggtcgtgaacccaaaggtcttcccccacataaagctgggggatatcgttgaaattgctcaccccaacgacgaatattctcccctacttcttcaggtgaaatctctcaaagaggatctgcagaaagaaaccattagcgtagatcagaccgtgacacaggtattccgcctgcgcccctaccaagacgtgtatgtgaatgtcgtcgatccaaaagatgtgacgctcgacctcgtggaactgacttttaaggaccaatatattggccgtggcgatatgtggcggttgaaaaagtctttggtttccacatgcgcctacattacacagaaggtggagttcgccgggatacgggcccaggccggcgagctatgggtgaaaaacgagaaggtcatgtgcggctacataagtgaggacacccgggttgtctttaggagcaccagcgcgatggtctatatcttcatccagatgagctgtgagatgtgggattttgatatttacggcgacttatatttcgagaaagccgtgaacgggttcctggccgatctctttactaagtggaaggaaaaaaactgctctcacgaggtgaccgtggtgctcttctcaaggaccttttacgacgccaagtcggtggacgagttcccagaaattaaccgggccagcatccgacaggatcacaagggtcggttttatgaggatttctataaagtagtggtgcagaacgaacggagagaagaatggacatctcttctggtgactataaagaagctgtttatacagtatccagtgttggtgcgccttgaacaggctgagggatttccacaaggggacaattctaccagcgcccagggaaattacttagaggcaataaacttgtcattcaatgtcttcgacaagcactatattaacagaaatttcgatcggaccggtcagatgagtgtcgtcatcacaccgggcgtaggtgtctttgaagtggatcgactgctcatgatactaaccaagcagcgcatgattgataatggaataggcgtggatttggtttgtatgggggagcagcctctccatgctgtgcctctttttaagcttcacaaccggagtgctccacgggactcaagattaggggatgactataatatcccccactggattaaccatagtttctatacaagtaaaagccagctcttttgtaattccttcaccccaagaataaagttggcgggcaagaagccagcgagcgagaaagccaagaatgggcgggacacatctctcggcagtcccaaggagagcgaaaacgcactgcctatacaggtggactacgacgcatacgacgcccaagtcttccgactcccaggaccatcaagggcacagtgtctgacaacatgccgtagtgtgcgagagcgagagagccattcccgcaagagtgcctcgagctgcgatgtgtcctcttctccaagcttaccttctagaacactgcccacggaagaagtacggtcccaggcatctgacgatagttctcttgggaaatcagccaatatcctgatgatcccgcatcctcacctgcaccagtacgaagttagttcgtctttggggtatactagcacaagagacgttctcgagaacatgatggagcctccccagagggatagttccgcaccagggaggttccacgttgggtctgccgaatctatgctccatgtgcgtcccggcgggtacacaccccagagagccttgatcaatccttttgctccctctagaatgcctatgaaactgacgtctaaccgccgtagatggatgcacacattccccgtgggacccagcggagaggcaatccaaattcatcaccagactcgacagaacatggccgagcttcaggggagtgggcaaagagatcctacccacagcagcgctgagctgctggagctcgcttaccatgaagccgccggaaggcacagcaattcaagacagcccggggatggtatgtcctttctgaatttcagtggaaccgaagaactctcagtgggcctgctgtctaatagcggagccggcatgaaccctaggacccaaaacaaggactccctggaagatagtgtgagcacttcaccagaccccattcttactctgagcgccccgccagtcgtcccggggttctgttgcactgttggagttgattggaagtcccttacaactcccgcgtgtttaccactgactaccgattactttcccgataggcaaggactgcaaaacgattacactgaaggatgttacgatctccttcctgaagccgacattgacaggcgggacgaagatggcgtgcagatgacagcccaacaggtgtttgaggagtttatctgccagcgcttgatgcagggttaccagattattgtccagcccaagacacagaaacctaacccggcagtccctccccccttgtcgtcatctcctctgtacagccgaggtctggtttcgcgcaaccggccagaggaagaggaccagtattggttatctatgggacggacatttcacaaggtgaccttgaaagataagatgattactgtcacaagatatttgcctaagtacccctatgaatctgcccagatccattatacctactcactgtgcccttctcattcagacagtgagttcgttagctgctgggtcgagttctcccatgaacggctggaggaatataagtggaattacctagaccagtacatttgtagtgctggctccgaggactttagcctgattgaatcactgaagttctggcgaacacggtttctactcctcccggcctgtgtgacggcaacaaagaggatcacagaaggagaggcccattgcgacatctacggagatagacctcgggctgacgaagatgagtggcagctgctggacggcttcgtgcggtttgtggaaggtctgaaccggatccggcgtcgccacaggagtgaccgtatgatgcggaagggtacggccatgaaagggctacaaatgacgggccccatctcaacgcatagcctggaatccacagcccctcctgtcgggaaaaaggggactagcgcactctccgctctcctggagatggaggcctcacaaaagtgtctgggcgaacagcaggcagctgtccacggtggaaagagctcagctcagagtgccgagtctagctccgtcgcaatgacccccacttatatggattcccccagaaaagacggggccttcttcatggagtttgtgcggagtccccggacagcttcttccgctttctaccctcaggtttccgttgatcaaactgctactcccatgctcgacggtactagtcttggaatctgcacaggacagagcatggatcgcggtaactctcaaacctttggtaattcacaaaacatcggcgaacagggctactccagtaccaactcttcagactccagctctcagcaattggtggcctcaagcctcaccagcagctccacgctcaccgagatcttagaggccatgaaacacccaagcactggcgtccagttgctgtcagagcagaaaggtctgagcccatactgtttcataagtgccgaggtggttcactggctggtcaatcacgtcgaagggatccagactcaggcgatggccatcgatataatgcagaaaatgctggaggagcagctcatcacccatgcaagcggggaagcctggcggacctttatatatggcttctacttttacaaaatcgtgactgataaggaacccgaccgggtggctatgcaacagcctgcaaccacatggcacactgctggcgtggacgacttcgcctctttccagcgcaagtggttcgaggtggctttcgtggccgaggaacttgtgcactccgaaatcccagcgtttctccttccatggttaccaagcaggcccgcctcatacgccagcaggcactcaagtttttcacgaagctttggtggaagatcgcaggctgcagccttgctggccgccacagtaccagaacagcgaacagtcacccttgacgtagacgtaaataaccggaccgacagattagagtggtgctcatgttactaccacggcaacttctctcttaacgccgccttcgaaatcaagctgcactggatggctgtcactgccgctgtactgtttgaaatggtgcagggctggcaccgaaaagctacctcgtgcggctttctcctcgtacccgtgttggaagggccctttgcccttccttcctatctgtatggcgacccattgagagcccagctcttcattcctctcaacattagctgcttgctcaaggaagggtcagaacacctgtttgattctctgggactttataagattaatatactgcctttgctcctgacgagtctcttacgcactagtctatcaataagtacactgcaggaacaatgtttttgcagttgccccactcctagcgccagctcccaaggaagttctggaggcggcgggactcctcctgcacctccgactcggacctgctccgctcgctccggctcagccactacaggccccacaaccccttgtagcccaaaacacggcgcacctgctccacaggggatgaagagcctattgataggctgttag

SEQ ID NO: 185232 - DNA, 4719 bp, synthetic construct
  misc_feature 1..4719: note = Description of Artificial Sequence: Synthetic coding sequence
  source 1..4719: mol_type = other DNA
atgcggaccaccaaggtgtacaagctggtgatccacaagaagggctttggagggtctgatgatgaactcgtcgtcaatccaaaggtttttccccacatcaagttgggcgacattgtcgaaattgcccaccctaacgatgagtactcacccttactgcttcaagttaaaagccttaaggaggatttacaaaaagaaacaatttctgtggaccagaccgtgacgcaggtgtttaggctgcggccctaccaagacgtgtacgtcaatgttgtcgaccccaaggacgtaaccctcgatctggtagaactgacatttaaagatcagtatatagggcgcggcgacatgtggaggctgaagaaaagcctcgtgtccacctgcgcttatatcacccagaaagtggagttcgccggcattcgcgcccaggccggggaactgtgggtgaaaaatgaaaaggtcatgtgtggatatatttctgaagacacgagagtagtattccggtccacctccgcaatggtttacatcttcatccagatgtcgtgtgagatgtgggattttgacatctatggggatttgtatttcgagaaagcggtcaatgggttcctcgctgatttgttcaccaagtggaaagagaagaactgtagccatgaagttaccgtggtgctcttttctcgaactttctacgatgctaagagcgtcgacgagttccccgagatcaatcgggcgtctatacgccaagaccacaaggggcgattctatgaagacttctataaagtcgtggtccagaacgagagaagggaagagtggacttctctcctcgttacaattaaaaaactcttcattcagtatccagtcctcgtacggcttgagcaagccgaaggatttccccagggtgataattccacctctgcccaggggaattacctcgaagccatcaatttatccttcaatgtgttcgataaacactacatcaacagaaatttcgatagaacagggcaaatgtctgtggtgatcacccccggtgttggggtttttgaagtggaccgcttattaatgatcctgacaaaacaaagaatgatcgacaacgggatcggcgtggacctcgtgtgtatgggtgagcaaccacttcacgctgtgcccttgtttaaacttcacaatcgtagcgccccccgagactctcggctcggggatgattacaatataccccattggattaatcacagcttctacacttctaaaagtcaactgttttgcaatagttttacccctcgcatcaaactggccggtaagaagccggccagcgagaaggcaaaaaacggacgtgatacaagcctgggatctcccaaggagtctgagaacgccctgccgatccaagtggactatgacgcttatgatgcgcaagtatttcgcctccccggcccctccagggcccagtgtcttacaacctgccgaagtgttagagagagggaatcccatagtcggaagagcgcgtctagctgtgacgtcagttcatctccatcattgccttcacgcacactgcccaccgaggaggtacgctctcaggccagtgacgacagctctctcggcaagagcgccaacattctaatgattccacacccacacttacaccaatacgaagtttcctcttccctcggatatacgtccactcgcgacgtgcttgaaaatatgatggagcctccccaaagggattccagtgcacctggaaggtttcatgtggggtctgctgagagcatgctgcatgtgcggcctggcggatacacaccccagagagcactgattaacccatttgctccctccaggatgcccatgaaactgaccagcaacagacgccggtggatgcacaccttccctgtgggaccttcgggagaggcgatacagatccatcatcagaccagacagaacatggcggaattacaaggtagtggacaacgagatcccacccactcaagtgccgaactgcttgagttggcttatcatgaggccgccggccggcatagcaattctcggcagccaggtgatggcatgtccttcctgaacttttctgggacggaagagctgtctgtgggccttttatcgaatagcggcgccgggatgaatcctagaacacagaataaggattcgttagaagactcagtgtctaccagcccagatcccatgcctggcttttgctgcactgtcggcgtagactggaagagcctgacaactcctgcatgtctcccactcacaactgactattttcctgatagacagggactgcagaatgactacacggaaggatgctatgatctgctccccgaagccgacattgacagacgggatgaggatggcgtccaaatgactgcccagcaagtattcgaggaatttatttgtcagagattaatgcaaggataccaaattatcgttcagcctaagacccagaagcctaacccagctgtaccgccgcccctaagctcatcccctttgtatagcaggggtctggtatcccgcaaccgccccgaagaagaggaccagtactggctcagcatgggccggacctttcacaaagtgactctcaaggataaaatgatcactgtaacccgttacctccctaagtacccctatgagtcagcccaaattcactacacgtactctctgtgcccctctcattcggattcagagttcgtttcctgttgggtggaattcagccacgagcgtctggaggagtacaaatggaactatctcgatcagtacatctgcagcgctgggagcgaggatttctccctgatcgagagtcttaaattctggcgtaccaggttcttgctgctgccagcttgtgtgactgctacgaagcgcatcacagaaggggaggcccactgtgatatctacggcgaccggcctcgggcagacgaagacgaatggcagctactcgacggcttcgtaaggtttgtggagggtttaaataggattcgccgcaggcaccgcagtgatcggatgatgagaaagggtactgcaatgaagggccttcagatgactggacccatcagcacacatagcctcgagagcaccgcaccacctgttggtaaaaagggcacctctgctttatcagccctgctggagatggaagcttcccagaagtgcctgggggagcagcaggccgctgtgcatggaggaaaatccagtgcccagtctgccgagtcatcaagtgtggctatgacccccacatacatggactcccccagaaaagtcagcgtggaccaaactgccacccctatgctggacgggactagtctcggcatatgtactgggcagagtatggaccgagggaatagtcaaacattcgggaactcccaaaatataggagaacagggttatagtagcacaaacagctctgactcaagcagccagcagctcgtagccagctcgcttacaagctcttctacgctgactgaaatcctggaggccatgaaacatcccagtactggtgtccagcttttgtccgagcaaaaaggactctcaccttactgttttatctccgccgaagtcgtccattggttggtgaaccatgtagaagggattcagacccaggcaatggctatcgacatcatgcagaagatgctggaggagcaattaattacccatgcttccggcgaggcatggaggactttcatttacggcttctacttttacaaaattgtgacagataaggaaccagaccgtgtcgcaatgcagcaacctgcaactacatggcatacagctggcgtagatgacttcgccagcttccaacggaaatggtttgaagttgccttcgttgccgaggaactggtgcacagtgagatccctgcgttcttattaccgtggctgccatctagacccgcctcctatgcttccaggcattcaagttttagccggagcttcggagggcgcagccaggccgccgcacttctggcagctactgtaccagagcaacggaccgtcacacttgacgttgatgtcaataatcgcacagacagactcgaatggtgttcatgctactaccacggaaacttcagcttgaacgcagcttttgaaatcaaactccactggatggcggtcacagcagcagttttattcgagatggtgcagggctggcataggaaggctaccagttgtggctttcttctcgtccccgtgctggaaggcccattcgccctacccagttatctgtacggggaccccctaagggcccaactgtttataccactgaacatcagttgtctgctgaaggaaggatccgaacacttgtttgactcattcgagcctgaaacttattgggatagaatgcatctgtttcaggaggccattgctcatcgatttggattcgtccaggataaatacagcgcatcggcttttaactttcccgctgaaaataaaccccagtatatccacgtgacaggcaccgttttcttacaactgccctacagcaagcgcaaattttcaggtcaacagagacgacgtaggaactccacgtctagcacaaaccaaaacatgttttgcgaggaacgagtcgggtataattgggcttataatactatgctgacgaagacatggcgctctagcgcaaccggagatgaaaagttcgccgatcggctgttaaaggactttacagacttttgcatcaatcgcgataacagactggttacattctggacaagctgcctcgaaaagatgcacgcgagcgcaccgtag

SEQ ID NO: 185233 - DNA, 4719 bp, synthetic construct
  misc_feature 1..4719: note = Description of Artificial Sequence: Synthetic coding sequence
  source 1..4719: mol_type = other DNA
atgcggaccaccaaggtgtacaagctggtgatccacaagaagggcttcggtgggagtgacgacgaactagtggtgaatccaaaagtctttccgcatatcaagctgggcgatatcgtcgaaattgcccaccccaacgacgaatactctccgttgctcctacaggtcaagtccttaaaggaagacctgcagaaagagacaatctcagtggatcagactgttacccaagtatttagactacgcccttaccaggacgtttatgtgaatgttgtcgacccgaaagacgtgactttggacttggtggagctcactttcaaggaccagtacatcggaagaggtgacatgtggcgcctgaagaagagcctcgtgagtacatgcgcttacataactcaaaaggtcgagtttgctggaatccgggctcaagccggggaattatgggttaaaaacgaaaaagtgatgtgtggatatatctctgaggatacgagagtggtgtttcgctccacctccgccatggtgtacattttcatccagatgagctgcgagatgtgggatttcgacatctacggggatttgtactttgagaaagccgtcaacggatttttggccgatctgttcactaaatggaaagagaagaattgtagtcatgaagtgacggtcgtgctgtttagccgtacattttacgatgctaaatctgtggacgagtttcctgagattaatcgagcttccataaggcaagaccacaaaggtaggttttatgaagatttctataaggtcgtggtacagaatgaacgaagagaagagtggacgagcctgctggttaccataaagaagctgtttatacaatatcctgtgctggtgcgcctggaacaggccgaaggattcccacagggagataatagcacatctgcccagggaaactatctcgaggcaatcaacctgagtttcaacgtgtttgataaacattacataaacaggaactttgatagaactggccaaatgtccgtagtcatcactccaggggtgggggtatttgaagtcgaccggttgcttatgattctgactaaacaaaggatgatcgataacgggattggggtcgacctggtgtgtatgggggaacagcccctacatgctgtgccactctttaaacttcacaacaggtccgcccctcgagacagtagactaggagacgattataacatcccacactggatcaatcattctttctatacctctaaatcacagcttttctgcaatagcttcactccacggatcaagctggctggaaagaagcctgcgagtgaaaaagctaagaacggccgagatactagccttggaagcccgaaagagagtgagaatgcgttgcccattcaggtcgattacgacgcgtatgacgcccaggtttttcggctgcccggcccatctagggctcagtgtctgaccacttgtaggtcagtacgagagcgagagtcccactcccggaagtctgcaagctcatgtgacgtgagttcctctccaagcctgccatctcggactctgccaacggaagaggtgcgaagccaggcgtcagacgattccagccttgggaaatccgccaacattctgatgatcccacatccccatctacatcagtacgaggtgagctcatcgctgggatacacaagcacgagagacgttttggagaatatgatggagcctccacagcgtgacagcagcgctcctgggaggtttcacgtcggatcggcggagagcatgctgcacgttaggcctggaggctacactccacagcgggccctcatcaatcccttcgccccatcgagaatgcctatgaaacttacgtcaaacagacgacgatggatgcacacctttccagtgggcccttcaggcgaggcaatccagatccatcaccagacccgacaaaatatggcagaactccagggctccgggcaacgagacccaactcactcaagtgcagagcttttagagctggcttaccacgaggccgcagggagacactccaattcgcgacagccaggcgacgggatgtcttttttaaatttctcaggaaccgaggaactttctgtcggcctgctgtccaactccggcgctggcatgaatccgcgtacccagaataaggactcactggaggattcggttagtaccagccccgatcctatgcccgggttttgctgcaccgtcggggtcgattggaagagtttgaccactcccgcctgcctcccactgaccaccgactacttccctgacagacaagggctacagaacgattacacggaaggttgctatgatttgttacccgaagctgatatcgatcgaagggacgaagatggtgttcagatgaccgcacagcaggtctttgaggaattcatctgccagagactcatgcaaggataccagattattgttcagcccaaaacacagaagcctaacccagcagtgccacctcccctgtcttctagcccgctgtactcacgaggccttgtttcccgaaaccgtccagaagaggaggatcagtattggctctccatgggacgcacatttcataaggtgactttgaaggacaaaatgatcacagtgactagatatctacctaaatatccctacgaatccgcccagattcactatacctatagtctgtgcccctcccacagcgattcagagttcgtctcatgttgggtcgaattttcccatgagagacttgaggagtataaatggaactacttagaccagtatatctgttccgcagggagcgaggatttctcactgattgagtcgctaaaattttggcgaacgcgcttcctgctcttgcctgcctgtgtgactgccaccaagagaatcactgaaggcgaagcacactgtgacatttatggggataggccccgggccgacgaggatgagtggcaacttcttgacggtttcgtgcgattcgtagaaggcctgaaccgtattcgtagaagacaccgctccgatagaatgatgagaaagggcactgcaatgaaaggtctccagatgacaggcccaatttcgactcatagccttgagtctactgcacctcctgtgggcaaaaaagggacgtcagctctttctgcactactggagatggaagcctcccagaagtgcctgggagagcagcaggctgccgtgcacggggggaagagctctgcacaatcagcggagtccagctccgtggctatgacccccacatacatggatagccctcggaaagtgtcagttgaccagaccgctacccctatgctggatggaacctcccttggcatctgcactggccagtctatggatagagggaactcgcagacgtttggaaattcacaaaatatcggcgagcagggatacagttccacaaattcaagtgattcctcctcacagcagctggtggcctcctcgttgacgtcgagctcgaccctgaccgaaattctcgaagcaatgaagcacccaagcacaggtgtccaactgctgagtgagcagaaaggcttgagcccctattgtttcatcagcgctgaggtcgttcattggctggtgaatcacgtcgagggaattcagacccaagccatggcaattgacatcatgcagaagatgttggaagagcagctcattacacatgcgagcggggaggcttggcgcacttttatttatggcttttacttctacaaaatcgtcactgacaaggaacctgacagagtagcaatgcaacaaccagcaacaacctggcatactgcaggcgtggatgatttcgccagcttccagcgaaaatggtttgaagttgctttcgtggcagaggagttggtgcacagcgagatcccagcgttcctacttccttggctcccctccagaccggcgtcttacgcatcccggcactctagtttttcccggagcttcggcggcagaagtcaggcagcggcgttgctcgctgctacggtgcctgagcagagaacagtcactctggatgtcgacgtgaataacaggaccgacaggcttgagtggtgcagctgttattatcacggcaatttctcgttaaatgccgcctttgagatcaaactgcattggatggccgtaaccgctgctgtgcttttcgaaatggtgcaaggctggcacaggaaagccaccagctgcggcttcctattagtgccagtgcttgagggaccgttcgcgctaccatcctacctttacggcgaccctctgcgcgcgcagttgttcatccccctcaacatttcttgccttctaaaagaggggtctgagcacctgttcgactcctttgagcccgagacatattgggaccggatgcatcttttccaggaagcaatcgcccaccggttcggattcgtccaggacaagtatagtgcaagtgcttttaacttccccgctgagaataaaccccagtacatccacgtgacaggaaccgtcttcctgcaactgccttatagtaagcgcaaatttagcggacagcaaagacggcgccgaaacagtaccagttctacgaatcagaacatgttttgtgaagaacgggtggggtacaattgggcctacaataccatgctgacaaagacctggagatcgtctgccacaggtgacgaaaagttcgccgatcgcctgctaaaggacttcaccgatttctgcattaacagggataatcgacttgtcaccttttggacctcctgcctggagaaaatgcacgcgtcggccccctag

SEQ ID NO: 185234 - DNA, 138 bp, synthetic construct
  misc_feature 1..138: note = Description of Artificial Sequence: Synthetic coding sequence
  source 1..138: mol_type = other DNA
atgcggaccaccaaggtgtacaagctggtgatccacaagaagggctttggtggatccgacgacgagctcgtggttaatcctaaggtgttcccacatatcaaactcggcgacatagtggagatagcccaccctaactag

SEQ ID NO: 185235 - DNA, 4512 bp, synthetic construct
  misc_feature 1..4512: note = Description of Artificial Sequence: Synthetic coding sequence
  source 1..4512: mol_type = other DNA
atgcggaccaccaaggtgtacaagctggtgatccacaagaagggcttcggaggctcagacgacgagctagtggttaaccctaaggtgtttcctcatattaaactcggagacattgtcgagatagcacacccaaatgacgagtatagtcccctgctcctgcaagtgaaaagcctgaaggaagacctgcagaaggagaccatttctgtcgatcagaccgtgacgcaggtgttccgcctgcggccctaccaggacgtctacgtcaatgtcgtcgatcctaaggacgtaacactcgacttggtggagctgaccttcaaggatcagtatatcggtcgtggcgatatgtggcgcctgaaaaagagcctcgtttcaacgtgcgcctatattacacagaaagtcgaatttgcaggcattagagcgcaggctggcgaattgtgggtcaagaacgaaaaagtgatgtgtggctatatttcggaagatacccgcgttgtgtttagaagcacctcagcgatggtttacattttcatacagatgagctgtgagatgtgggatttcgacatttacggagacctgtactttgaaaaagctgtgaatggattcctggcagatttattcacaaagtggaaggagaagaactgtagtcacgaggtgactgtagtgctgttcagtaggactttttacgacgcaaagtccgtcgatgagtttccagaaattaacagagctagtattcggcaggatcataaagggagattttatgaggatttctataaggtggtggtgcagaacgagagacgggaggagtggacaagcctcctggtgaccattaagaagctcttcatccagtatcccgtcctcgtccgtttggaacaggccgagggatttccacagggcgacaattctaccagcgcgcagggcaattacctggaagcaattaacctcagcttcaacgtgttcgataagcactacatcaacagaaattttgatagaaccggccagatgagtgtggtaattacacccggggtaggggtgttcgaagtagaccgcctgctgatgatcttgaccaagcagcgtatgattgacaacggaatcggcgtggacctggtgtgcatgggagagcagcctctccacgcagtccctctattcaaactgcataacagatcagctccacgtgattctagactgggagacgactataatatccctcactggatcaaccactcattctatacatctaaaagtcagttattttgcaactctttcaccccgcgcatcaaactcgctggaaaaaagccggcgagcgagaaagccaaaaacggacgtgatacaagtctcggttctccaaaggaatccgagaacgcattgccaattcaggttgattacgatgcctatgatgcgcaggtgttcaggctacctgggccgtcaagggctcagtgccttacaacatgcagaagcgtcagggagcgagagtctcattctcggaaaagcgcatctagctgcgatgtatctagcagcccttcactacctagccggaccttgcccaccgaggaggtgcgcagccaagccagtgacgacagtagcctgggtaagagcgctaacatcctgatgatcccgcacccccacttacaccagtacgaagtgtctagctccctcgggtatacttccacacgagacgtgctggagaacatgatggagccaccgcagagagattccagcgccccaggcagattccatgtggggagcgctgagtcaatgctccacgtaaggcccggaggatatacgccacaaagggccctcattaacccattcgctccatctagaatgcccatgaagctgacatcaaatcgtcggagatggatgcacacattcccagtgggtatgaaccccaggactcagaataaggactccctggaagatagcgtgtcaaccagccccgatccaatactcactctctcagcaccccctgtggtccctgggttttgttgcacagtcggggttgactggaagtctctcacgacccccgcctgtctcccactgactaccgactatttccctgaccgacaggggctgcagaatgattacaccgagggctgttacgacctgttacccgaggcggatatcgacaggcgtgatgaagatggcgttcagatgactgcacagcaggtgtttgaagagtttatttgtcaaagactcatgcagggatatcagataattgtacagcctaagacccagaagcctaatccagcagtccctccacccctgagctccagcccactctactctcgcggtctggtgtcccgtaacaggccagaggaagaagatcagtactggttgagtatgggccgaacgttccacaaggtgactctgaaggataaaatgatcacagtgactcgttacctccccaagtatccttatgagtctgcacagatccactacacctatagcctctgtccatcacatagtgattccgaattcgtgagctgttgggttgagttcagccacgagcggttggaggaatacaaatggaattatctcgaccagtacatctgctcagctggtagcgaagattttagcctgattgagtccctcaagttctggcggacccgctttctcttgctgccagcatgtgtcaccgccaccaagcggattacagagggcgaagcccactgcgatatctacggggacagaccccgcgccgacgaggatgagtggcagctgcttgatggcttcgtgcggttcgtggagggcctcaaccgcatccgcagaaggcatagaagtgacagaatgatgagaaaggggacagccatgaaggggttgcagatgacaggccctatttctacacattccctggagtctaccgccccgcccgtgggtaagaagggcaccagtgcgctttctgccctcctggaaatggaagcaagccaaaaatgcctgggagagcagcaggccgccgtgcatggcggcaagagtagtgcacagtcagctgagagcagctccgtagctatgacacccacctatatggactccccacggaaagtatccgtagaccagaccgccacaccaatgttggacggtaccagccttggtatctgcactggacaaagcatggatcgcgggaactctcaaacgttcggcaatagccaaaacatcggtgagcagggttatagctccacaaattcttccgactcctcaagtcagcagctggtggcaagctccttgacttctagctccactctgacagaaatcctcgaggcaatgaaacaccctagtacgggcgtacagctcctctcggagcaaaagggactttccccttactgtttcatttcggccgaagtcgtacattggttggttaatcacgtggagggtatccagacgcaagcaatggcaatagacataatgcagaagatgttagaagaacagctgattacacatgcctccggagaagcttggcggacctttatttatggcttctatttttacaaaatcgtcacggacaaggagcccgacagggtggctatgcagcagccagccacaacatggcataccgccggagtcgatgactttgccagttttcagagaaaatggtttgaagttgccttcgtggccgaggaactggttcactccgagatccccgcctttctcctaccttggctcccttcaaggccagccagttatgccagtagacacagttcgttttctaggagctttggcggccgttcgcaagccgctgccctgcttgccgcaaccgttccagaacaaaggacagttaccctcgatgtggatgtgaataacagaaccgatagactcgaatggtgttcatgttattatcatgggaacttctcactgaacgcggccttcgagatcaaactccactggatggctgtaacagctgcagtgctattcgagatggttcagggctggcatagaaaagcgacctcatgcggtttcctgctggttcctgtcctcgaaggcccttttgcactcccaagctatctctatggagatccactgcgggcccagctgtttatccccctcaatatcagctgtctgctcaaagagggatccgaacatctctttgatagttttgagccggagacttactgggatcggatgcatctgtttcaggaggctatcgcgcacagatttggctttgtccaggacaaatactctgcctcggcctttaactttccggctgaaaacaaacctcagtatatccacgtaacaggcactgtgttcttacagctgccttactcgaaacgcaagttctctggccaacagcggcgtaggagaaatagtactagctctactaatcagaacatgttctgcgaggaaagagtcggatacaattgggcttataataccatgcttaccaagacttggcgttcctcagccactggagatgaaaaattcgctgatagattactcaaagatttcactgacttctgtatcaaccgcgacaacagactagtgacgttttggacctcatgcctggaaaagatgcatgcctccgcaccttag

SEQ ID NO: 185236 - DNA, 1995 bp, synthetic construct
  misc_feature 1..1995: note = Description of Artificial Sequence: Synthetic coding sequence
  source 1..1995: mol_type = other DNA
atgcggaccaccaaggtgtacaagctggtgatccacaagaagggctttggagggagcgatgatgagttggtggttaatcccaaagtgttccctcacatcaaactgggcgacattgtggaaatcgcccatcctaacgatgagtactccccattgctcctccaagtgaaaagcctgaaagaggacctgcagaaggagacgattagcgtcgatcagaccgtcacacaggtgttccgactaaggccatatcaggatgtatatgtaaatgtagtcgaccccaaggtttcaacttgcgcgtacatcacccagaaagtagagttcgctgggattcgcgctcaggctggggaactgtgggtgaagaacgagaaggtcatgtgtggatatatcagcgaggatacccgggtggtgtttcgctccacctccgcaatggtgtacatcttcatccagatgagttgtgaaatgtgggatttcgatatctacggggacctatacttcgaaaaggccgtgaatgggttcttggcagacctgttcacgaagtggaaggagaagaattgctcacacgaggtgactgtagtcctcttcagtaggaccttttacgacgctaaaagtgtggatgagttcccagagattaaccgcgcctctatccgacaggaccacaagggccgcttttacgaagatttttataaggtagttgtccagaatgagaggcgggaggaatggacatccctgttggtcacaatcaagaaactatttattcagtatcccgtcttagtgcgactggaacaggcggaaggattccctcagggagacaatagcactagcgctcagggaaactacctggaggcaataaacctttccttcaacgtgttcgacaagcattacatcaaccggaattttgaccgcacggggcagatgagtgtggtgattactcccggcgtgggggtgttcgaggtggacagacttctcatgatcttaactaagcagaggatgattgacaacgggatcggcgttgatctggtgtgtatgggcgaacagccattgcacgccgtaccactgttcaaattgcacaaccgatcagcgcccagagactcccggcttggggacgattacaacatcccacactggatcaatcacagtttctacacctctaaatcccaactgttttgtaatagcttcactccacgcataaaattggcagggaaaaagcccgcctcggagaaggctaagaacggtagggacacgtcactgggtagccccaaggaatccgagaacgccttgcctatacaggtcgattacgacgcatatgacgcccaggtgtttagattacccggaccatctcgggcccagtgccttacaacgtgcaggagcgtgcgggaaagagagtctcactccaggaaatctgcatcctcctgcgatgttagcagcagcccatctttgccttcacgcactttgcctactgaagaagtgcgatcacaggcctcggacgattcctctctgggaaagtctgcaaatattttaatgatcccccaccctcacttacatcagtatgaagtgtcgtctagcctcggatatacaagtaccagagatgtactggagaacatgatggaacctcctcagcgggactcctccgcacccggccgattccacgtggggtctgcagaaagtatgcttcatgtaaggcctggcggctataccccccagcgcgccctgatcaaccctttcgccccctcacgcatgcccatgaaacttacgagcaatagacgacgatggatgcacacttttccagtcggcatgaatcctagaacacaaaataaagactccctggaggacagtgttagcacttcacctgatccctctaaacgaggtcaactcaccggggagcgagggcgacaaggcgtgtggggcgggcaatcaatgcggaaacaagaggaagctttgtgggaagtgagtggacccgaggttcacattccacttggctatggcaaagctatgtggtag

SEQ ID NO: 185237 - DNA, 1263 bp, synthetic construct
  misc_feature 1..1263: note = Description of Artificial Sequence: Synthetic coding sequence
  source 1..1263: mol_type = other DNA
atgaagcaccccagcaccggcgtgcagctgctgagcgagcagaaggggctctcaccatattgcttcatttccgcagaggtcgttcactggctcgtgaaccacgttgaaggaattcaaacgcaagccatggctattgatattatgcaaaagatgctggaggaacagcttattacacacgcctccggcgaggcttggcgaacgtttatctacggattttatttttacaagatcgtgaccgacaaagagcctgatcgtgttgctatgcagcagccagcaaccacatggcacacagcgggagtagacgacttcgcatcttttcagcggaagtggttcgaggtagcatttgtcgccgaggagcttgtgcatagtgagataccagcgttccttcttccttggctgccaagccggccagcgtcctatgcctccagacattcctctttcagccgttcattcggcggtagaagtcaagcagctgcgctgctggctgctaccgttccagagcaacgtaccgtcacattggacgtggatgtgaacaacagaacagatcggcttgaatggtgtagctgctactatcacggaaatttttccctcaacgcagcgtttgaaataaaactccactggatggctgtgacagcagcagtgttgttcgagatggtgcagggttggcaccgcaaagcgacctcttgcgggtttctcttggtgcccgttcttgagggtcctttcgcattgcctagttacttgtatggtgatccactcagggcgcagctgttcatcccactgaatatctcgtgccttctgaaggagggaagtgagcatctgtttgattcctttgagcctgaaacatattgggaccgcatgcatctgtttcaggaggccatcgcacacagatttgggttcgtgcaggacaagtacagcgcttccgcctttaattttccggcagaaaacaaaccccagtatatccatgttacaggcaccgtctttctccaactgccatattccaaacgcaagttttcaggtcagcagaggcgaaggaggaactctacctcgtctactaatcaaaatatgttctgcgaggagagggtgggttacaattgggcgtataacactatgctgaccaagacttggcgcagcagcgcaactggtgacgaaaaatttgccgatcggctgctgaaagatttcaccgatttctgcatcaaccgtgacaacaggctggtcactttttggacaagctgccttgagaagatgcacgcatccgcgccgtag

SEQ ID NO: 185238 - DNA, 4785 bp, synthetic construct
  misc_feature 1..4785: note = Description of Artificial Sequence: Synthetic coding sequence
  source 1..4785: mol_type = other DNA
atgcggaccaccaaggtgtacaagctggtgatccacaagaagggcttcggcggctctgatgacgagctggttgtaaaccccaaagtcttcccgcatattaagcttggcgacattgtcgagattgcccaccctaatgatgagtattcccccctgctgctccaggtaaaaagcttgaaggaggacctacaaaaagagacgattagtgtggaccagacagtgacccaagtcttcagactgcggccctaccaggacgtatacgtgaacgtggtcgatccaaaggatgtcacactcgacttggttgaattaacattcaaggaccagtacatcgggcggggcgacatgtggaggctgaagaaaagtttggtgtccacctgtgcctacattacacagaaggtcgagtttgccgggatcagggcccaggccggagagctttgggtaaagaatgaaaaagtgatgtgcggctatatcagcgaggatactagagttgtgttccggtccacaagtgccatggtctacatttttatccagatgagctgcgagatgtgggattttgacatttacggggacctttactttgagaaggccgtgaatggatttctagcagatctatttactaaatggaaagaaaaaaactgctcacacgaagttaccgtggtcctcttctcccggacattttacgacgccaagtccgtcgacgaattcccggagattaacagagcgtctattcgccaggaccataagggccgattctatgaagatttttataaggtcgtagtccaaaatgagcgacgtgaggagtggacatctttgctagttacaatcaagaaattgttcatccaataccccgtgctcgttcgccttgaacaagccgagggattcccacaaggggataattctacatctgctcagggtaattacctcgaggctattaacttgagctttaacgtctttgataagcactacataaaccgtaatttcgatcgcactggacagatgtcagttgtcatcaccccaggcgtaggtgtgtttgaggtggacagacttttgatgattctaacgaaacaaaggatgatcgacaatggcattggagttgacctggtatgcatgggagagcaacccctacacgcagtaccactcttcaaactccataatcggtccgcccctcgtgatagcagactcggagatgactacaatattccccactggatcaaccactccttctataccagcaaatcccagctgttttgcaactccttcactccacgcattaagctcgcgggaaagaagcctgctagcgagaaggctaaaaacggccgggatacatcactgggatccccgaaggagagcgaaaatgcactgccaatccaggttgactatgatgcctatgacgcccaagtgtttcggctacctgggccctctagagcacagtgtctgactacctgcagatctgtgcgggagagagagtcgcactcccgtaagagcgctagcagttgtgacgtgtcctcgagccccagcctgccttccagaacgctgccaacagaggaggtgcggtcacaggcttcagacgactcctcattaggcaagagtgccaatattctcatgatcccgcatccgcatcttcatcaatatgaggtgtctagttcacttggatatacatctacacgggatgtgctggagaatatgatggagccacctcagagagattcatctgcgcctggaaggttccacgtcgggtctgctgaatccatgctgcatgtgcgcccaggaggctatacaccccagcgcgctctgatcaatcctttcgctccttccagaatgcccatgaagcttacatccaaccgccgcagatggatgcacacctttccagtcggaccgtcaggggaggctatccaaatccaccaccagacacggcagaatatggctgaactgcagggatccggtcagagggacccaacccactcatccgcagagctgcttgaactggcatatcacgaggctgcgggacgccattctaatagccgacaacccggagacgggatgtcctttctcaattttagcgggacagaggagttgagcgtaggtctgctttccaatagcggcgccggcatgaaccctagaacgcagaacaaggacagtctggaagattctgtctcgaccagccctgaccccatgcccggattttgctgcacagtgggggttgactggaaatcccttaccacaccagcctgtctgccactgactaccgactacttcccagatcggcaaggtctgcaaaatgattatactgagggctgctacgatcttctacctgaggcagatatcgataggagagacgaagacggagtgcaaatgacggctcaacaggtatttgaagaattcatctgccaacggcttatgcagggttatcagatcattgtccagcccaagacccaaaagcctaaccctgcagtgccccctcccttgagctccagtcctttatattcccgcggcctggtatccagaaatcgacctgaggaggaagaccagtactggctttccatggggaggactttccacaaggtgacattgaaggataagatgattacggttacccgctacttgccaaaatacccctatgagtctgcgcaaattcactatacttacagcctgtgtcctagccacagtgactctgaattcgtgtcatgctgggtggaattctcccacgagcggttggaggaatacaaatggaattatctcgaccagtatatttgttctgctggaagcgaggattttagcttgatcgaaagcctgaagttttggcgaactaggtttctcctactcccagcctgcgttaccgccaccaagcggatcacagagggcgaagcccactgcgatatctatggggatcggccccgcgccgacgaagacgaatggcaactactggacggattcgtgcggttcgtcgaaggcttgaaccgcatccggcgccggcacaggtcggatcgtatgatgcggaaggggactgccatgaagggcctccagatgactggcccaatcagtactcacagcctggagagcaccgcaccacctgtgggaaagaaaggcacttctgcactatcagctctacttgaaatggaggcgagtcaaaaatgcctcggcgagcagcaagccgctgtgcacggcggcaaatcctcagctcagtcagcggagtcttcaagcgtcgctatgaccccgacctacatggactctcctcggaaggatggagccttctttatggagttcgtcagatcaccaagaactgcctctagcgctttctaccctcaggtgtcagtagaccagactgccacaccgatgctcgatggcacctctctcgggatctgcacaggacaatccatggatagaggcaacagccaaacattcggaaatagccagaatatcggtgagcaaggttattcatccaccaacagctccgactcctccagtcagcagttggtggcatcctcactgacctcgagctctactctgacagagatactggaggcaatgaagcacccttcaactggcgtccaattgctttctgagcagaaaggtctgagtccttattgcttcatttccgccgaagttgttcactggctagtgaaccacgtggagggtatacagacccaggctatggccatcgacatcatgcagaaaatgctggaggaacagctgattacacatgcctctggcgaagcctggcgaaccttcatctatgggttttacttctataaaattgtgacggataaagagcccgaccgggtggccatgcagcagcctgcaaccacctggcataccgctggcgttgacgatttcgcaagttttcagaggaaatggttcgaagtagccttcgtcgcggaggagctggtgcactctgagattccagcctttttgctcccctggttaccgagtagacccgccagctacgcctctcgccactcaagcttctcgcgctcattcggaggacgtagccaggccgcggccctgttggcggccacggtgcctgagcagaggacggtgacactcgacgttgacgtgaacaacaggacggaccgtttagagtggtgctcctgttattatcacggaaacttttcactgaatgcagccttcgagattaagctgcactggatggcagtgacagccgccgtgctgttcgaaatggtacaaggctggcacagaaaagccaccagctgcggatttctcttggtcccagtgctcgaggggcctttcgcgttgccaagttacctgtacggtgaccccctgcgggctcaacttttcattccgctgaacatatcttgtttactcaaggaaggatccgagcatctctttgattccttcgagcccgaaacttactgggacagaatgcacctgtttcaggaggccatcgcacaccgttttgggtttgtccaggacaagtatagtgcaagcgcctttaacttccccgcagagaataagccgcagtatatccacgtgactggaacggtgttcctgcagttgccttattctaaacgtaagttttccggccagcagcgccgtcggcgtaacagcacgtcctcaaccaatcagaatatgttctgcgaagaaagagtgggttataactgggcctacaataccatgctgaccaaaacatggcggtctagtgccactggtgacgagaagtttgccgataggcttttgaaggacttcacagatttttgcattaaccgggacaacagacttgtcaccttctggacaagctgcctggagaaaatgcacgcatccgccccttag

SEQ ID NO: 185239 - DNA, 1536 bp, synthetic construct
  misc_feature 1..1536: note = Description of Artificial Sequence: Synthetic coding sequence
  source 1..1536: mol_type = other DNA
atggccaccgtgcaggagaaggccgccgccctgaacctgagcgccctgcatagccccgcccaccgcccaccaggctttagtgtggcccaaaaaccttttggcgctacatacgtgtggtcgagcatcataaacacgctgcaaacccaggtagaagtaaagaagagaaggcatcggctgaagaggcacaacgattgcttcgtcggttccgaagctgtggatgtgatcttttcccatctgatacagaacaagtactttggcgacgtagacatcccacgtgccaaggtcgttcgggtgtgccaggctctgatggactacaaggtattcgaagccgtgccaacaaaggtctttggtaaagataaaaagcctaccttcgaagatagtagttgctccttgtacaggttcaccaccatccctaatcaggactcgcagctggggaaggagaataagctatatagccctgcgcgctatgcggacgcactctttaagtcatctgacatcaggtcagccagtcttgaggatctttgggagaatctgagcctaaagcctgcaaattcccctcacgtgaacatttcagcaaccctaagcccccaggtcattaacgaggtgtggcaggaggaaactattggacggctgctacaattagtagacctgcctttattggattctcttctcaagcaacaggaggccgtccccaagatccctcagcccaagcggcaatcgacgatggtcaactccagcaattacctagaccgtggaatcctgaaggcgtattccgactcccaagaggatgaatggctttctgcagccatcgactgcctcgagtacttgcccgatcagatggtcgtggaaatttccagatcctttcctgagcagcccgaccggactgatctggtaaaagagctattgttcgatgccataggccggtactacagctccagggaacctctgctgaaccatctgtcagacgtgcataacggaatagctgaactcctggtcaatgggaagacagaaattgccctagaggccacacaactgctcctgaaattgctggatttccagaaccgggaggaattccgacggctgctgtatttcatggctgtggcagctaaccctagcgaatttaagctgcagaaagaatccgataacagaatggttgtgaagcgaatttttagtaaagccatagtggataacaaaaacctctccaaggggaagactgacttgttggttctattcttgatggatcaccaaaaggatgtattcaaaattcccggaaccctgcacaaaatcgtaagcgttaaactaatggcaattcagaacggccgggatcccaacagagatgccggatacatctactgccaacggattgatcaacgggactattccaacaatactgagaaaactactaaagatgagcttctcaacttgttgaaaaccctcgacgaggacagcaagctgtccgcaaaagagaagaagaaactcctagggcaattttacaaatgccatccagacatctttattgagcattttggagattag

SEQ ID NO: 185240 - DNA, 1509 bp, synthetic construct
  misc_feature 1..1509: note = Description of Artificial Sequence: Synthetic coding sequence
  source 1..1509: mol_type = other DNA
atgcggggcctgtgcgagttctactggcaggagttcggcatcaagggcttctctgtggcccagaagccattcggggccacatatgtctggagctcgatcattaacacactgcaaacccaggtggaggtaaagaagcgccgccatcgtctcaaacgccacaatgattgtttcgttggtagtgaagccgtggacgtgattttttcccacctcatccagaacaagtactttggcgatgtcgatataccccgggccaaagtcgttcgggtctgtcaggccttgatggactacaaagtcttcgaggcggtgccgacgaaggtcttcggtaaggataaaaaacctactttcgaggatagcagctgcagcctgtacagatttaccactatccctaatcaggacagtcaattgggcaaagaaaacaagctgtattctcctgctagatatgcagacgccctgtttaagtcctcggacatcagaagcgcctccctggaagacctgtgggagaacttgagtctgaagccagccaatagcccccatgttaatataagcgcaaccctgtccccacaggttatcaacgaagtgtggcaagaggagactatagggcgattgctgcaactggtagacctcccactgctcgacagcctgctcaaacagcaggaggcggtacccaaaattcctcagcccaaaaggcagagcactatggtgaacagttctaattaccttgacagaggcattctgaaggcatactctgattcccaagaggacgaatggctttctgccgcaatagattgcttggaataccttccagatcagatggtagtggagattagcaggagctttcccgagcaacccgacagaaccgacttggtgaaggagcttctctttgatgcaataggtagatactactccagccgcgaacccctgttgaatcacctatccgacgttcacaacgggatcgccgagctgttagtgaatgggaagacggaaatcgcgttagaggccactcaattactcctgaaactactagatttccaaaatcgcgaggagtttcggaggctactgtacttcatggccgtggcagccaacccttcagagttcaaactgcagaaggagagtgacaacaggatggtggtcaagcgaatttttagcaaggccatcgtagataacaagaacctgtccaagggaaaaacagatctgcttgtactatttcttatggatcaccagaaagacgtttttaagataccggggacactacacaaaattgtatctgtgaagctaatggcgatccagaacgggcgggacccgaatagggacgctggatatatttactgccagagaatcgaccagcgggattacagcaacaatacggaaaaaaccaccaaagacgaacttctgaacctgctgaaaaccctcgatgaagattccaaactgtccgccaaggagaaaaagaagctcctgggccagttctacaagtgtcatcctgacatcttcatcgaacatttcggagactag

SEQ ID NO: 185241 - DNA, 1230 bp, synthetic construct
  misc_feature 1..1230: note = Description of Artificial Sequence: Synthetic coding sequence
  source 1..1230: mol_type = other DNA
atggaggagggcggcagcaccggcagcgccggcagcgacagcagcacatctggttctgggggagcgcagcagcgggaactcgaaaggatggctgaagtgctggttacaggcgaacagttgaggctgagactccatgaagagaaggttataaaggatcggagacatcatctgaagacttatccgaattgctttgttgctaaggaacttatcgattggctgatcgagcataaagaggcctccgaccgggagaccgcgattaaacttatgcagaagcttgctgaccggggcattatacaccacgtgtgtgatgagcataaagagtttaaagacgtgaagctattttataggtttagaaaagatgatggtacattcccattggataacgaagtgaaggcatttatgcggggacagcgattatatgagaaacttatgtcccctgaaaataccctcctgcagcccagagaggaggaaggcgttaaatatgagcgcaccttcatggccagcgagttcctggattggctcgtgcaggagggcgaggccaccaccagaaaggaggcagagcagctttgccacaggctcatggaacacggcatcatccagcacgtgtccaacaagcatccgttcgttgacagtaatctcctttaccagtttcgcatgaattttagacgtaggcgccggctgatggagttgctcaacgagaagagccctagcagtcaggaaacccacgactctcccttttgcctgcgcaagcagtctcacgacaaccggaagtccactagttttatgtcggtttcccctagcaaggagattaagatcgtgtctgcggtgcgcagatcttcaatgtcatcttgcggcagtagtggatacttctcttcctccccaacgctatcaagctctccccccgttctgtgtaaccccaaatcagtgttaaagagacccgttacatccgaagagttgttgactcctggggctccttacgcacgcaagacattcacaatcgtgggggacgcagtcgggtgggggttcgtcgtgaggggaagtaaaccatgccacatccaagctgtggacccatctggaccggctgccgccgcaggcatgaaagtatgccagttcgtggtgagcgttaacgggcttaacgtgctgcatgtcgactacaggacagtgtcaaatctgattctgaccggtccacggaccatagtgatggaagtgatggaggaactggaatgctag

SEQ ID NO: 185242 - DNA, 2877 bp, synthetic construct
  misc_feature 1..2877: note = Description of Artificial Sequence: Synthetic coding sequence
  source 1..2877: mol_type = other DNA
atgcggacccacacccggggcgcccccagcgtgttcttcatctaccttttatgtttcgtatccgcgtacatcacagatgaaaaccccgaagtaatgatcccttttaccaatgccaattacgactcccatccaatgttgtattttagccgggccgaggtagcggaattgcagctcagagccgctagcagtcatgagcacatcgcggccaggctcacagaagctgttcatacaatgttgtcaagtccactggagtacctcccgccctgggaccccaaagattatagcgcaaggtggaacgagattttcgggaacaacctgggggctctggctatgttctgtgtattgtacccggagaacattgaggcccgtgatatggccaaagactacatggagagaatggccgcccagccatcctggttggttaaggatgcgccttgggacgaggtgccacttgctcattccttggttggcttcgcaaccgcatatgatttcctgtataactacttgtcaaagacacaacaggagaaatttctcgaagtgatcgctaatgcgtccggctacatgtatgaaacttcataccggagaggctggggctttcaatatctccacaatcaccagcccacgaattgtatggctctgctgacagggagcctggtcctgatgaaccagggctacctgcaggaagcttacctttggacgaagcaggtgctgactatcatggaaaaatctttggttctgttacgggaggtcaccgacggaagtttatatgagggggtcgcctacggcagctacactacaagatctctttttcaatacatgttcctggtccagcgccactttaacatcaatcactttgggcacccttggctgaaacagcacttcgcgtttatgtatagaacgattctgccgggttttcagagaactgtcgcaatcgcagatagcaactacaactggttctatggtcctgaaagtcagctggtatttcttgacaagttcgtgatgcgtaatggcagtggtaattggttggctgaccagataagaaggaacagggtggtggaaggaccagggactcctagtaagggacagcgctggtgtactctccacaccgagttcctgtggtatgatgggtctctgaaatccgtcccccctcctgactttggcacacccactcttcactacttcgaagactggggggtagtaacgtacggaagtgctctcccggcggagatcaatcggtctttcttgtccttcaaatccggtaaactcggaggaagagcgatctacgacattgtccatcggaataagtacaaggactggatcaagggttggagaaacttcaatgccggccacgagcacccggatcagaactcttttactttcgccccaaacggagtacctttcattactgaggctttatatgggccgaagtatacctttttcaacaacgttcttatgtttagcccagcggtgtcaaagtcttgcttcagcccatgggtgggccaggtaacggaagactgcagctccaagtggtccaaatacaagcacgatttggcggcttcttgccagggacgcgttgttgcagccgaggaaaaaaacggggtggtgtttatccgtggggaaggcgtaggcgcctataacccacagcttaacttgaagaatgtgcagaggaatctgatactgcttcacccccagcttttactcctcgtggatcagattcacctgggagaagagtcgccgttagagactgccgcctccttcttccacaacgtggacgtaccattcgaggaaacggtggttgacggcgtgcatggagcatttattcgccagagggacggcctctacaagatgtattggatggacgataccggatatagtgagaaagccaccttcgcatcagtaacctacccgcgcgggtacccctataacgggacaaactacgtgaacgttaccatgcatctgcgctctcctattaccagggcggcttatctgttcatcggccctagtattgacgtccagagcttcaccgtccacggagatagccaacagctggatgtgtttattgcgacgtctaagcatgcctacgccacatatctttggaccggagaagccaccggccaatcagcatttgcccaggtgatcgccgatagacataagatcctgttcgatagaaactccgctatcaagtctagcattgttccagaagtcaaggactatgcagctatcgtggagcagaatctgcagcactttaagccagtgttccagctcttagaaaagcagattctttcccgtgtgagaaacactgcttcgttccgaaagaccgcagaacggctgcttaggttctccgataaacggcagactgaggaagcaatcgacagaatttttgctatctcgcaacaacagcagcagcagtccaaatctaagaagaaccggagggccggcaaacggtacaaattcgttgatgccgtccccgacatcttcgcacaaattgaagtaaacgaaaagaagattcgccagaaggcacagattctggcccagaaggaactgcccatcgacgaggatgaagaaatgaaggaccttctggacttcgcagacgtaacgtacgagaagcacaagaacggtgggctgatcaagggccgtttcggacaggccaggatggtcactacgactcactctcgtgccccatcactatccgccagttataccaggctgttcttgattctcaacattgccatcttcttcgtaatgcttgccatgcaactcacttattttcagcgagctcaaagcctgcacggccaaagatgtctgtatgccgtcctgctcattgactcgtgtattctgctctggctgtactcttcctgttcccaatcacagtgttag

SEQ ID NO: 185243 - DNA, 2877 bp, synthetic construct
  misc_feature 1..2877: note = Description of Artificial Sequence: Synthetic coding sequence
  source 1..2877: mol_type = other DNA
atgcggacccacacccggggcgcccccagcgtgttcttcatctacctcctgtgttttgtctctgcctatataacagacgaaaatcccgaggttatgattcccttcactaacgcaaactacgatagtcaccccatgctttattttagcagggcggaggtagccgaactgcagttacgtgcagcctcaagtcacgaacacattgctgcacgcctcaccgaagccgtccatacgatgttatccagtcccttggagtatctgcccccgtgggatcctaaggattatagcgcaagatggaacgaaatatttgggaacaacttgggagccttggcaatgttctgcgtgctctatccggagaatattgaggcacgcgatatggctaaagactacatggaaagaatggccgcccagccttcatggctggtgaaggatgccccatgggatgaggttcccctggctcatagcttggttggtttcgccacagcttatgattttctttacaactacttaagcaaaactcagcaggagaaattcctggaggtaatagctaacgcttccggctacatgtacgagacctcctatcgccgcgggtgggggtttcaatatcttcataaccaccagcccacaaactgcatggccctcctcacaggctcactcgtgctgatgaaccaggggtacctgcaagaagcatatctttggacgaagcaggtccttactattatggagaaaagtcttgttctccttcgagaggttacagacgggagcttgtacgaaggcgtcgcctacggttcttacacaacaaggtctctgtttcagtacatgttccttgtgcagagacattttaacatcaaccactttggccacccctggctgaagcagcatttcgccttcatgtacaggaccatccttcccggctttcagaggactgtggctatcgcagatagcaattataattggttttacggccctgagtcccagctcgtgtttttggataaatttgtgatgaggaatggtagcggcaattggctggcggaccagatacgacggaatagagtggtggagggtcccggcaccccgtctaagggtcaacgatggtgcactctgcacactgaattcctgtggtacgacgggtcgctgaagagtgttccgcccccagacttcggcaccccgactctgcactactttgaggactggggggtcgtcacctacgggtcagcattacccgcagagatcaaccgcagctttttatcctttaagtcaggcaaacttggtgggcgggccatttatgacattgtgcatagaaacaagtacaaagattggatcaaggggtggaggaactttaatgccggccatgagcacccagatcaaaatagctttacatttgcccctaatggggttccgtttattacagaggctttgtatggccccaagtatacattcttcaacaatgttctgatgttctcgcctgctgtgagcaagtcctgctttagtccatgggtcggacaggtaacagaagactgctcttccaaatggagcaagtataaacacgatctggcagcctcctgccagggtagggtagtcgctgctgaagagaaaaacggcgtggtgttcataagaggtgaaggggttggggcatataacccccagctgaatctgaaaaatgtacagaggaacttaatcctgctacaccctcagctcctcctgttggttgatcagatccacctgggagaggagtcccctctggaaacagccgctagtttttttcataacgtggatgtgcctttcgaggaaacagtggtggatggcgttcacggcgcttttatacgtcaacgggatgggttatacaagatgtactggatggacgacaccgggtatagtgaaaaggccacattcgccagcgtgacataccctagaggatatccgtacaatggcaccaactatgtcaacgtgacaatgcacctgcggagtcccattacgcgtgctgcctacctttttattggacctagtattgatgttcagagcttcacggttcacggtgactctcagcagctggatgtcttcatcgctaccagcaaacacgcttacgcaacatacctctggacgggagaagcgactggccagagcgcttttgcgcaggtgatcgcggacagacacaagatcctttttgaccgcaattccgctatcaaatcctccattgtcccagaagtgaaggactatgccgcaattgtggaacagaatctccagcattttaagccagtcttccaactgttggaaaaacaaattctgagtagggttcggaacactgcatccttcaggaaaaccgcagagaggctgctgaggttctccgataaacgccagaccgaagaagcaattgatcggatattcgccatatcacagcagcagcagcagcaatccaagagcaagaaaaacaggagagccggaaagcgctacaaatttgtggatgctgtccccgatatcttcgcccaaatcgaagtcaacgaaaagaaaatccggcagaaagcccaaatattagcccagaaggagttacccatcgacgaagacgaagagatgaaagacttgttggacttcgctgatgtgacttatgaaaagcataaaaatggtgggttgataaaagggaggtttgggcaggctcgtatggtaaccaccacccattctagagcaccctctcttagtgcttcgtatacacgtctatttctgattcttaatatcgcaatattctttgtgatgcttgctatgcagctcacttacttccagcgcgcacagagcttacacggacagcggtgcctatatgcagtcctcttaattgattcttgcattctgctctggctctactcctcctgcagccagtcccagtgctag

SEQ ID NO: 185244 - DNA, 501 bp, synthetic construct
  misc_feature 1..501: note = Description of Artificial Sequence: Synthetic coding sequence
  source 1..501: mol_type = other DNA
atgcggacccacacccggggcgcccccagcgtgttcttcatctaccttctttgctttgtctcagcatacattactgacgaaaatccggaggtgatgataccttttactaacgcaaattacgactcccatcccatgttatacttttcacgcgccgaagtggccgaactacagctcagagccgcatcctcacacgagcatattgcggcacgccttactgaagctgtgcataccatgctgtcatcaccccttgagtacctcccaccttgggaccccaaagactatagcgcaagatggaacgaaattttcggtaacaatttgggcgctctggcaatgttctgcgtcctctaccccgaaaatatcgaagccagagacatggccaaggactacatggaacgcatggctgctcagccttcttggctggtgaaagacgccccttgggacgaggttccactggctcattccctcgtaggttttgccacagcctatgattttctgtattag

SEQ ID NO: 185245 - DNA, 2877 bp, synthetic construct
  misc_feature 1..2877: note = Description of Artificial Sequence: Synthetic coding sequence
  source 1..2877: mol_type = other DNA
atgcggacccacacccggggcgcccccagcgtgttcttcatctacctcttgtgtttcgtgtccgcatatatcacggacgagaaccctgaggtgatgattccttttactaacgctaactacgattcccacccaatgttgtactttagcagggccgaagttgctgagttgcagcttagagccgcttcttcacatgaacacattgccgcaaggcttactgaagcggtccacactatgctgtccagcccactggaatatcttcctccctgggatccaaaggattattctgctagatggaacgaaatcttcggcaataatctgggcgccctagccatgttttgcgtgctataccccgaaaacatagaagcgcgagatatggccaaggattatatggagagaatggccgcccagccaagctggttggtgaaggacgccccctgggatgaggtgccactcgcccactcgctggtgggcttcgccacagcgtacgattttctgtacaactaccttagcaagacacaacaggagaagttcctggaagtgatcgccaacgcaagtggctacatgtacgagacctcttaccgaagagggtggggcttccagtacttacataatcaccaaccgactaactgcatggccttgctgacaggctcactcgtgttaatgaaccaagggtacttgcaggaggcttacctgtggacaaagcaggtgctgaccattatggagaaatcccttgtgctgctcagggaggtcactgacggtagtctttatgaaggcgtggcctatggatcctacaccacccgctcactgtttcagtacatgttcttggtccagcggcatttcaacattaatcatttcggacacccatggctgaagcagcatttcgctttcatgtatcgcacaatcctacccggatttcagaggacggtggccatcgcagatagcaactataactggttttatggccctgaatcccaactggttttcctggataaatttgtcatgaggaacggcagtggaaactggcttgccgaccagatcaggcgcaatagggtggtcgaaggacctggaaccccctctaagggccagagatggtgcacactgcacacagaattcctgtggtatgatgggtcactgaagtccgttcctcctcccgactttgggacccctaccctgcactactttgaggattggggggttgtgacctacggatcggctctacctgccgaaattaataggagcttcctcagcttcaagtccggcaagctgggggggcgggcaatttatgacatcgtgcaccggaataagtataaagattggattaaaggctggaggaactttaacgctggccacgagcacccggatcaaaactctttcacctttgctccaaacggagttccatttatcacagaagctctgtatggacctaagtacacttttttcaataacgtgctgatgttctccccagcagtctccaaaagttgcttctctccttgggtgggccaggtgactgaagattgttcatcaaaatggtctaagtacaaacatgatctggccgcgagctgccagggaagggtggttgctgcagaggagaaaaacggtgttgtattcattcggggggagggcgtgggcgcttataatcctcaattgaatctgaaaaatgtccaaagaaacctgattctcctccacccacagctgctgctgctcgtcgatcagattcacttgggcgaagagtcccctcttgaaactgccgcatcctttttccataacgtcgacgtgcccttcgaggagaccgtagtagatggtgtgcatggagcatttattcgccagcgagatgggctgtacaaaatgtattggatggacgacacgggttattcagagaaggccacatttgcaagcgtgacctaccccagagggtatccatacaacggcactaactacgttaacgtgacaatgcacctcagaagtccaatcaccagagctgcctacctcttcattgggccgtcaattgatgtacagtcattcaccgtgcacggagacagtcagcaactggatgtgtttatagccacgagcaaacatgcctatgccacatacctttggacgggggaggctaccggacagtcagcctttgcacaggtgatagcagatcgacacaaaattttgtttgaccgtaactctgctattaaatcctctattgtccccgaagtaaaagattatgctgctatagtggaacagaacttacaacacttcaagcctgtcttccagctgctggagaaacagattctatctagggtgcgaaacacggcctccttccggaaaacagcagagaggctcttacgattctcagataaaaggcagacggaggaggccatcgatagaatattcgccatctcacagcagcagcagcagcaatccaaatccaaaaaaaatagacgcgctgggaaacggtataagtttgtcgacgcggtccctgacatctttgcacaaattgaggttaacgagaagaaaatccggcaaaaggcacagatcctcgcgcagaaagaactgcctatcgacgaagacgaagagatgaaagacctgcttgatttcgccgatgtcacctatgagaagcacaagaatggtggactgattaaagggcgctttggacaggcccgcatggtgacaaccacacacagccgtgcgccgtcactcagcgcctcttatactaggctgtttcttatcctgaatatcgcaattttttttgtgatgcttgcaatgcagcttacctactttcagagggctcagagtctgcatggacaacgctgcttgtatgcggttttgcttatcgactcatgtatactgctttggctttatagctcatgtagtcagtcccagtgttag

SEQ ID NO: 185246 - DNA, 2934 bp, synthetic construct
  misc_feature 1..2934: note = Description of Artificial Sequence: Synthetic coding sequence
  source 1..2934: mol_type = other DNA
atgggcagcttcgaggacggcctggccgccctggagatctggcggagcgacgctactatgaggacacacactcggggcgcgcctagtgtcttctttatttacctcttgtgctttgtgtctgcttacattactgacgagaaccccgaggttatgatccccttcaccaatgctaattacgacagccaccctatgctctatttctcccgtgctgaagtggccgagttacagctccgagctgcctcatcacacgagcatatcgccgccaggctgaccgaagctgttcatacgatgctatccagtccactggagtatttgccaccatgggatcctaaggattattctgcccggtggaatgaaatctttggcaacaacctgggcgcgctggccatgttctgtgttctgtacccagagaacattgaggctagggatatggccaaagattacatggagagaatggctgctcagccaagttggctggttaaggatgccccttgggacgaggttccactggcccatagtctggttggctttgccaccgcctatgattttctgtataactacttgagtaagacacagcaggagaaattcctggaggtgatcgccaatgcatcgggatacatgtacgagactagttatagacgagggtggggctttcaatacctacacaatcaccagcccactaactgcatggccttattgactggtagtttagtattaatgaatcagggataccttcaggaagcttatttgtggaccaagcaggttctcacaatcatggagaagagcctggttctattgcgggaggttactgacggctcactctatgaaggtgtggcatacggaagctatactactagatctctgttccagtatatgtttctggtgcagcggcacttcaatatcaatcattttggccatccctggctgaagcagcacttcgcattcatgtatcggacaatccttccgggattccagcgaactgtggcaatcgctgactcgaattacaactggttttacggccctgagtcccagttagtctttctggacaagtttgtgatgaggaacgggagtggaaattggttagccgatcagattaggcgcaaccgcgtggtggagggacccggaacacccagcaagggccagcgttggtgcactctgcacaccgaatttctttggtacgatggatcattgaaaagcgttccgcctccggatttcggcactcccaccctgcattatttcgaagactggggagtggtgacctacggcagcgcgttgccagccgaaatcaaccgctctttcctgagttttaagagcggcaaactgggcggtcgggcgatctacgacatagtacacagaaacaagtacaaagactggatcaagggatggaggaacttcaacgctggtcacgagcatcctgatcaaaatagtttcactttcgcaccaaatggagtgcccttcattactgaggcactctatgggcctaaatacaccttttttaacaacgttctgatgttttcacctgcagttagtaaatcatgctttagcccctgggtcggccaagttaccgaggactgtagcagcaagtggtccaagtataaacatgaccttgccgctagttgtcagggcagagttgtggcagcggaagagaagaacggcgtggtatttatccggggggaaggtgtgggtgcgtataatccgcagttgaacctgaagaacgttcagcgaaacttaattctcttgcacccacagcttctcctactcgtggatcagatccatctgggagaggaatccccattggaaacagcagcctctttttttcacaacgtggacgtcccttttgaggaaaccgtggtggacggcgtgcatggcgcttttattagacagcgtgatggactgtataagatgtattggatggatgacaccggttactcagaaaaggctactttcgcctccgtgacctaccctcggggctatccctacaatgggacgaactatgtcaacgtaacaatgcatttgaggtcccccattactcgggcagcgtatctgtttataggtccttccatagatgtgcagtcgtttacggtacacggtgatagccaacaattggatgtgtttatagctacttccaagcacgcatacgctacttacctttggaccggagaggcgacaggtcaaagcgcgtttgctcaggttatcgcagaccgtcacaaaatcctgtttgaccgtaactcagccattaaatcttccatcgtccccgaagtgaaagattacgcggcaattgtcgagcaaaacttgcagcactttaagcctgtattccaacttctcgagaagcagattttgtctcgggttcggaacacagcctcctttcgcaaaactgctgagagacttctgcgcttttctgataaacgccagactgaggaagccattgaccgcatcttcgccatcagccagcagcaacaacagcagtccaaaagtaagaaaaaccggcgagctggaaagcggtacaaattcgtagatgccgtgcccgacatctttgcccagatcgaagtgaacgaaaagaaaatacggcagaaagcccaaatcctagcccagaaagagctccctattgatgaagacgaagagatgaaggacttgcttgatttcgccgacgtgacttacgagaagcataagaatggagggctgataaagggtcgattcggacaagctcggatggtgacaaccacccattcacgggccccatcactctccgcatcctatacacggctgtttctgatcctcaatatcgccatttttttcgtgatgttggccatgcagctcacgtacttccagagggcacagtccttgcacggccagaggtgtctatatgcagtgttgctcatagactcatgtattctcctctggctgtattcttcgtgctcccagtcccagtgctag

SEQ ID NO: 185247 - DNA, 570 bp, synthetic construct
  misc_feature 1..570: note = Description of Artificial Sequence: Synthetic coding sequence
  source 1..570: mol_type = other DNA
atggccgccctgaagggccggcaggtgtactgggccaccgccggcaagatatccggctggacttggccacacgccccgcgccgcccccatgtcctccttcttaacggcataggcgtaggcggtgcgctcggctccatcgacgagctactgtgccaggcgttatcaaatggcctgaacgtgccagagggcagtttaacctctacatgtgcgcagcagcccgatggtcttattcacaccgccaaatgggggcatgtgcatagtctttcaagtcactcccctggcgccccaaatgcttgcggcgtgctgccagggactacggtcgacgacggagtgcaccaggacctgcagcgcgtgctggcatgcgagcaggtctacgacttggaagggatgttggatgacgcccattcacatgagctcctcgcggttgttgcagccgtacatcaccacggtgtgtctaaagcgctgcacaatgggacattgagctttgtggaagcctttggggggatccccccttgcactgtccggatcttccggaggtggttcgggtgtcttggcgatctggaaatttag

SEQ ID NO: 185248 - DNA, 3669 bp, synthetic construct
  misc_feature 1..3669: note = Description of Artificial Sequence: Synthetic coding sequence
  source 1..3669: mol_type = other DNA
atgcccaagggcggcgcccccccctggatcatggccctgatgttcaccggccacctgctgtttctagcgctactgatgtttgccttctccacatttgaagagtcagtcagtaattactccgagtgggccgtgttcacagatgacatcgatcaattcaagacgcagaaggttcaagacttccgcccaaatcagaaactcaaaaaatctatgctccatccctctttgtatttcgacgctggagagattcaggccatgcgacagaaatctcgagccagccatctgcatctgttccgagcaattcggtccgccgtcaccgttatgctgtctaacccgacgtattacctcccccccccgaagcacgcagacttcgccgccaaatggaatgaaatctacggcaacaaccttccaccgctcgcactttattgcctgttgtgccccgaggacaaagttgcgttcgagttcgtgctagagtacatggaccgaatggttggatataaggattggcttgtggagaacgccccaggagacgaggttcccattggccatagccttacaggcttcgcgaccgcttttgacttcctgtataacctcttggataaccaccggcggcagaagtatcttgaaaagatttgggtaatcacagaggaaatgtacgaatattctaaggttcgcagttggggtaagcagctgctgcacaaccatcaagccaccaacatgatcgctcttttaacgggtgcattggtgaccggagtcgataaggggtccaaggcaaatatttggaagcaggcagtggtcgacgtaatggaaaaaacaatgtttctcctgaatcacatcgtcgacggatcccttgacgagggggtagcctatggcagttacacggccaagagcgtaacccagtatgtgtttctggctcaaaggcactttaacatcaataatcttgacaataattggctaaaaatgcatttttggttttattacgccacattactccctgggtttcagcgaaccgtgggcattgctgatagcaattacaattggttctatggtcccgagagccagttggtgttcttggataagtttattctgaagaatggggcagggaactggttggcacagcagattaggaagcacagacccaaagacgggccgatggtgccctccacagctcagcggtggtcaacacttcataccgagtacatatggtacgacccgcagcttaccccccagccacccgcagattacggaaccgccaagatccacacgtttccaaactggggtgtcgtgacttatggagccggactccctaatacacagacgaatacctttgtgtcctttaagagcggaaagctgggaggcagagcagtgtacgacatcgtgcactttcagccgtactcgtggatcgatgggtggcggagctttaaccctggccacgagcatccggaccagaactcctttacgttcgcgcctaatggccaggtgtttgtctcggaggccctctatgggcccaaactctcgcacctgaataacgtcctcgtgtttgcgccctcaccctcctcgcaatgcaacaagccctgggaagggcagctgggcgaatgcgcccagtggctgaagtggacgggggaagaggttggagatgcagctggggaaatcatcacggcatcccagcatggggagatggtattcgtcagcggtgaagccgtttctgcttacagtagcgctatgaggctgaaaagtgtctatcgggccctgctcctcctcaacagccagaccctgcttgtagttgatcacattgaacggcaggaagacagcccaatcaacagtgtgtccgcctttttccataacctcgatatcgactttaagtacatcccctataagtttatgaaccgctacaatggagcgatgatggacgtttgggatgctcactacaagatgttctggtttgatcatcatggaaattcccccatggcatcaatccaagaggccgagcaagcagcagaattcaaaaagcggtggacgcaatttgttaatgtgacttttcagatggaacccacgatcacacggatcgcctacgtgttctatgggccgtatatcaatgtctctagctgtcgatttattgattcttccaacccgggtttacaaattagcctcaacgtcaataacaccgagcacgttgtgtcaatcgtgacagattatcataacctgaagacccgctttaattatctgggcttcggagggtttgccagcgtggccgaccagggacagattacaagattcggccttgggacacaggccattgtgaaacctgtgcgacacgatagaatcatcttcccattcggcttcaaattcaatattgcagtggggctcattctgtgcatctccttggtcatcctgacgttccagtggagattctacctctcctttcggaagcttatgcgatggatcctgatcctggtgattgctctctggttcattgagctactggatgtgtggtccacctgctctcagccaatttgcgcgaaatggaccaggaccgaagccgagggctcgaagaaatccctctctagcgaaggccatcacatggacctccccgatgtggtcataacttccctaccaggttctggcgctgaaatactgaagcagctctttttcaactcaagcgacttcttgtatatcagagtgcctacagcttatattgacattcccgagaccgaactggagatcgacagcttcgttgacgcctgtgaatggaaagttagcgacatacgctctgggcactttagactgcttaggggctggctgcagtctctggtgcaggatactaagttgcacctgcagaacatccatctgcatgagccaaaccggggcaagctcgcccagtatttcgccatgaacaaggataagaagcgcaaatttaaacgtcgggagtccctccctgaacagaggtctcagatgaaaggcgcatttgacagagacgccgagtacatccgcgcattaagacgacatctggtttactacccctccgctaggccagtgctgtccctctcctccggctcatggacgctgaaacttcatttttttcaggaagtcctgggcgcaagcatgcgggcgctttacatcgtccgggacccgagggcctggatctattctatgctgtacaactccaaaccctctctgtacagcctgaaaaacgttccggagcatctagcaaaattattcaaaattgaggggggtaaagggaaatgcaatctcaattcaggctacgcattcgagtatgagcccctgcgcaaggaattatccaagagcaaaagcaacgctgtgagtctcttgagccacctctggctggctaacacagcagcagccctgcgcatcaatacagatctactgcccactagctatcagctggttaagttcgaagatatcgtacatttcccacagaaaaccacggagcgcatattcgctttcctcggcataccgctgtcaccagcctctctcaaccagatattatttgcaacaagtactaatctcttttacctgccttatgagggcgaaatctctcccaccaataccaacgtttggaaacagaacctgccacgcgatgaaataaagctgatagaaaacatttgttggacattaatggaccgcttgggatacccaaaatttatggactag

SEQ ID NO: 185249 - DNA, 3639 bp, synthetic construct
  misc_feature 1..3639: note = Description of Artificial Sequence: Synthetic coding sequence
  source 1..3639: mol_type = other DNA
atggccctgatgttcaccggccacctgctgttcctggccctgctgatgtttgccttctccacattcgaagagtccgtcagtaactacagtgagtgggcggtgttcactgatgatattgaccagttcaagacccagaaagtgcaggactttcgacctaaccaaaaactgaaaaagtcgatgcttcacccatctctgtactttgacgctggggaaatccaggctatgagacagaaatccagagcctcacatttgcacttgtttcgggcaatccggagcgccgtgacagttatgctctccaatcctacctattaccttccaccccctaaacacgccgattttgcagcgaaatggaacgagatctatggcaataatttgccgccgttggcactgtattgcctcctctgtccagaggacaaagtagcttttgaattcgtgctggagtacatggaccgtatggtgggatacaaggactggctggtggaaaacgcacccggagacgaagttcctatcggtcactccctaactgggtttgcaaccgcctttgatttcctgtacaatttactggataaccatcggagacagaaatacctggagaaaatctgggtgatcactgaggagatgtacgaatattcaaaggtgcgcagctggggcaagcaattgttgcacaatcatcaagccactaacatgattgccctgctcaccggcgccctggtaaccggcgtggacaaaggctccaaggcaaacatatggaaacaagcagttgtggacgtcatggagaaaaccatgtttctgctgaaccacatagtagacggctccctggatgaaggggtggcttacggctcttataccgccaagagcgtgacacaatacgtattcctggctcagcgacacttcaacatcaacaacttggataataattggctgaaaatgcatttctggttctattatgccactctgttgcctgggttccagagaacagtagggatcgcagattccaattacaattggttctatggccctgagtcccagctggtctttttagataaattcattcttaagaacggggccgggaactggttagcacagcagatccgaaagcatcggcctaaggacgggccaatggtgccttcaacggcccagagatggagcacattacacaccgagtacatctggtacgatccacagctaactccccagccacccgctgactacggcaccgctaaaatccatacatttccaaactggggtgtggttacatacggcgccgggcttcctaacacacagaccaacactttcgtgtccttcaagtcgggcaaactaggcgggagggcggtgtacgacatcgtacattttcagccctatagctggattgatggttggcgctcatttaaccccggccacgaacatcctgaccaaaatagctttacatttgcgccaaatgggcaggtgtttgtgagcgaggctttatacggcccaaagcttagccatttgaataacgtcctggtgttcgcacccagcccatcttctcagtgcaacaagccatgggaagggcagctcggggaatgtgcccagtggctgaagtggaccggggaagaggtgggcgacgcagccggagagatcatcaccgctagccaacatggtgaaatggtattcgtgagcggggaggcagtcagtgcttacagtagtgctatgaggttgaaaagtgtttatagggcactgctgttgttgaactcacaaactctgctggtggtcgatcacattgaacgacaggaggactctcctataaatagcgtaagcgctttttttcataacctcgacattgatttcaagtacattccctacaagttcatgaaccgatataatggtgccatgatggacgtgtgggatgctcactacaaaatgttttggtttgatcatcatgggaattccccgatggcaagcattcaggaggccgaacaggccgccgagtttaaaaagagatggacccagttcgtaaatgttacatttcagatggagcccacaattacccgtatcgcctatgtgttttatgggccctatataaacgtaagctcatgtcgcttcatcgactcctccaatccaggcctacaaatatccctgaatgtgaataatactgagcacgtggtgtcaatcgtcaccgattaccacaacctgaagacccgatttaattatctcggatttggagggttcgcttcagtagctgaccagggtcagattaccagatttggcttaggaactcaggcaatcgtgaagccggttcgccacgatcgcatcattttcccctttgggtttaagttcaacattgccgtcggactgattttatgcatttctctggtgatcctgacctttcaatggcggttttacctctcattcagaaaactgatgaggtggatcttgatcctggtgattgctctgtggttcatcgaactactggatgtctggtctacctgttctcagccgatatgcgcgaagtggacgcggacagaagcagaggggtccaagaagagcttatcgagtgaaggtcaccacatggacctgcctgatgtcgtaatcacctctcttccagggtcaggcgcggaaatactgaagcagctgttcttcaattccagtgatttcctgtatatccgggtccctactgcctacatcgacattccagagaccgaattggagatcgactccttcgttgatgcctgcgaatggaaggtctcagacattcgctccggccacttccggttactcaggggatggctccagtcactcgtgcaggatacaaagcttcatcttcagaatatccaccttcatgaaccgaacagaggaaagctggcacagtatttcgcaatgaacaaggataaaaagaggaagtttaaaagaagggaaagccttccggagcagagaagccaaatgaagggagcgttcgatagagatgccgagtatatcagagccctgcggcgccatcttgtatattaccccagtgcccggcccgtcctctccctgagcagcggaagctggacactgaagctgcacttcttccaggaagtgcttggggcttctatgagagctttgtacatagtgagggaccccagggcttggatttattccatgctatacaattcaaaaccatccctctatagccttaaaaacgtgcctgaacacttggccaagctctttaagatcgaaggaggcaagggtaaatgcaacttgaatagcgggtacgccttcgaatacgaacctctcagaaaggagttaagtaagagtaaatccaacgccgtgagcctgctgtcacatttgtggttagccaataccgccgccgctctgaggattaacaccgatttgttacccaccagctaccagctggtgaagttcgaagatattgtacacttcccgcagaaaaccacggagcgcatctttgcctttcttgggatccccttgagcccagcatccctcaaccagatcctattcgctacctctaccaacctgttttatctaccctacgagggcgagatcagccctacaaacactaatgtatggaagcagaatctgcctagagacgagatcaagctgatcgagaacatttgttggactttgatggaccggctcgggtatccaaagttcatggattag

SEQ ID NO: 185250 - DNA, 606 bp, synthetic construct
  misc_feature 1..606: note = Description of Artificial Sequence: Synthetic coding sequence
  source 1..606: mol_type = other DNA
atggacctgagcctgctgtgggtgctgctgcccctggtgaccatggcatggggccaatacggggactatggctacccttatcagcagtaccacgactacagtgacgatggttgggtgaatctgaaccgacagggattttcttatcagtgccctcagggacaagtgattgtcgcagtccggtccatcttctccaagaaggaaggaagtgaccgacagtggaattatgcctgcatgcccacccctcagtctctgggcgaacctacggagtgttggtgggaagagattaacagagcaggtatggagtggtatcaaacctgttctaacaacggtctggtggcaggctttcagagccggtactttgagagcgtcctggacagagagtggcagttttactgctgtcggtactccaagcggtgcccatatagttgctggctcacaaccgagtaccctggacattacggtgaggagatggacatgatttcttacaactatgactattacatccgaggagcaacaaccacattctccgctgtggagagggatcggcagtggaaatttatcatgtgtcgaatgaccgagtacgactgcgaatttgccaacgtttag

SEQ ID NO: 185251 - DNA, 333 bp, synthetic construct
  misc_feature 1..333: note = Description of Artificial Sequence: Synthetic coding sequence
  source 1..333: mol_type = other DNA
atgcggttcatgaccctgctgttcctgaccgccctggccggcgcccttgtgtgtgcctatgaccccgaggccgcatccgctccgggatccggcaacccttgtcatgaggccagcgctgcccaaaaggagaacgctggagaggaccctgggctggccagacaggcacccaaaccgcgcaaacagcgctcttccctgctcgaaaagggccttgatggtgccaagaaggcagtgggcggattagggaagctcggaaaagacgccgtggaggaccttgaaagcgtgggaaaaggagcagttcacgacgtgaaggatgtgctagactcagtgctttag

SEQ ID NO: 185252 - DNA, 1191 bp, synthetic construct
  misc_feature 1..1191: note = Description of Artificial Sequence: Synthetic coding sequence
  source 1..1191: mol_type = other DNA
atggccctgctgaccaacctgctgcccctgtgctgcctggccctgctggctctgcctgctcagagttgtggccctggacggggaccggtcggtcggcgccggtacgctagaaaacagttggtgcctctcctatacaagcagtttgtgcctggcgtgccagaaaggacactgggcgcctcaggtccagccgaggggcgcgtggcacgcggaagtgagcgttttcgcgatcttgtgccgaattataacccagatataatattcaaggacgaggaaaattccggtgctgacagactcatgacagaaagatgtaaggagcgggtcaacgccttggcgatcgcagtcatgaatatgtggccaggtgtgcgcctgcgtgttaccgaaggatgggacgaggatggccaccacgcccaggactctttgcattacgaaggccgtgcattagatatcactacgagtgatcgggacagaaataagtacggactgctggcgaggttggccgtcgaggccggattcgactgggtgtactacgaatcgcgcaatcacgtgcatgtgtccgtcaaggccgacaacagtctcgctgtgagggctgggggttgttttcctgggaacgcgactgtcaggctgtggagcggagagcggaaagggctcagagagctgcacaggggcgactgggtgctggctgctgacgcaagtggtagagtggtgcccacccctgtgttactgtttctggatcgagatctgcaaaggcgggcttcatttgtcgccgtcgaaacagaatggcccccaaggaagctgctgctgaccccttggcatctggtttttgccgccagaggtccagcccctgccccgggggacttcgctccagttttcgcacgacggcttcgcgcgggagattcagtgcttgctccaggaggagatgcactgcgccccgctagggtggctcgggtagcccgagaagaagccgttggtgtcttcgcccctctgaccgcacacgggactctgctcgtgaatgacgtccttgcttcctgctacgctgtccttgagagtcatcagtgggctcatcgagccttcgcccctcttcggcttctgcatgcacttggtgccctgctgcctgggggggctgtacagccgaccggtatgcactggtactcccgcctgctgtataggttagcagaggaactgctgggatag

SEQ ID NO: 185253 - DNA, 1413 bp, synthetic construct
  misc_feature 1..1413: note = Description of Artificial Sequence: Synthetic coding sequence
  source 1..1413: mol_type = other DNA
atgagccaggcctacagcagcagccagcgggtgagcagctaccggcgtacgttcggcggtgcacctggcttccccctgggaagtcccctctcttcacccgtcttcccccgcgcaggctttgggagtaagggaagtagtagcagcgtaacatcccgtgtttatcaagtttcccggacctccgggggtgcagggggcctcgggtcacttcgggctagccgactggggacgacacgcaccccctcatcttacggggctggcgagctgctggattttagccttgcagacgcggtcaaccaggagttcctgactactagaactaacgagaaagtggagctgcaggagctaaacgatcgcttcgcgaactacattgaaaaagtgagatttttggaacagcagaatgcagctcttgctgccgaggtgaatcgacttaaaggacgggagcccactcgcgtcgctgaactgtatgaggaagagctcagagaactccgtcggcaggtagaggtgttaacaaatcagagagccagagtggacgttgagagagacaatttactcgacgacctccagaggctgaaagccaagctgcaggaggagatccagttgaaagaagaggcggagaacaacctcgctgctttccgggcagatgtggatgccgctacgttagcaagaattgacttagagcgtcgaatcgaatccctcaacgaagagatagccttcctcaagaaggtgcatgaagaagagatcagagaactgcaggcccagctacaagagcaacaggtccaggtagaaatggacatgtccaagccagaccttacagctgcattacgcgatattcgtgcccagtatgagacaattgccgccaagaatatttctgaggctgaggagtggtacaagagcaaggtgagtgacctaacacaggctgccaacaaaaacaacgacgctctgcgccaggcaaagcaagagatgatggaatatcgacaccagatccagagttacacatgtgagatcgatgcgcttaaaggaacaaatgattctctaatgaggcaaatgcgcgaattggaagatcgttttgcctccgaggcttctggctaccaggataatatagctcgactcgaggaagaaatccgacacctgaaagacgagatggcaagacacctgcgagagtatcaggatctgttgaatgtgaaaatggccctggatgttgagatcgctacttatcggaagctgttggagggtgaggagtctcggatcaacttacccatacagacctacagcgccttgaactttcgtgagacttcgccggagcagagaggatctgaggtacacaccaagaagaccgtgatgattaaaactatcgaaactcgagatggggaggtggtgtccgaggccactcagcaacaacatgaagtcctgtag

SEQ ID NO: 185254 - DNA, 2523 bp, synthetic construct
  misc_feature 1..2523: note = Description of Artificial Sequence: Synthetic coding sequence
  source 1..2523: mol_type = other DNA
atggccctggccagcgccgcccccggcagcatcttctgcaagcagctcttgttctccctattggtcctgaccttactctgtgacgcttgtcagaaggtctatttacgggtaccttcgcacttacaggccgaaacattagtgggaaaagtcaatctggaagagtgtctgaagagtgcttccctaattcgttccagtgatcccgcattccgaatcctggaggacggctcaatctacactacacacgacctgatcctgagctctgagcgaaagtccttttccatcttcttatccgatggccaacgcagggagcagcaagaaatcaaggtggtactttccgctcgggagaacaagagcccaaagaagcggcacactaaggatacagcactgaaaaggagcaaacgccgctgggcccccatacccgccagtctgatggagaattctcttggacctttccctcagcacgttcagcaaattcaaagtgatgccgcacagaactatactatcttttactcaataagtggcccaggtgtggacaaggagcctttcaatctcttctatatcgagaaagataccggcgacatcttctgcacccggtctatagatcgggagaagtacgaacaatttgccctgtatggatacgccacaacagccgacggttatgcccccgagtatcctctgcccctgattatcaagattgaggatgacaatgacaatgcaccatactttgagcatcgggtgaccatctttactgtgcctgaaaattgtcgctcaggcacgtctgtgggaaaagtaaccgctaccgaccttgatgaaccagatacccttcacactcggcttaaatacaaaattctgcagcagattccagaccatcccaagcacttctccattcacccagataccggcgtgatcacaacaacaactccatttctcgatcgagagaagtgtgacacgtatcagctgatcatggaagtgcgggacatgggcggtcaacctttcgggttgttcaataccggaacaatcacgatcagccttgaagacgagaacgacaatccccccagttttacagagacatcgtacgttaccgaggttgaggagaaccgcatcgatgtggaaatccttcgcatgaaagtgcaggaccaggaccttcctaataccccccactccaaagcagtgtataaaatccttcaggggaacgaaaatggaaacttcatcatctccaccgatccaaacaccaatgagggggttctctgtgtggtcaagccgctgaactacgaggtgaaccgacaagttattctgcaagttggcgtgattaacgaggcccaattttccaaagctgcgtcgtcacagactcctacaatgtgcaccacaaccgtcactgttaagattatcgactcagatgaaggacctgaatgtcacccacctgtcaaggtcatccaatcacaggatggcttcccagcagggcaggagttactcggatataaggctctcgaccctgagataagtagcggagagggtctcaggtaccagaaactaggcgacgaggacaattggttcgagattaatcagcataccggagatctgcgaaccctgaaggtgttggatagagagtcaaaattcgtgaagaataaccaatataatatctctgtggtcgccgtagatgccgttggcaggagctgtacgggcacgctggttgtgcatttagatgactacaatgaccacgcaccccaaattgataaggaagtgaccatctgccagaacaacgaggattttgccgtgctgaaacccgtagacccggacggaccagagaatggcccaccattccagttttttctggacaactctgctagcaagaactggaatattgaggagaaggacggtaagaccgccatcttgcgacagcgccagaatctggactataattactacagtgtgccaatacaaatcaaagaccggcatggtcttgtggcgacccacatgctcaccgtgcgggtgtgcgactgcagcaccccaagtgagtgcaggatgaaggacaagtctacgagagacgtgagacccaacgtgattttggggcgctgggctattctcgccatggttttaggctccgtgctgttgctgtgtatactttttacatgcttttgcgtaacagctaaaagaaccgttaaaaaatgcttccctgaggacatcgcacagcagaatttgattgtctcgaacacggaaggacccggggaagaggtgactgaggcaaacattcgcctgcccatgcagacctcaaatatatgcgacacgtcgatgtcagtcgggacagtgggcggtcagggaattaagactcaacagtcgtttgaaatggtgaaaggaggttatacgctggactcaaataagggtggcggacatcagaccctggaatctgtgaagggagtcggacagggtgataccgggcggtacgcatatacggattggcagagctttactcagcctaggttgggggaagagtccattagaggccacacactgatcaagaattag

SEQ ID NO: 185255 - DNA, 2685 bp, synthetic construct
  misc_feature 1..2685: note = Description of Artificial Sequence: Synthetic coding sequence
  source 1..2685: mol_type = other DNA
atggccctggccagcgccgcccccggcagcatcttctgcaagcagctcctgttcagcctccttgtgctgaccctcttgtgtgacgcttgccagaaagtgtacctgcgcgtcccaagtcacctgcaggccgaaactctggttggcaaagtcaaccttgaggaatgcctcaagtccgctagcctcatcaggtcaagtgacccagcctttcgtattctggaggatggctccatatacactacgcacgacctgatactgagctcagaaagaaagagtttttcaatcttcctatcagatggccagcggcgtgaacagcaagagatcaaagtggtactctctgccagggagaacaaaagcccaaaaaaacgacatacaaaggacactgcacttaagcgaagcaagaggagatgggctcctataccagctagtctcatggagaacagtctcggcccttttcctcagcatgtgcagcagatacagtctgatgccgcccagaattataccattttctacagtattagtgggcctggtgtcgataaagaacctttcaacttattctacatcgagaaggatacaggagacattttctgcacacgctccatcgatagggaaaaatatgaacagtttgccctttatggttatgctaccacggctgacggctatgcccctgagtatcccttgccactgatcatcaaaatcgaagacgataatgataacgcaccctattttgaacaccgcgtgacgatttttacggttcccgagaactgtaggagcgggacatcagttggtaaggtgaccgctacagatctggacgaacctgatacccttcatacaaggcttaagtacaagattttacagcagattcctgaccaccccaagcactttagtattcatcctgacaccggggtcattactactactacgccttttctcgatcgagagaagtgcgatacctaccaactcatcatggaggtccgcgacatggggggccagccttttgggctgttcaacacgggaaccattactataagtctagaagatgagaatgataacccaccctcgttcacagaaacttcttacgtcaccgaagtggaagagaatcggatcgacgtggagatactgaggatgaaagtgcaggatcaagatttaccaaacacacctcattctaaagctgtttacaagattcttcaggggaacgagaacggaaacttcattatctcgacagatcccaatactaatgaaggagttctctgtgtcgtcaagcccctaaattacgaagtgaatagacaggtcattctccaggtgggggtgatcaacgaagctcagttcagtaaggccgcctcctcccagaccccaaccatgtgcaccacaacagttaccgtcaagattatcgacagcgatgagggccctgaatgtcaccctcctgttaaagtcatccagtcacaggacggatttccagcagggcaggaactgctcggctataaagcgctggatcctgagatttccagcggggagggccttcggtaccagaagctgggggatgaagataattggtttgaaattaaccagcatacaggcgatctccggaccctgaaagttctcgatagagaatccaagtttgtgaagaataatcagtataacattagtgtcgtggccgttgatgcggtaggccggtcctgcaccggaacactggtcgtccacttggatgattacaatgatcacgccccccaaatcgacaaggaagtgactatttgtcagaacaatgaggacttcgctgtgctgaagccggtggatccagacggcccagaaaatggacccccgttccagttttttctggataatagtgcttctaagaactggaacatcgaagagaaagacggtaagaccgcaattctcagacaaagacagaatttagactacaactactacagcgttcctatccagattaaagaccggcatggtctagtggctacacatatgctgaccgttcgtgtgtgtgactgttctacgccttccgaatgcagaatgaaagataaatccacacgggatgtgaggccaaacgtgattctaggtcggtgggcgatccttgctatggtactgggaagtgttctgctactgtgtatactgttcacgtgtttctgtgtcaccgcgaagcggactgttaaaaaatgcttcccagaggacatcgcccagcagaatcttatcgtgtccaacacagaaggcccaggcgaagaggtcacagaagcaaatatccgtctgccaatgcagacttctaacatttgcgatacctctatgtcggtaggtactgtgggcggtcagggtattaaaacacaacaatcgttcgagatggtgaagggaggttacactctggattccaacaagggagggggtcaccagaccctcgaatcagtgaagggcgttggacaaggcgataccggaagatacgcatatacagattggcagagtttcacacagccaaggctgggtgagaaagtgtacctctgcggccaagacgaggaacacaagcactgtgaggattatgtctgttcttacaactacgaaggaaaggggtcattagccggatccgtgggatgttgtagcgaccgccaagaagaggaaggactggaattcctggaccacctagagcccaaatttcgaacacttgctaagacatgcattaagaagtag

SEQ ID NO: 185256 - DNA, 2691 bp, synthetic construct
  misc_feature 1..2691: note = Description of Artificial Sequence: Synthetic coding sequence
  source 1..2691: mol_type = other DNA
atggccgccgccggcccccggcggagcgtgcggggcgccgtgtgcctccatctgctacttacactggtcatcttctcccgagctggagaggcttgtaaaaaggtgatccttaatgtgccatcaaagctggaggcggataagattatcgggcgcgtgaatctggaggaatgttttcgctccgcagatttgattaggagttctgacccagatttccgggtgctaaatgatggatcagtgtacactgcgcgggccgttgcgttgtcagacaaaaaacggagcttcaccatttggttgtccgataagcggaagcagacccagaaggaggtgaccgttttgctggagcaccagaaaaaggtatccaagactagacatacccgcgaaactgtgcttaggcgggccaaaaggaggtgggcaccaatcccctgcagcatgcaggaaaattctctgggaccatttcccttgttccttcagcaagtagaaagcgacgctgcccagaattatactgtgttctattctatcagcggccggggcgtggacaaagaaccgctcaacctcttttatatcgagcgtgatactgggaacctcttctgcaccagacccgtggaccgggaagagtacgatgtgttcgatctgatcgcctacgccagcaccgcagacggctactctgcagatttgccactcccattacctatacgtgtcgaagacgaaaacgataaccaccctgtgttcacagaggccatctacaattttgaagtgctggaatcaagtcgccccggaacaactgtcggggtcgtctgcgctaccgatagggacgagccggacacgatgcatacacggctcaagtacagtattctgcagcagacccccaggagccctggcctatttagtgtgcatccaagcacaggggtgataaccactgtatcccactacctggatagagaggttgtggataagtactcactgatcatgaaagtccaggatatggacgggcagttcttcggacttatcgggactagtacttgtatcatcacggtcactgactctaatgacaatgctccaacattccgccagaacgcctatgaggcatttgtggaggaaaatgcgtttaacgtcgagatcctcagaattcccatcgaagataaggacctaatcaacactgccaattggcgtgtgaatttcacgatcctaaaaggcaatgagaatggacactttaagataagcacagataaagaaaccaacgaaggagtcctgtcagtggtgaagccgttgaattacgaggaaaaccggcaggtgaacctcgagattggcgtgaacaacgaggccccatttgcacgggacataccccgggttaccgccttgaacagagccctggtgactgttcatgtcagagacctggacgaagggcctgaatgtacacccgctgcgcagtacgtgcgaataaaggagaacctcgccgtaggttctaagattaatgggtataaggcatacgacccagagaaccggaacggcaatggcttgagatataagaaactgcatgatcccaaaggctggatcacaattgatgaaattagtggcagtatcattacgagcaagatcctggacagggaggtcgagacacctaagaacgagctctataacatcaccgtgctcgctatcgacaaagacgaccgcagctgtacaggcactttggctgtgaacatcgaagatgtgaacgataatccaccagagattctacaggaatacgtcgtcatttgtaaacccaagatgggatataccgacattttagcagtggatccggacgagcctgtgcatggggccccgttttatttttccctgccaaacacgtctcccgagattagtaggctgtggtcactcactaaggtcaatgacaccgccgcccgcctctcctatcagaagaacgccggatttcaagaatataccattccaatcactgtgaaggaccgagctggacaagcagcgacgaaattgttgcgcgttaatctgtgcgaatgtacccatcccacccaatgccgtgctacaagccggtccactggggttattctgggcaaatgggcgattctggcaattctgctggggatcgctcttctcttcagcgtgctccttactctggtgtgtggggtgtttggtgcgactaagggaaaacggttcccagaagatctggctcagcagaatctgataatctcaaacaccgaggcccctggcgacgatcgcgtgtgcagcgccaatggctttatgactcagactacaaacaactcttcccaagggttttgtggcaccatgggctccggcatgaagaacggcggacaggaaaccattgagatgatgaagggtggcaaccagacgctcgaatcatgcagaggagccggccatcaccatactcttgattcttgcaggggaggccacacggaggtggacaattgccgatatacctattccgagtggcattccttcacacagccccgcctgggggaaaagctgcaccgctgtaaccagaacgaagacagaatgccctcacaagattatgttctcacatataattacgaaggacgagggtcgcccgccggcagcgtcgggtgttgctctgaaaagcaagaggaggacggattggacttccttaataacttagagcctaaatttataactttggctgaggcgtgcacaaaacggtag

SEQ ID NO: 185257 - DNA, 2520 bp, synthetic construct
  misc_feature 1..2520: note = Description of Artificial Sequence: Synthetic coding sequence
  source 1..2520: mol_type = other DNA
atggccgccgccggcccccggcggagcgtgcggggcgccgtgtgcctgcatttgttgctcacgctggttattttctctcgggccggcgaggcctgtaagaaagttattctgaatgtcccatcaaaactggaggcggacaagattattggacgggtcaatcttgaagagtgcttcagatccgctgacctgattagaagctcagacccagactttcgcgtgctgaatgatggctcagtgtataccgctagagccgtggccctgagtgacaaaaagcgatcctttacgatctggttgagtgataaaaggaaacagacccagaaggaagtgacagtactcctggagcaccaaaagaaagtttccaagactcgacatacacgcgagacagtgttgagaagagctaagcggagatgggcccccataccctgctctatgcaggagaactccctcggcccgttcccgctgttcctccagcaggttgagtctgatgctgcacagaactataccgttttctactccatctccgggcgaggtgttgacaaggagcccctgaatttattctatattgagagagatacaggtaatctattctgtactagacccgtggatcgggaagagtacgatgttttcgacctgattgcttacgcttccaccgctgacgggtattccgctgacctgccactccctctgcctattcgggtggaggatgagaatgacaatcatcccgtatttactgaggcaatttataacttcgaggtgctggagtcttcccggcccggcaccaccgtgggcgttgtgtgcgctacagacagggatgaacccgatacgatgcatactaggctcaagtattccattctgcagcagaccccccggtctccaggactattctcagtgcacccaagtaccggcgtgatcaccactgtgagccattatttggatcgcgaagtggtggataagtactcgttgataatgaaagtacaggacatggacggtcaattcttcgggctgatcggcacatctacgtgtataataaccgtaaccgatagcaatgacaacgccccaacttttcgccagaacgcctacgaagctttcgtggaagaaaacgcttttaatgtcgaaattctacggatacctatcgaagataaggatttgataaatacagccaattggagggtgaatttcactattcttaaagggaatgagaacggacactttaagatcagcacagacaaagagaccaacgaaggcgtactgtccgtcgttaagccactgaactatgaagagaataggcaggtgaaccttgaaatcggggtgaacaacgaggctccttttgctcgtgatattcctcgagtgacagccctgaatcgcgcactggtcacagtccatgtgcgcgaccttgatgagggaccagagtgcacccccgcagcccagtacgtgcgtataaaggaaaacctggccgttggctcgaagatcaatggttataaggcttatgaccccgaaaatagaaatggaaacggactgagatataaaaaactgcacgacccgaagggatggattactatagacgagatctcaggctcgatcatcacttcaaagattctggaccgagaggttgagactcctaaaaacgagctgtacaacattacagtgcttgctatcgacaaggatgatcgaagttgtacaggaactctcgccgtaaacatcgaggatgtgaacgataacccccctgaaatcctccaggaatacgttgtaatctgtaagcctaaaatgggttacactgatatattagccgtcgaccccgatgagcctgtgcatggcgcccccttctatttctcactacctaatacaagccccgagatctcaagactgtggtccttgacaaaggttaatgacacagctgctcggttgtcctatcaaaagaatgcaggcttccaggaatacactatcccaatcactgtgaaagatagggccggccaggccgccacgaagctattgagggtaaatctttgcgaatgtacgcatccaacgcaatgtcgcgccacgagtaggtctactggtgtgattctagggaagtgggccattctcgccattctgctgggcatcgccctgctgttcagcgtcttacttaccctggtgtgtggcgtattcggagccacaaagggtaaaagattccctgaagatttggcccagcagaatttgattatttccaatactgaagcgcccggagacgatcgtgtgtgttccgccaacggcttcatgactcagaccactaacaattcgtcacagggattttgtggaactatgggaagcggcatgaagaacgggggacaggagacaattgaaatgatgaaggggggaaatcagaccctagaaagctgtcgtggcgctggacaccatcacacactggatagctgccgggggggacatacagaagtcgacaactgtcggtacacatatagcgagtggcatagttttactcagccaagactgggcgaggaaagcatacggggtcatactggctag

SEQ ID NO: 185258 - DNA, 3150 bp, synthetic construct
  misc_feature 1..3150: note = Description of Artificial Sequence: Synthetic coding sequence
  source 1..3150: mol_type = other DNA
atggactggagcttcttccgggtggtggccatgctgttcatcttcctggtggtggttgaggtaaattctgagttccgcatccaggttcgagactacaacactaaaaacggcacaatcaaatggcatagcattcgtcggcagaaacgtgagtggatcaagttcgctgctgcctgtagggaaggcgaggataattctaagaggaacccaatcgccaaaatccactcagactgtgccgctaaccagcaagtcacctaccgcatttctggcgtgggaatcgatcagcccccatacggcatatttgtgattaaccagaagacaggggaaatcaacattacaagtatcgtggaccgggaggtgacaccctttttcattatatactgccgcgcattaaactctatggggcaggacctggagcggccgcttgagctgcgcgtccgcgttttagacattaacgataacccaccagtgtttagtatggccacatttgccggtcagatcgaagaaaacagcaacgctaacaccctggttatgatcctgaacgcaacagatgctgacgaacccaataatctcaactccaagatagctttcaagattatccgtcaggaaccttctgattccccaatgttcatcattaacagaaacactggggaaattcgcacaatgaacaatttccttgacagagagcaatatggccagtacgcccttgccgtgcgaggctctgacagagatggcggtgctgacggcatgagcgctgaatgcgaatgcaacatcaaaatattggatgtgaatgacaatattccctacatggaacaatcctcctacacaatcgagattcaggagaacacgctcaattctaacttactagagattagagtcatcgatctggatgaagagttttccgccaattggatggcagttattttcttcatttccggcaatgaagggaactggtttgaaatcgagatgaacgaaaggacaaacgtgggaatccttaaagttgtcaaaccattggactatgaagcaatgcagagccttcagctgtcaatcggagtccgcaataaagccgaattccaccattctatcatgtctcagtacaaactgaaggccagtgcgatcagcgttactgtactcaacgttatcgaaggccctgtgttccgcccaggatcaaagacttatgtggtgactggaaacatgggtagcaacgacaaagttggcgacttcgtagctactgatctggatacaggtaggccttccacgacagtacgctatgtgatggggaataatcccgccgaccttcttgcagtcgactcccggaccgggaagctaacgctgaaaaataaagtgacaaaggaacagtacaacatgctgggaggaaagtaccaggggacaatccttagtattgatgacaacctgcagaggacctgcactggcacaattaatatcaatattcagagcttcggcaacgatgataggacaaatactgagccgaacacgaaaatcaccaccaacaccggtcgccaggagagtacgagtagtacaaactacgatacgtcaacaacttcaaccgacagctctcaagtctattcctccgagccgggtaacggggccaaagaccttctgagcgacaacgtgcattttgggcctgcaggaattggactcttgatcatgggctttctagtgctcggcctcgtcccctttttgatgatttgttgcgactgcggaggcgcaccaaggtctgccgccggattcgaacccgtgcccgagtgctccgacggtgctattcattcctgggcagtcgagggtcctcaacctgaacccagagacatcacaacggtaatcccccaaatcccacccgacaacgctaacatcatcgaatgcattgacaatagtggggtgtacactaatgagtacggggggagagaaatgcaggatttggggggcggggagcgcatgacagggtttgagcttacagagggcgtgaaaacctccggtatgcccgagatatgccaggagtattcggggacactacgcaggaacagcatgagggagtgtcgcgaaggaggactcaatatgaactttatggagtcctatttctgccagaaggcttacgcttacgcagatgaggacgaaggaagaccttctaatgactgtcttctgatctacgacatcgaaggcgtgggcagtccagccgggagtgtcggatgttgctcattcatcggtgaggatcttgacgattcctttctcgacacactcggccctaaatttaagaagctcgctgatatcagcttgggcaaggagagctatcccgatctggatcccagctggcctcctcagagcaccgagcccgtgtgtctacctcaggagacggagcctgtggttagcggacaccctcctatctcccctcatttcggtaccaccactgtgatctccgagagtacatatccctccggccccggcgtgctgcatcccaaacctatcttggacccgttgggatatggtaatgtaaccgtgacagaatcatataccacctctgatactctaaaaccctctgtacatgtgcacgataacagacctgccagcaatgttgttgtcaccgagcgggtcgtcggaccaatcagtggagctgacctgcatgggatgcttgaaatgccagatctacgcgacggctctaacgtgattgtcacggagagagtgattgccccgtcttcctccctgccaacttcccttacaatccaccaccctcgcgaatcatcaaacgtggttgtaaccgaaagagttattcagcccactagcggtatgatcggttctttgtcaatgcaccccgagctggccaatgcccataacgtcatagtcaccgaaagggtcgtaagcggcgcaggcgttacaggaatttcaggaacaacagggatttctgggggcattggttcttccggattggtgggcacttcaatgggcgccggctccggcgctcttagtggcgcgggcatctccggcggaggcatcggcctgtcctcactcgggggtactgccagtataggtcatatgaggtcgtcctctgaccatcactttaaccagacaatcggctcggcatcgccaagtactgctaggtccaggattaccaagtactcgacggtgcagtatagtaagtag

SEQ ID NO: 185259 - DNA, 3357 bp, synthetic construct
  misc_feature 1..3357: note = Description of Artificial Sequence: Synthetic coding sequence
  source 1..3357: mol_type = other DNA
atggcccggagccccggccgggcctacgccctgctgctgctgctgatatgctttaatgtggggagcggcttgcatctgcaggttctttcgaccaggaatgagaacaagctgttgcctaagcacccccatctcgtgcggcagaaacgcgcctggatcacagctcccgtggccttgagggagggagaagatctgtcaaagaaaaatcctatcgctaaaatacactcagatctggctgaggaacgcggactgaaaatcacctacaagtataccggcaaaggtatcacagagccccccttcggcattttcgtgtttaataaggatactggggaattgaatgtcacctccatcctggaccgcgaggagacaccatttttcctgctgaccggctatgcgctggacgctcgaggcaacaacgtggagaaacctcttgaactgcgtataaaggtattagatataaatgataacgagccagtgtttacacaggatgtatttgtggggtcagtagaggagctctcagccgctcacactcttgtgatgaagataaatgccactgatgcagacgagcccaacacactgaactcaaaaatttcctataggatcgtaagccttgaacccgcttacccacctgtcttttacctgaacaaggatactggcgagatctacaccaccagtgttacactcgacagggaagagcacagctcatataccctcacggtcgaagcccgagacggaaacggtgaggtgacagacaaacccgtaaagcaggcacaggttcagattcgaatcctcgacgtaaacgataacatccccgtggtggagaacaaggtgctcgagggaatggtcgaagagaatcaggtgaatgtcgaggtgacacgtatcaaagtgtttgacgccgatgaaatcggtagtgataactggcttgctaatttcacattcgcttctggtaacgagggggggtacttccatattgaaacagacgcccaaactaacgagggtatcgtgaccttaatcaaagaagtggactatgaggaaatgaaaaacctggattttagtgtcattgtggctaacaaggcagcgttccacaagtctattcgttcaaagtacaagccaacacccatccccattaaggtgaaggttaagaacgttaaggaaggcatacactttaaatctagcgtgattagcatctacgtgagtgagtccatggacaggtcgagcaagggacagattatcggcaactttcaggctttcgatgaggacacagggctgccagctcacgcccgctatgtgaaattagaggacagagataactggatctcagtagactccgtgacaagcgaaataaaactggcaaagttacccgacttcgaatctcgctacgtacagaatggcacttataccgtgaaaattgtggccattagtgaggactacccgcggaaaactatcacaggcacagtgcttatcaacgtagaggatattaacgacaactgtcctacattgatcgaaccagttcagaccatctgtcatgatgccgaatacgtgaacgtcactgctgaggacctcgatgggcaccctaattccgggccattcagcttttctgtaatagataaaccccctggaatggctgagaagtggaaaattgctaggcaagagtcgacgagcgttctgttacaacagagtgagaagaagctgggtcgttctgagatccagtttttgatatcggataatcagggtttttcttgtccagagaaacaggttttgaccttaacagtgtgcgaatgtttgcacgggtcaggctgcagagaagcacagcacgattcctacgtggggctgggccctgctgctatagccctgatgatattagcctttctgctcctgctgctggtgcctctgctgttgcttatgtgtcactgcggtaagggcgccaaggggttcacacccattcccggtacaatcgagatgctccatccatggaacaatgagggagcacccccagaagataaggttgtcccttcatttcttcctgtagatcagggaggttctctagtgggcaggaacggtgtaggaggtatggcaaaagaggctactatgaagggctcatctagcgcatctatagtgaagggccaacacgagatgagtgagatggatggacgctgggaagagcacaggtcgctgttgagcgggcgggcaacccagtttactggcgcgaccggcgccattatgactaccgagacaaccaaaacagcgagggcgacgggagcttctcgcgatatggccggcgcccaggctgccgccgtcgctctgaatgaagagtttctgcgaaactattttactgataaggctgcaagctatactgaggaagatgaaaatcatacggctaaggattgccttctggtatactctcaggaagaaacggaaagtctcaatgccagcatcggttgctgctcattcattgagggtgaacttgacgaccggttcctagatgacctggggttgaagttcaagaccctggcagaggtatgtctcggccagaaaattgatataaataaagaaatcgagcagcgacagaagcccgcaacagaaacaagcatgaacacggcttctcatagtctttgtgaacaaaccatggtaaactcagagaacacgtattcctcaggttcgtctttccccgttccgaaatcactgcaggaagccaatgccgagaaagtcacccaggaaatcgtgaccgagcgctccgtgagctcacgccaggctcagaaagtggccacccccctgcccgatcctatggcctccagaaacgtgatcgccaccgaaacatcgtacgtgaccgggtcaaccatgccacctaccaccgtgattctgggaccaagtcagcctcagtccctgatcgttaccgagcgggtgtacgcaccggcaagcacccttgttgatcaaccctacgcaaatgaggggaccgttgtggtcaccgagcgcgtaattcagccccacggcggaggctcaaacccactggagggcacgcagcacctccaggacgtgccttatgtgatggtgcgagagcgcgagtcatttctggccccaagtagcggcgtgcagccaactcttgcgatgcccaacatcgcagttggtcagaacgtgacagtgaccgagcgagtgctggctcccgctagcacccttcagagctcgtatcagattcccactgaaaatagcatgacagctcggaataccacagtcagtggggcgggtgtgcccggaccgcttcctgactttggcctcgaagaatccgggcattcgaattcaaccatcaccactagctccacgcgggtgaccaaacattctacagtccaacactcctacagttag

SEQ ID NO: 185260 - DNA, 3123 bp, synthetic construct
  misc_feature 1..3123: note = Description of Artificial Sequence: Synthetic coding sequence
  source 1..3123: mol_type = other DNA
atggactggctgttcttccggaacatctgcctgctgatcatcctgatggtggttatggaggtgaattccgaatttatagtggaggttaaggagttcgatatagagaacgggactactaagtggcagacagtacggcgccagaagagagaatggattaagtttgctgcggcctgtagggaaggagaagacaattctaagcggaatccgatcgcgaagattaggtctgactgtgagtctaatcagaagataacctaccgtatcagcggggtcggcatcgacaggccaccttacggtgtgttcaccattaatccaaggaccggggagatcaatattacatctgtggtcgatagggagattacacctctgttcctcatttactgcagagctttgaactctcgcggtgaggacctggagcgacccctggaactacgcgtaaaggtcatggatattaatgacaatgccccagtgtttagccagtcggtgtacaccgcaagcatcgaggagaattctgacgctaataccctggtcgtcaaactttgcgctaccgatgctgacgaagaaaaccacctaaactccaaaattgcttacaagattgtctctcaagagccaagtggagccccaatgtttatactcaaccgctacacaggcgaagtttgcaccatgagttcatttttggaccgggaacagcacagcatgtataatttagtggtgcgagggtcagatcgcgacggcgctgctgacggacttagctccgagtgcgactgtcgtatcaaggtgctcgatgtgaacgacaattttccaaccctcgagaagacatcgtacagtgcctctatcgaagagaattgcttgagctccgaactgattcgcttgcaggccatcgatttggatgaagagggcacggacaattggctcgcgcagtacctgattctgtcaggaaacgatggtaactggttcgacatccaaacagatcctcagacaaacgaagggatactgaaagttgtcaaaatgctggactacgaacaggcccctaatatacagcttagtattggagtgaaaaaccaggccgactttcactactccgtggcgtcccagttccagatgcatcccactcccgtgaggattcaggtggttgatgtgagggaaggccctgccttccacccatccacaatggcgtttagcgtccgggaggggattaagggttccagcttgctgaactacgtcttaggcacatacaccgcgatcgaccttgatactgggaacccagctaccgatgttagatatataattggccatgacgctggcagctggctcaaaattgactctcgtacgggtgagatacagttctcacgcgagttcgacaagaaatctaaatacatcataaacggaatatataccgcagaaatcttggcgattgatgacgggtccgggaagacggctacagggactatctgcatagaagttcctgacattaacgattattgtcctaacattttccctgagcgccgaaccatatgtattgactctccttccgtgctaatctctgtgaacgagcacagctatggctccccattcaccttttgtgtggtggacgaacctcccggtatagctgacatgtgggatgttcgtagcacaaatgcgacgtccgctatactgaccgcaaagcaagtattgagccccggcttttatgagattcccatcctggtgaaagactcctacaatcgtgcctgcgaactggcacagatggtgcagctgtacgcctgtgactgcgatgataatcacatgtgccttgattccggtgccgcagggatatatacagaggatatcaccggagatacctacggacctgtcaccgaagaccaggccggagtgagcaatgttggtttaggccctgccggaatcggcatgatggtgttggggatcctgttacttatcctcgcccccctactcttgctgctatgttgttgtaagcagagacagcctgagggtctgggcacccgatttgcacctgtcccggagggaggcgagggggtgatgcagtcctggcggatcgaaggcgctcaccctgaagacagggacgtgagcaacatttgcgcgccaatgaccgctagtaacactcaggaccgcatggattcctctgagatctacaccaatacctatgctgctggaggtacggtagagggaggagtcagcggcgtggagctgaacactggtatgggtacagctgttggcctgatggctgccggcgctgccggcgcctccggcgctgcccgtaaacgatccagcacaatgggaacacttcgagactacgctgatgcagacatcaacatggcctttctagattcttatttcagcgagaaggcttatgcctatgcagatgaggacgagggccgccccgctaacgattgtctgcttatctatgatcatgagggcgtgggcagcccagtgggtagcatcggatgttgttcctggatagtcgatgacctagacgaatcttgcatggagaccctggatcccaagttcaggacactcgccgaaatctgcttgaacaccgaaatcgaacccttcccttcacaccaggcctgtattccaatctcaactgatttgccactcctggggccaaactattttgtgaacgagtcaagcggtctaactccatcggaagttgaattccaggaggagatggcagcttctgaacctgttgtacacggggatataatcgtcacagagacctacggaaatgcagacccctgtgtccagccaactactatcattttcgatcctcagctcgcccccaacgtggtcgtgactgaagcagttatggctcccgtttatgatattcagggtaacatctgtgtgccagcagaactggccgactataataacgtgatttacgcagagcgcgtgttggctagtccaggggtgccggatatgagtaattcctccacaacagaaggatgcatgggacctgtcatgtcaggaaatatcctcgtgggcccagagattcaggttatgcagatgatgagtcccgatctgccgatcgggcagactgtcggctccacatcgcctatgacctctaggcatcgcgtcacccgctacagtaatatccattacacacaacagtag

SEQ ID NO: 185261 - DNA, 3180 bp, synthetic construct
  misc_feature 1..3180: note = Description of Artificial Sequence: Synthetic coding sequence
  source 1..3180: mol_type = other DNA
atggactggctgttcttccggaacatctgcctgctgatcatcctgatggtggtgatggaagtgaactcagagtttattgtggaggtaaaggagtttgatatcgaaaatggaaccacaaagtggcagactgtaaggagacagaagcgagagtggataaagttcgccgcagcctgtcgagagggagaggacaattccaaacggaaccccatagctaagatacgcagcgattgcgaatccaatcagaaaattacctatcgcatctccggggtcgggattgataggcccccctatggtgtgtttacaatcaatccaaggacaggggagattaacatcacctccgtggtcgaccgggagatcacccccctgtttctcatttattgcagagcactaaactctaggggtgaagatttggaaaggccacttgagctccgcgtcaaggtcatggatattaatgacaatgccccggtattttcacaatcggtctacactgcgtcaatcgaggagaatagcgatgccaacacactggtggttaaactttgcgccacagacgccgacgaagagaaccacctgaactccaaaatcgcttataagattgtatctcaggaacccagcggtgccccaatgttcatcctgaataggtacaccggcgaggtgtgtactatgtcctcattcctcgaccgagaacagcactctatgtacaatctggttgtacgcggctctgaccgagacggtgccgccgacggcctctcctcagagtgcgattgtcgtattaaggtcctcgatgtgaatgacaactttcctactttagagaaaaccagctacagtgcgagcattgaagaaaactgcctgtccagtgagctgataagattgcaggcaatcgacttagacgaggagggcacagacaattggcttgcacaatatctaattctcagcgggaatgatggtaactggttcgacatacaaactgatccacaaacgaacgagggcattctaaaggttgttaaaatgctggactatgaacaagcccccaacatccagctgtccataggcgttaaaaatcaagccgacttccactactctgtggcttcccaattccagatgcaccctacacccgtgcggattcaggtggtggatgtccgcgagggaccagcattccaccccagcaccatggcgttcagcgtccgcgaaggaatcaaggggagctctcttcttaattatgtgctgggcacttacaccgcaatcgaccttgatactggcaaccccgctactgatgtccgctacattattggacacgatgcaggtagttggctgaagattgactctagaaccggtgaaatccagttctcacgcgaatttgacaaaaaaagtaagtacatcataaatggcatctatacagcagagatactagccatcgacgatggatccggcaaaactgccaccggcacaatctgtatagaagtccctgatattaacgactattgtcctaacatattccctgaacgtcgcactatttgcattgacagtccatcggtgttgatctctgtcaacgagcatagctacggatctcctttcactttctgtgtcgtggatgaacccccaggcatcgctgatatgtgggatgtccgatctacaaacgccacctccgcaatactgaccgcaaagcaggtcctaagtcctgggttctacgagataccaatcctcgtaaaggactcatacaaccgcgcctgcgagctcgcacaaatggtgcagctttacgcctgtgactgtgacgataatcacatgtgtctcgacagcggtgcagccggtatctacaccgaagatataacgggcgatacttacggacctgtgacagaagatcaggcaggagttagcaacgtggggctagggcctgctggaattggaatgatggtcctcggaatccttctattaatcctggctccgctcttgctgctcctgtgctgttgtaaacaacgacagcccgagggcctcggaacccgctttgcccctgtgccagaaggaggggagggagtaatgcagagttggcgcattgagggcgcccatcccgaggatcgcctcttttctgcttatgccctccccggaggcggcggaacagccgatggtggtggttctgttctgggcaggtgcgccctccaggccactcctgctctgcttaaccagcacccgcccttctctgaaatatacacaaatacttacgcagccggtgggactgtggagggaggagtgagtggggtggaactgaacacagggatgggaaccgccgtcgggctcatggccgctggtgcggccggcgcttccggggcggctcgaaagaggagcagcacaatggggacacttagggattatgctgatgccgatatcaatatggcgttccttgattcttacttctcagaaaaggcttatgcctacgccgatgaggatgagggacgacctgccaatgattgcttactaatttacgaccatgagggggtgggttcgcctgtgggctctataggttgctgctcctggattgtagatgatctcgacgaatcgtgcatggagacactagaccccaagttccggactttggcggaaatatgccttaacaccgagatcgagcctttcccctcacaccaggcttgcatacccatctctacagacctacctctgttgggacctaattactttgtcaatgaatccagcgggttaacaccttcagaggtagaattccaggaagagatggccgccagcgagccagtagttcatggagacattattgttacggaaacctatggtaatgcagacccttgcgtgcagcctactaccatcatcttcgacccccagctcgccccgaacgtcgtcgtcacggaagccgtcatggcccctgtctatgacatccaaggtaatatttgcgtccccgcggagctggctgactacaataatgtgatatacgcagaacgggtgctggcttcaccgggggtccccgacatgtctaattccagcaccactgaagggtgtatgggacctgtgatgtctggcaatatcttggtcgggccggagatccaagttatgcaaatgatgtccccagacctccccatcggtcagaccgttggttctacctcccccatgacctcccgacatagggtcaccaggtatagcaatattcattatacccagcagtag

SEQ ID NO: 185262 - DNA, 498 bp, synthetic construct
  misc_feature 1..498: note = Description of Artificial Sequence: Synthetic coding sequence
  source 1..498: mol_type = other DNA
atggccagcggcgtgcaggtggccgacgaggtgtgccggatcttctacgatatgaaggtgaggaagtgttctacccctgaagaaataaagaagcggaagaaagctgttattttttgtctgagcgccgacaagaaatgcattatcgtcgaagagggaaaggagattcttgtgggtgatgtgggagtgacgattaccgacccttttaagcattttgtgggaatgctccccgagaaagactgccggtatgccctgtatgatgcctcattcgagaccaaagaatctcggaaggaggagcttatgttttttttgtgggcccccgagctcgccccactgaaatcgaagatgatatacgcctcttccaaggacgctatcaagaagaagttccagggcataaagcacgagtgccaagcaaacgggccagaagacctaaatagagcatgtatcgccgagaagctgggtggatcgcttatcgtcgccttcgaaggttgtccagtgtag

SEQ ID NO: 185263 - DNA, 447 bp, synthetic construct
  misc_feature 1..447: note = Description of Artificial Sequence: Synthetic coding sequence
  source 1..447: mol_type = other DNA
atgaaggtgcggaagtgcagcacccccgaggagatcaagaagcggaagaaggcagtgatcttctgcctgagcgccgataaaaaatgtatcattgtggaggagggaaaggagatcctcgtcggagatgttggggtgactatcactgacccatttaagcactttgtgggcatgctaccagagaaggactgcaggtacgctctatatgatgcaagcttcgagacaaaggaatccaggaaggaggaacttatgttcttcttgtgggctccagagctcgcgccacttaaatccaagatgatttacgccagcagtaaagatgcaattaaaaagaagtttcagggcattaagcacgagtgtcaagcaaatgggcctgaggatctgaaccgcgcttgcattgccgaaaagctgggtgggtctctaatcgtagcgtttgaaggttgtcctgtttag

SEQ ID NO: 185264 - DNA, 897 bp, synthetic construct
  misc_feature 1..897: note = Description of Artificial Sequence: Synthetic coding sequence
  source 1..897: mol_type = other DNA
atgagcgacgccaacctggacagcagcaagaagaacttcctggagggtgaggtggacgatgaggagtctgttatcctgaccttagtccctgtgaaggatgacgctaacatggaacagatggagccatccgtcagctctaccagcgacgtgaaactagagaagccaaaaaaatataaccctggacatctactgcagaccaacgagcagttcaccgcacctcaaaaggctagatgcaagattccggcattgccactccccaccatcttaccacctataaataaggtttgtagagacactctccgggattggtgccaacagcttggactgtctactaacggcaagaagattgaggtgtacctgagactgcatagacacgcttacccagaacagcgtcaggacatgcctgaaatgagtcaggaaaccaggttacagcgctgctccagaaagcggaaggccgtgacgaagcgcgctaggctgcagaggtcatatgagatgaacgaaagggccgaggagacaaataccgtcgaggtcatcacctctgcacctggggcaatgctcgcttcttgggcccgcatcgcagcaagggcagtgcaacccaaggccctgaactcttgcagcatcccagtctcggtcgaagcttttctgatgcaggcctcaggggtgagatggtgcgtagtccatggacgcttgttgagcgccgatacgaagggttgggtgcggctgcagttccatgccggccaggcttgggtgccaacgacccatcggagaatgatcagtttgtttcttttgccagcctgtatctttccctctccggggattgaggacaatatgctgtgtccggattgcgctaagcgaaataagaaaatgatgaagagactgatgaccgtagagaagtag

SEQ ID NO: 185265 - DNA, 480 bp, synthetic construct
  misc_feature 1..480: note = Description of Artificial Sequence: Synthetic coding sequence
  source 1..480: mol_type = other DNA
atggaccccagccagttcaaccccacctacatccccggcagcccccaaatgctaacagaagaaaactctcgcgatgactctggggctagccagatcagcagcgagactctcataaagaatctgagtaacctgaccatcaacgcctcatcagagtccgttagccctctgagtgaggccctgctgcgcagagaaagtgtgggggcagctgtgctgagggagatcgaagacgaatggctctattcgcgcagaggagtccgcaccctgctgtcggtgcaacgagaaaaaatggccaggctgcgatacatgctgctgggcggagtccgtacacatgagaggcgccctactaataaggaacccaagggtgttaaaaaagaatccagacccttcaaatgcccttgctccttttgtgtcagtaatggctgggatccctccgagaacgctaggatcggcaaccaggacaccaaacccctgcagccttag

SEQ ID NO: 185266 - DNA, 915 bp, synthetic construct
  misc_feature 1..915: note = Description of Artificial Sequence: Synthetic coding sequence
  source 1..915: mol_type = other DNA
atgctgcggggcagcgccagcagcaccagcatggagaaggccaagggtaaagaatggacatccacggaaaagtcgagagaagaggaccaacaggcctctaaccagccgaatagcatcgcgctcccggggacttccgccaagcggacgaaggagaaaatgtcaataaaagggagcaaggtcctatgccccaaaaagaaggctgaacacacagataacccccgaccccagaagaagatcccaattccccctctcccgtccaaactcccccctgttaacctaatccaccgggatatcctacgcgcatggtgccaacaactgaagctgtctagtaagggtcagaaactggatgcttacaaaagattgtgtgcattcgcttaccctaaccagaaggacttcccaagcactgctaaggaggcaaaaattcgtaaatctttacagaaaaaacttaaggtggaaaaaggcgaaacatcgttgcagtcctctgagacccatccccccgaagtggctctccctccagttggcgaaccacccgctctggagaattccacagccttgctggagggggtgaatacagtggtggtgaccacatcagccccggaggcactactagcatcatgggcacggatctcagctagggcccggactcctgaggcagtagagagccctcaagaggcatctggggttcgttggtgtgtcgtgcatggcaaatctctgccggcagacaccgatggttgggtccacctgcagtttcacgcaggtcaggcctgggtgcccgagaaacaggaggggcgtgtgagcgctctttttttactccccgccagtaattttcccccacctcacttagaggataatatgctgtgcccaaagtgtgttcaccgcaataaagtgctgattaagtccctacaatgggagtag

SEQ ID NO: 185267 - DNA, 351 bp, synthetic construct
  misc_feature 1..351: note = Description of Artificial Sequence: Synthetic coding sequence
  source 1..351: mol_type = other DNA
atgggcaccctgcccgcccggcggcacatccccccctgggtgaaggttccagaagacctgaaagatccagaagtattccaggtgcaaacgcgcttgctgaaggctatttttggcccagatggcagcaggataccttacatcgagcaggtctctaaggccatgctggagttaaaggccctcgagtctagtgatcttaccgaagtcgttgtttatggttcatatttatacaagctgcgcacaaagtggatgttacagagtatggccgaatggcataggcagaggcaggagcgaggcatgctgaagctggccgaggcgatgaatgccctcgagctcggtccttggatgaagtag

SEQ ID NO: 185268 - DNA, 1104 bp, synthetic construct
  misc_feature 1..1104: note = Description of Artificial Sequence: Synthetic coding sequence
  source 1..1104: mol_type = other DNA
atgagcagcaccctggccaagatcgccgagatcgaggccgagatggcacggacccaaaagaacaaggccacggcccaccaccttggcttgcttaaagccagacttgcaaagctgcgcagggagctcatcacgcctaaaggaggcggaggaggcggtccgggagagggtttcgacgtggcgaagactggagatgcacgtattgggttcgtagggtttccctctgttggaaagagtactctgcttagtaatcttgccggcgtatattccgaagtggctgcgtatgaatttactacactcactacagtccctggagtgatcagatacaaaggggccaaaatacagcttcttgatctccccggcattatagagggagctaaagatgggaagggaagaggcaggcaggtgatagcagtcgcaagaacgtgtaacctcatcctgatagtcttggatgtgctcaaacccctgggccataaaaaaattattgagaatgaactcgaagggtttggaatccgcctcaattctaagcccccaaacatcgggttcaaaaagaaggacaaaggcggcatcaatctgactgccacctgcccccagtccgagttggacgcagaaaccgtaaagtccattcttgccgagtacaaaatccacaatgcagatgtgacattaaggagcgatgcaacagctgacgatctcattgatgttgttgagggaaatcgggtatacatcccatgcatatacgtgctcaacaaaattgaccagatttcaatcgaggagctggacattatatacaaggtgcctcactgcgtgcctatctccgcccaccataggtggaattttgacgacctgttagaaaaaatttgggactatctgaagctcgtgcgcatttatactaaaccaaaaggacaactgccagactacaccagtcctgtagtgctaccgtatagtagaacaaccgttgaagatttctgcatgaaaattcataagaacctgatcaaagaattcaagtacgctctggtttggggcctgtcagtgaaacacaatccacagaaggtgggtaaggatcatactttggaagacgaagatgtgatccagatcgtgaagaaatag

SEQ ID NO: 185269 - DNA, 396 bp, synthetic construct
  misc_feature 1..396: note = Description of Artificial Sequence: Synthetic coding sequence
  source 1..396: mol_type = other DNA
atggccgccgccgtggccatggagaccgacgacgccggcaaccggctaaggttccagctggaactagagttcgtacagtgcctcgccaaccccaattacctgaatttcttggctcagagggggtactttaaggataaggcattcgtcaactacctaaagtatcttctgtattggaaggatcctgaatatgcaaagtatttaaagtatccccaatgtttgcacatgctggaactgctgcagtacgaacacttcaggaaagagttagttaatgcccagtgtgccaaattcatcgacgaacagcagatcttacactggcagcactacagccgaaagaggatgagactccagcaagctctagccgagcaacaacaacagaataacacctccggtaaatag

SEQ ID NO: 185270 - DNA, 1032 bp, synthetic construct
  misc_feature 1..1032: note = Description of Artificial Sequence: Synthetic coding sequence
  source 1..1032: mol_type = other DNA
atgggcatcctggagaagatcagcgagatcgagaaggagatcgcccggacccaaaaaaataaagccacagagtaccatttggggttgctcaaggcaaaacttgccaagtaccgcgcacagctgcttgagccaagtaaaagcgccagttctaaaggagaggggttcgatgtcatgaagtcgggagacgcacgggtggctttaattggcttcccatctgtggggaagagtacatttctttctctcatgaccagtacagccagtgaagccgcctcctatgaatttacaactctcacgtgtatccctggggtaattgagtacaagggcgctaatatccaattgcttgacctgcccgggattattgagggcgcagcgcagggtaaggggcgcggaaggcaggtaattgccgtcgcccgaaccgctgatgtcataatcatgatgcttgatgccacgaaaggcgaggtgcagcgcagtctgctcgagaaagaactcgagtctgtggggatcagactcaataaacacaaaccaaatatctattttaaacccaagaaaggaggaggaatttccttcaacagtaccgtgactctcacacagtgtagcgaaaaactagttcaactgatcctccacgagtacaaaatcttcaatgccgaggttctgtttcgggaggactgctctcctgacgagtttatcgacgtcatcgtggggaatcgcgtgtatatgccctgcctctatgtatacaacaagatagatcagattagtatggaggaagttgaccgccttgcgaggaagcctaactctgttgtgatctcttgtggcatgaaattgaacttagattatctacttgaaatgctttgggagtacctcgccctgacctgtatttacacaaagaagcgcggccaaaggcccgactttactgatgcaattatcttacggaaaggagctagtgttgaacatgtctgccataggattcacaggtcccttgcttcccagttcaaagcccctgcacccagcacagtacgctccggctgggcttag

SEQ ID NO: 185271 - DNA, 2037 bp, synthetic construct
  misc_feature 1..2037: note = Description of Artificial Sequence: Synthetic coding sequence
  source 1..2037: mol_type = other DNA
atggagctgcggagctaccagtgggaggtgatcatgcccgccctggagggtaagaatataatcatctggctgccaaccggagcggggaagacacgagcagctgcatacgtagccaagaggcacctggagacagtagatggcgctaaagtggtggtgctggtcaatagggtgcacttggtcacacaacatggcgaggagttccggcggatgttggatgggcgatggaccgtcaccacattgtctggggatatgggaccaagagcaggttttggccacctggccagatgtcacgacctactcatttgtacagcagagcttctgcagatggctcttacctcgccagaagaggaggaacacgtcgagcttacagtcttcagtcttatcgtggtagacgagtgtcaccatacccataaagatacagtctacaacgtcatcatgtcacaatacctcgaactgaagcttcagcgcgcgcagccactaccacaggtgctagggttgacagcctccccgggaacaggaggggccagcaagctggacggggcaatcaaccacgttctccagctgtgcgctaacctcgatacatggtgtattatgagcccacagaattgttgccctcagcttcaggaacattcccagcagccttgcaagcagtacaatctgtgtcacaggagatctcaggacccttttggagatctgctcaagaagcttatggaccaaatccatgaccacctcgaaatgcccgagctgtctcgcaagttcggcacacagatgtacgagcaacaggtcgtgaaattgtcggaggctgcagcacttgcaggcctgcaggaacaaagggtgtacgcactccacctccgtaggtacaacgacgctcttctcatacacgacacagtcagagccgtggacgcactagcggctttacaggacttttatcacagggagcatgtaacgaaaacacagatactttgtgccgagaggcgcctccttgcactcttcgacgatcggaagaatgaactggcccatctagcgactcatggccccgaaaaccctaaattggaaatgttagaaaagatcctgcagaggcagtttagcagtagcaattcaccgcggggcatcatattcaccaggacccgtcagagcgcccacagcctgctgctttggttgcagcagcaacagggccttcaaacagtggatattcgagcccaattgctcattggagcaggaaactcctcacagtcaacacacatgacgcagcgggaccaacaggaggtgattcagaagtttcaggacggcaccctcaacctccttgtggcaaccagcgttgcggaggagggtctagatattccccattgcaacgtcgtcgtgaggtacggattgctgacaaacgagattagtatggtgcaagcacgcgggagggcaagagccgaccagtccgtgtatgccttcgtcgccaccgagggttctcgagaattgaaaagagaattgattaacgaggcactggagacattgatggagcaggcagtggctgccgttcagaagatggaccaggccgagtaccaggccaaaatccgcgacctacagcaggccgcattaacaaaacgagcagcacaagctgcccaacgggagaatcaaagacagcagttcccagtcgagcacgtccagctcctttgtatcaattgcatggttgcggtgggacatggatccgaccttagaaaggttgagggtacgcatcacgtgaacgttaatccaaacttcagtaactattacaacgtgagccgtgaccccgtggttatcaataaagtgtttaaggattggaaaccggggggcgtgatctcttgtaggaactgcggggaagtctgggggctgcagatgatatacaagagtgtaaagctgccagtcttgaaggtgagatccatgttacttgagacgccccagggcagaatccaagctaagaagtggagccgggtcccattctctgtccctgacttcgacttcctacagcactgcgctgaaaacctgagtgacctaagcttggattag

SEQ ID NO: 185272 - DNA, 909 bp, synthetic construct
  misc_feature 1..909: note = Description of Artificial Sequence: Synthetic coding sequence
  source 1..909: mol_type = other DNA
atggagctgcggagctaccagtgggaggtgatcatgcccgccctggaagggaaaaatatcattatttggctgccgaccggagccggtaagacacgggcggccgcttacgtcgcaaagcgacatctggaaactgtcgacggcgctaaggtcgtcgtgctggttaaccgcgtgcatctggtcacccaacacggggaggagttcagacggatgcttgacggacgttggaccgtgaccaccctgagcggcgacatgggtcccagggccgggttcggtcacctcgcgagatgccatgatctgctaatctgcactgcagagctgcttcaaatggcactgacttcgcccgaagaggaagagcacgtggaactgactgtgttttctttgatcgtggttgacgaatgccatcacacacataaggataccgtatacaacgtcatcatgtcgcagtatttggaactgaagctccaacgagctcagcctctaccgcaggtcctggggctaacagcaagccccggaaccggcggtgccagtaaactggatggcgccatcaaccacgtactacaactttgtgccaacctggatacatggtgtatcatgtcgcctcagaattgttgtccacagcttcaagagcacagccagcagccttgtaagcagtacaatctttgtcaccgtagatcgcaggaccctttcggagaccttctgaaaaagctgatggaccaaatccacgatcatttagagatgccagaactgagccggaaattcgggacacagatgtacgaacagcaggttgtgaagctgtctgaggcagcggccctggccggactgcaggaacagagagtgtatgcactgcatctaaggcggtataatgatgctttgttaattcatgatacggtccgggcagtggacgcctag

SEQ ID NO: 185273 - DNA, 1464 bp, synthetic construct
  misc_feature 1..1464: note = Description of Artificial Sequence: Synthetic coding sequence
  source 1..1464: mol_type = other DNA
atggagctgcggagctaccagtgggaggtgatcatgcccgccctggagggaaaaaacatcattatttggctgcccaccggggcaggaaaaacccgggccgccgcttatgttgccaaaagacacctggagacagtggatggagccaaggtggtagtgcttgtgaaccgagtccacctggtgacgcagcacggcgaggagttccgccggatgttggacgggcgttggaccgtgactactctgtccggggacatgggcccccgcgcaggttttggacacctagcgcgttgccatcatacacacaaagataccgtgtataacgtgattatgtctcagtacttggagttgaagctgcagagagcacaaccgctacctcaggttctgggcctcaccgcttccccagggacaggcggagccagtaagctggacggggcaattaaccacgtccttcagttgtgtgccaatctcgatacatggtgcatcatgtccccccaaaattgctgcccccagctgcaggagcactctcagcagccgtgcaagcaatacaacctgtgccacaggcggtcccaggacccctttggtgatctcctcaaaaagctgatggatcagatccacgatcacctagaaatgccggagctgagtcggaagttcggcacgcaaatgtatgagcaacaagtcgtaaaactgtccgaggcggcagccctggcagggttacaggaacagcgtgtttacgcactacacctgaggaggtacaatgatgccctactgatacacgatacagttagggcagtggatgcccttgcagctctgcaggacttctaccacagggaacacgttaccaaaactcagatcctctgcgcggaacgccggctgttggcactgtttgacgataggaagaacgaactggctcatctcgcaacacatggaccggaaaatccgaagttagagatgttggaaaaaatcctccagcgccagttttcttcgtctaattctcctagagggataattttcacccgcacgcgtcagagcgctcattccctgctcttatggttacagcagcagcaaggactccagaccgtggacattcgtgctcagctgctcatcggagccgggaacagtagccagagcacccacatgactcagcgtgatcagcaagaggtcatccagaagttccaggatgggacactgaacctgctagtcgctacatctgttgccgaagaaggccttgacattccccactgcaatgttgtggtgaggtacgggctgctgaccaacgaaatcagtatggtgcaagcgaggggacgcgccagggctgatcagagtgtctacgccttcgtggcaaccgaaggttcacgggaactcaagcgtgaactcatcaatgaagccctggaaacgctaatggagcaggcagtggcagcggttcaaaagatggatcaggcagagtaccaggctaaggaattactttag

SEQ ID NO: 185274 - DNA, 471 bp, synthetic construct
  misc_feature 1..471: note = Description of Artificial Sequence: Synthetic coding sequence
  source 1..471: mol_type = other DNA
atggagctgcggagctaccagtgggaggtgatcatgcccgccctggaaggtaagaatattattatctggctacctactggagccggaaagacccgcgccgccgcctatgtggccaagagacacctggagaccgtggacggggctaaggtggtcgtgctggttaaccgtgtgcacctagtaacccagcatggagaggaattccgacgaatgctggacggccgttggacagtcactacactttctggcgatatgggcccccgcgccggattcggtcatctggcaagatgccatgatctgcttatttgtacagccgaacttctgcagatggctttgacctctccagaagaagaagaacacgttgagctcactgtattctccctgatcgtcgtagacgagtgccatcatactcataaagatactgtttacaacgtgattatgtcacagtacctggagctgaaactccagagatag

SEQ ID NO: 185275 - DNA, 2208 bp, synthetic construct
  misc_feature 1..2208: note = Description of Artificial Sequence: Synthetic coding sequence
  source 1..2208: mol_type = other DNA
atggccaaggagcggggcctgatcagccccagcgacttcgcccagctgcagaaatatatggaatacagtacaaagaaggtctcggatgtgcttaagctgttcgaagatggcgagatggccaagtacgtgcagggagacgctatcggatacgaaggctttcagcagttccttaagatttatttggaggtcgataacgtccccagacatcttagcctcgccctgttccagagttttgaaactggacattgtctgaatgaaacgaacgtaacgaaggacgtggtgtgcctcaatgacgtgtcctgctatttcagcttactcgagggcgggagacccgaagataagctggaattcactttcaagctctatgataccgacaggaacgggattttggattccagcgaagtggataaaatcatcctgcagatgatgcgcgtggctgagtacctggactgggacgtgtccgaactgcgtcccatcctccaggagatgatgaaggagattgattatgatggatcgggctctgtgtctcaagctgagtgggtgcgcgcaggtgctaccaccgtccctctcttagtcctgctgggcctggagatgactttaaaggacgatgggcagcacatgtggcgccctaaaagatttcccaggccagtctattgcaatctctgcgagtcttcaatagggctcgggaaacaaggcctgtcttgcaacctttgtaaatatacagtgcacgaccagtgtgcaatgaaagccctcccatgcgaagtttcaacctacgctaagtctcggaaagacataggcgtgcaatcccatgtctgggtgcgcggaggatgtgagtctggaaggtgtgatcgctgtcaaaaaaagattcgcatttatcactcactcacgggcctacattgcgtttggtgccacctggagattcacgatgactgcctgcaggcggtagggcatgagtgtgactgtggcttattgcgcgatcatatccttcctccctcgagcatctatcccagcgtgctggccagtggacccgacagaaaaaactcaaagacgtcacagaaaacaatggatgacctcaatctgagtacctccgaagctctaagaatcgatcccgtcccaaacacccacccactcttggtattcgtgaatccaaagagcggaggcaagcaggggcagcgggtgctgtggaagttccagtatattctcaatccgaggcaagttttcaatcttctgaaggatggtcctgagatcggtctccgcctgtttaaggatgtgcccgactcgcgaatcctggtctgcggaggagatggcacagttggatggatcctggaaacaatcgacaaggccaatctgccggtcctgccgccagtagcagtgctgccgctgggaacaggaaatgatttggcaaggtgtttacgctggggcggcggttatgagggacagaacttagctaaaattctaaaggatctggagatgagcaaagtggtgcatatggacaggtggtcggtagaggttatcccacaacagacagaggagaagtcagatcccgtgccgtttcagatcatcaacaattatttctctattggggtcgacgccagtatagcccatcggttccatatcatgagggagaagtatccggaaaagtttaactctaggatgaaaaataagctttggtattttgagttcgccacatctgagtcaatcttctccacctgtaaaaaactcgaagagagcctgacagttgagatctgtgggaagccgctagacctgtcaaacctgagcttggaaggaatagctgtgcttaacatccccagcatgcacggcgggagcaatttatggggcgatacccggcggccacacggcgatatctacggtatcaatcaagccttgggcgccacagcaaaggtgatcacagacccggacatccttaaaacttgcgttcctgacttgagcgataagcgcttggaggtggtagggcttgagggggccattgaaatggggcagatttacacgaaacttaaaaatgcgggaaggcggctagccaagtgcagcgaaatcaccttccacactaccaaaactcttcccatgcagatcgacggagaaccttggatgcagactccctgcaccatcaaaataactcataagaaccagatgccaatgttaatgggtcccccacctcgttcgactaatttcttcggcttcctaagctag

SEQ ID NO: 185276 - DNA, 2208 bp, synthetic construct
  misc_feature 1..2208: note = Description of Artificial Sequence: Synthetic coding sequence
  source 1..2208: mol_type = other DNA
atggccaaggagcggggcctgatcagccccagcgacttcgcccagctgcagaaatatatggagtatagcaccaagaaagtgtctgatgtgctgaaactatttgaagacggcgaaatggccaagtacgttcaaggcgacgcaattgggtacgaaggcttccagcagttcttgaagatatacttggaagtcgataatgtacccagacaccttagtctggctctgtttcagtcatttgagacgggacattgtctgaatgaaacgaacgtcactaaagacgtagtttgcctgaacgatgtctcttgctacttctcactcctcgaggggggacggccagaagacaagctagagttcaccttcaagttatacgatactgacaggaatggcatattagactcatctgaagtggataagatcatcctccaaatgatgcgagtggccgaatacttggattgggatgtatccgaactgcgacccattctacaggagatgatgaaggagattgactatgacgggagtggcagtgtctcccaggccgaatgggtgagggctggcgctacgacggttccactgctggtgctcctcgggctggagatgacactcaaagacgacgggcagcacatgtggcgacctaaacgttttccaaggcccgtgtattgtaacttatgcgaaagctctatcggactcggcaaacagggcttgagctgcaacttgtgtaagtacaccgtacacgaccagtgcgccatgaaagccctgccttgcgaggtttccacgtacgccaaatcaagaaaagatattggcgtccagtcccatgtttgggtacgtggggggtgcgagagcggccgctgtgatcggtgtcagaaaaagattaggatatatcattcgctaaccggtctgcactgtgtatggtgtcacctcgagatccatgatgactgtcttcaggctgtcgggcatgagtgtgattgtggcctgctccgggatcatatccttcctccttcttccatctaccccagcgtgttagctagtggaccggacagaaagaacagtaagacttcccagaagaccatggacgatcttaacttgagcacatccgaggccttgcggatcgaccccgtgcccaacacacacccattgcttgtctttgtcaacccaaagtccggcggaaaacaaggacagcgcgtactctggaagttccagtacatccttaaccctagacaggtgtttaatctattgaaggatggccctgaaattgggctgcgcctcttcaaggatgtccccgactccagaatcctcgtttgcgggggagacggtacagtggggtggatcctggaaactattgataaagctaatctcccggtgctgcctcctgtcgctgtcctaccactaggaacaggcaacgacctggctcgttgccttaggtggggggggggctacgaagggcaaaatctagcgaaaatcctcaaggacctcgagatgtccaaagtggtgcacatggataggtggagcgtggaggtgattcctcaacaaaccgaggaaaaatccgacccagtcccttttcaaataattaataattatttcagtattggcgtcgatgccagtatcgctcatagattccacattatgagggaaaaatatcccgaaaaatttaatagccggatgaagaataagctctggtacttcgagtttgccacaagcgagtctattttctcaacatgcaagaaactcgaagagagcctgacagttgagatatgtggcaagccgctggacctcagcaacttaagcctggaagggatcgccgtgctcaacattccctcaatgcacgggggcagtaatctatggggcgacacacgccggccacacggagatatttatggtattaaccaggcactcggtgctactgctaaagtgattaccgacccggacattcttaaaacctgtgtgcctgacctctctgataagaggctggaggtagtgggcttggagggtgccatcgaaatggggcaaatctacacaaagctcaagaacgcgggaagaagacttgctaaatgttccgagattacatttcatacgaccaagaccctgcccatgcaaatcgatggtgagccttggatgcagaccccatgcactatcaaaataactcacaagaaccagatgccaatgctcatgggccctcctccccgctctacaaacttcttcggatttctgagttag

SEQ ID NO: 185277 - DNA, 744 bp, synthetic construct
  misc_feature 1..744: note = Description of Artificial Sequence: Synthetic coding sequence
  source 1..744: mol_type = other DNA
atggccaaggagcggggcctgatcagccccagcgacttcgcccagttgcagaaatacatggagtactccacaaaaaaagtctccgatgtgctgaagcttttcgaagatggcgagatggccaagtacgtgcagggggacgcaatcgggtacgagggctttcagcagttcctgaagatctacctggaagtagataatgtgcccaggcacctgagtctggcactattccagtccttcgaaacaggtcactgcctgaacgagacaaacgtgacaaaggatgtcgtctgcttaaacgacgtctcttgttacttctcccttttagagggcgggcgcccagaggataagctggaatttacttttaaactttatgatacagatcggaatggtatcctggattcttccgaagtggataagattatcctccagatgatgcgggtcgctgagtacctggactgggacgtttcggagcttcgacccatattgcaggagatgatgaaggagatcgactatgacggcagcggcagtgtatcccaagctgaatgggtgagagcgggagccacaaccgtgccccttctggtactgctagggctggagatgactcttaaagacgacgggcagcatatgtggcgtccaaagagattcccccgtccagtttactgtaacctgtgtgagtcatccataggcctcgggaaacagggactgtcttgcaatcggccgatcacttgtgtgggcgccaggcgtctctag

SEQ ID NO: 185278 - DNA, 351 bp, synthetic construct
  misc_feature 1..351: note = Description of Artificial Sequence: Synthetic coding sequence
  source 1..351: mol_type = other DNA
atggccaaggagcggggcctgatcagccccagcgacttcgcccagctgcaaaaatatatggaatactccactaagaaggtcagcgatgtgctcaagctatttgaagatggggagatggctaaatacgtccagggggatgccatcggatacgaggggttccagcagtttttgaaaatttacctggaggtggacaatgtaccccggcacctctcactggctttgttccagtccttcgagactggacattgcctgaacgagaccaatgtcactaaggacgttgtgtgcctgaatgacgtgtcctgttacttcagtctgcttgaaggaggtaggcccgaagataaactggagtag

SEQ ID NO: 185279 - DNA, 177 bp, synthetic construct
  misc_feature 1..177: note = Description of Artificial Sequence: Synthetic coding sequence
  source 1..177: mol_type = other DNA
atggccaaggagcggggcctgatcagccccagcgacttcgcccagctgcaaaaatatatggagtattctactaagaaggtgtctgacgtactaaagctcttcgaagacggagagatggctaaatacgtacaaggggacgctattgggtatgaaggctttcaacagtttctaaagtag

SEQ ID NO: 185280 - DNA, 66 bp, synthetic construct
  misc_feature 1..66: note = Description of Artificial Sequence: Synthetic coding sequence
  source 1..66: mol_type = other DNA
atggccaaggagcggggcctgatcagccccagcgacttcgcccagctgcagaagtacatggagtag

SEQ ID NO: 185281 - DNA, 444 bp, synthetic construct
  misc_feature 1..444: note = Description of Artificial Sequence: Synthetic coding sequence
  source 1..444: mol_type = other DNA
atggccaaggagcggggcctgatcagccccagcgacttcgcccagttgcagaagtacatggagtactccacaaagaaagtgtcagacgtgctgaagctcttcgaggacggtgaaatggcaaagtacgtccagggggatgcaatcggatacgaaggatttcagcagttcttgaagatctatctggaggtcgacaatgtacctaggcacctgtccctggccctctttcagtccttcgaaacaggccactgtcttaatgaaacaaacgtgacaaaggatgtcgtatgtctgaacgacgtgtcgtgttatttcagcttactagaaggtggaaggcccgaggataagctagagttcacctttaaactgtacgacacggaccgcaacggcattttggactcttctgaggtggacaaaatcatactacagatgatgagggtggccgagtag

SEQ ID NO: 185282 - DNA, 2208 bp, synthetic construct
  misc_feature 1..2208: note = Description of Artificial Sequence: Synthetic coding sequence
  source 1..2208: mol_type = other DNA
atggccaaggagcggggcctgatcagccccagcgacttcgcccagctccagaaatacatggaatatagcacgaaaaaggtgtcggacgttctgaaattattcgaagacggggagatggccaagtatgttcagggggacgctatcggctatgaaggcttccagcagtttctgaagatttatctggaagtggacaacgttcctagacacctttccctggccctgttccagtcatttgagacagggcactgtcttaatgaaacaaatgtgacgaaggacgtggtttgcctgaatgacgtctcctgttacttcagtctgctagagggtggtaggccagaggacaaactggaatttacctttaagctctacgacacagaccgaaatggcatcctggactcaagcgaagtagacaagatcatcctccagatgatgagagtggctgagtacctggattgggatgtgagtgagctcagacctattctacaggagatgatgaaagaaatcgattacgacggctctggttccgtgagtcaggcagagtgggtaagggccggcgctactactgttccgttgctggtgctcctgggcctggagatgacactgaaagatgacggccaacacatgtggaggcctaaaagattccctaggcctgtttactgtaacttgtgtgagagtagcatcgggcttggcaagcagggtctatcctgcaacctgtgcaaatatacagttcacgatcagtgcgccatgaaagccctcccatgcgaggtgtcaacatatgccaagtcccgcaaagacatcggcgtccagtcgcacgtgtgggtgcgagggggttgtgaaagcgggcgctgtgatcgctgtcagaagaaaatccgaatctatcactcactgaccggcttgcactgcgtttggtgtcatctggaaatacacgacgattgtcttcaggccgtgggccacgagtgtgactgtggcttgttgcgcgaccacatcctgcctccttcctccatctatccaagcgtgctggcctcagggccagatagaaaaaattctaaaacatcacagaaaaccatggatgacttaaatctgagcacaagtgaagcccttcggattgatccagtaccaaatacgcacccactgctggtattcgtgaatcccaagtccggggggaaacaaggtcagcgggtgttgtggaaattccagtacatccttaatccccggcaggtgttcaatctcctaaaggacggaccagaaatcggtttgcgcctcttcaaggacgtcccggactcccgcatcctggtctgcgggggggacggaacagtggggtggatactcgaaacgatcgataaggctaacctgccggtgctccctccagtggccgtgctcccacttggcacaggcaacgatctggcccgctgcctgcggtggggcggtgggtacgagggccagaacttggccaaaatcttaaaagatctggagatgtccaaagtcgtgcacatggatcggtggagcgtggaggtaatcccacagcaaaccgaggaaaaaagcgaccccgtcccattccagatcataaataactattttagcatcggcgtcgacgctagtatcgcccatcggttccatatcatgagagagaagtaccccgaaaaatttaatagccggatgaagaacaagctgtggtactttgagttcgctacctctgaatccattttcagcacctgcaagaagctcgaagagagcctgacagtggagatctgcggaaaaccactggatctgtctaacctgtccctggagggcatcgccgtcctaaatattccaagcatgcatggagggagcaatttatggggagatactcgtagacctcacggtgatatttatgggattaaccaggccttgggtgctacagctaaggtcattacagaccccgacattctgaaaacatgcgtaccagacctttccgacaagcggctggaggttgtggggctggagggggcaatagaaatgggccagatctacacaaaattgaagaatgccggtagaagactggccaaatgctcagagatcaccttccacacaacaaagacactcccgatgcaaatagacggcgaaccttggatgcagactccctgcactatcaaaatcactcacaaaaatcaaatgccaatgctgatggggcctccacctcggtctactaatttctttggctttctaagttag

SEQ ID NO: 185283 - DNA, 402 bp, synthetic construct
  misc_feature 1..402: note = Description of Artificial Sequence: Synthetic coding sequence
  source 1..402: mol_type = other DNA
atggccaaggagcggggcctgatcagccccagcgacttcgcccagcttcagaagtacatggagtatagcactaaaaaggtatccgacgtgctcaagctcttcgaggatggggaaatggccaaatacgtccagggggatgctatagggtacgagggatttcaacagttcctgaaaatctacttggaggtcgacaatgtccctagacacttgtcactcgctctgttccaatcgtttgaaacgggacattgtctaaatgagaccaacgtcacaaaagacgtggtatgtcttaacgacgtgagttgttacttctcactgctcgaagggggccgccccgaggataaactggagtttactttcaaactgtacgacaccgatagaaatgggatacttgatagtagctag

SEQ ID NO: 185284 - DNA, 324 bp, synthetic construct
  misc_feature 1..324: note = Description of Artificial Sequence: Synthetic coding sequence
  source 1..324: mol_type = other DNA
atggccaaggagcggggcctgatcagccccagcgacttcgcccagctgcaaaagtatatggaatacagcaccaaaaaggtgagcgacgtgctgaagctgtttgaagacggcgagatggcaaagtacgtccagggtgatgctattggctacgaaggttttcagcagttcctcaagatttacctggaggtggacaacgtaccacggcacctatccttggccttattccagagtttcgagaccggacactgccttaatgagacaaatgtcaccaaagacgtagtatgcttaaacgacgtttcatgctattttagcctcctggaatag

SEQ ID NO: 185285 - DNA, 135 bp, synthetic construct
  misc_feature 1..135: note = Description of Artificial Sequence: Synthetic coding sequence
  source 1..135: mol_type = other DNA
atggccaaggagcggggcctgatcagccccagcgacttcgcccagctgcaaaaatacatggagtatagcactaaaaaggtttcagacgtattgaaattattcgaagacggagaaatggctaagtacgtgcagtag

SEQ ID NO: 185286 - DNA, 135 bp, synthetic construct
  misc_feature 1..135: note = Description of Artificial Sequence: Synthetic coding sequence
  source 1..135: mol_type = other DNA
atggccaaggagcggggcctgatcagccccagcgacttcgcccagcttcagaaatacatggagtactcgacaaaaaaagtttccgacgtgttgaagttattcgaagacggtgagatggcaaaatacgttcagtag

SEQ ID NO: 185287 - DNA, 402 bp, synthetic construct
  misc_feature 1..402: note = Description of Artificial Sequence: Synthetic coding sequence
  source 1..402: mol_type = other DNA
atggccaaggagcggggcctgatcagccccagcgacttcgcccagcttcagaagtacatggagtactccactaagaaggtctctgacgtgctcaagctcttcgaggacggcgaaatggcaaaatacgtgcagggcgacgcaatcggctatgaaggcttccagcaatttctcaaaatctacctggaagtagacaatgtgccccgccacctgagccttgccctgtttcagtccttcgaaactgggcactgcctgaacgaaacgaacgtcacgaaggacgtggtctgtctgaatgatgtgagttgctacttctctctactagaaggaggacgtcccgaggataaattagaattcacctttaagctgtatgatactgatcgtaatggtatcttagactcatcttag

SEQ ID NO: 185288 - DNA, 135 bp, synthetic construct
  misc_feature 1..135: note = Description of Artificial Sequence: Synthetic coding sequence
  source 1..135: mol_type = other DNA
atggccaaggagcggggcctgatcagccccagcgacttcgcccagctgcagaagtatatggaatatagtaccaagaaagtaagtgatgtgttgaaactgttcgaagacggcgagatggccaagtatgtgcagtag

SEQ ID NO: 185289 - DNA, 2415 bp, synthetic construct
  misc_feature 1..2415: note = Description of Artificial Sequence: Synthetic coding sequence
  source 1..2415: mol_type = other DNA
atgaccaaccaggagaagtgggcccacctgagccccagcgagttcagccagctgcagaaatacgcagaatactccacaaaaaagctgaaggatgtattggaagagtttcacgggaacggtgtcctggctaaatataatccagaggggaaattggtagtgttggggaataccattgacttcgaaggcttcaaactgtttatgaaaaccttcttagaagctgagctgcccgacgacttcactgcccacctgttcatgagcttcagcaataaatttccgcacagctcgcccatggtgaaatccaagcccgccctgcttagcggcggactccgcatgaataaaggggccatcacacctccacggacaaccagccccgctaatacctgttccccagaagtgatacacctgaaagatatagtctgctatctaagcctgctggagagaggtcggcccgaagacaagcttgagtttatgttcaggctctacgacaccgatggaaacgggtttctggactccagcgagctggaaaatattatatcacagatgatgcatgtggccgaatacctggagtgggacgtgaccgagctgaaccctatactccatgaaatgatggaagaaattgactatgatcatgatggaacggtctcactggaggaatggatccaaggcggaatgacaaccattccactgctggtgctattggggttagagaacaacgtcaaggacgatggtcagcatgtgtggaggctgaaacactttaataagcctgcctactgtaacctgtgtttgaatatgttgatcggagtcggcaagcaaggattgtgctgttcattctgcaagtacaccgtgcacgagaggtgcgtcgcccgggccccaccgtcgtgtataaagacatatgttaaatccaaacggaataccgacgtaatgcaccattattgggtggagggcaactgtcctacaaagtgtgataagtgtcacaagacagtgaagtgctatcaaggcctgaccggactccattgtgtttggtgccaaataacactccataataagtgcgctagtcatctcaagccagagtgtgattgtggtcctctaaaggaccatatcctgcctcccaccaccatctgtcccgtagttcttcagaccctgccgacttctggagtgtccgtcccagaagaacggcaatccaccgtaaaaaaggagaagtctggcagtcaacagcccaacaaggtgattgataagaacaaaatgcaacgcgccaattctgttaccgtcgatgggcagggactccaggttaccccagtgcccggaacccaccccctcctcgtttttgtgaatcccaaaagtgggggcaaacaaggtgagcggatttacaggaagttccagtacctgcttaacccgcggcaggtgtacagcctgtcggggaatggaccaatgccaggtttgaattttttccgggacgtccccgattttcgagtgctggcgtgtggtggcgatggcactgtggggtgggtgcttgattgtatcgagaaagctaatgtgggtaaacatccccccgtggcaattctcccactagggactggcaacgatctggctaggtgtctgcgctggggcggcgggtatgaaggagagaaccttatgaagattctaaaagatatagaaaatagtacagaaattatgctggataggtggaaattcgaagtgatccccaacgataaagatgagaaaggtgaccccgtgccctattcaattatcaataattacttctctattggcgtggatgcaagcatcgcccatcgttttcatatcatgagggaaaagcatccagagaaatttaatagtcgcatgaagaataagttttggtatttcgagtttggaaccagcgaaaccttctcagccacttgtaagaagcttcacgaaagtgtggaaatcgaatgtgacggcgtccagatcgacctcatcaatatttccctcgaagggattgccatcctcaacatcccctccatgcacggtggatccaatctgtggggtgagtcaaaaaaacggcgcagtcaccgaagaatcgagaaaaagggtagcgacaagcgcaccactgtcacagacgcgaaggagctgaagtttgcttcccaggatctgagcgaccagctactcgaagtagtgggcctagagggagcaatggaaatggggcaaatatataccggacttaaatctgctggacgccggctggctcagtgcagctgcgtggttatacggacctccaagagcctcccaatgcagatagacggtgaaccctggatgcaaacaccctgcacaatcaagatcactcacaaaaaccaggcgcccatgctgatgggtccacctcccaagactggcctcttttgttccctcgttaagcgcacacgaaatcggtcaaaagagtag

SEQ ID NO: 185290 - DNA, 2415 bp, synthetic construct
  misc_feature 1..2415: note = Description of Artificial Sequence: Synthetic coding sequence
  source 1..2415: mol_type = other DNA
atgaccaaccaggagaagtgggcccacctgagccccagcgagttctcccagctgcagaagtatgctgagtactccaccaaaaagctgaaagatgtgttagaggaattccacgggaatggtgtgctggcaaaatacaatcccgaagggaaacaggacatcctaaatcagacaattgacttcgagggattcaaactgtttatgaagacattcctggaagcagagctcccagacgactttacggcgcatttatttatgtccttctctaataaattcccccacagcagcccaatggtcaagtcaaagccagcgctcctttcaggcgggctgagaatgaataaaggcgcgatcacccctcctaggacaacctctcccgctaacacttgttcaccagaggtcatccacctgaaagacattgtatgctacctgtccttgctggaacgcggacgaccagaagataaactcgaatttatgttccggctgtatgacactgacggtaatggcttcctggacagttcggagcttgagaatataataagccagatgatgcacgtggcagagtacctcgagtgggatgtaacagaactgaaccccatccttcacgaaatgatggaggagatcgattacgatcatgacggaaccgtatcccttgaggaatggattcagggtggcatgacaacaatccccctactggtgctgttgggactggagaataatgttaaggacgacggtcagcacgtttggagactcaagcactttaacaagcctgcgtactgcaatctgtgtttgaacatgcttatcggcgttggcaagcagggtctctgttgttccttttgcaaatacacagtgcacgaaagatgtgtggctagggcgccgccctcttgcatcaagacctatgtcaagtcaaaaaggaatacggatgtcatgcaccactactgggtggaggggaattgtcccacaaagtgcgacaagtgccacaaaacagtcaagtgctatcagggtctcactggactacattgcgtgtggtgtcagataaccctgcataacaagtgcgctagtcatttgaaacccgagtgcgattgtggacctctcaaagatcacatactcccacccaccaccatttgcccggtcgtgcttcagaccttaccgacttctggggtgtccgtgcccgaggagagacagagcaccgttaaaaaggagaaatccggatcacagcagcccaataaagtgattgataagaataagatgcagcgtgctaatagcgtgacagtcgacgggcaggggcttcaagtcactccagtccctgggacgcaccccctgcttgtgttcgtgaaccctaaatccggtggaaaacagggggagagaatataccgcaagtttcaatacctgctgaatccaagacaagtgtactccctgtccggcaacggccccatgcctgggctaaatttctttagggacgtgccggactttagggtgctggcatgcggcggggacgggaccgtgggctgggtattagattgcatcgaaaaagctaatgtgggaaaacatcctccagtggctatcttaccacttgggactggaaacgatctagcccgctgcctccggtggggcggggggtatgagggagagaacctgatgaaaatcctgaaggatatcgaaaattctaccgagattatgctggacaggtggaaattcgaagtcattcccaatgataaggacgagaagggcgatcccgttccatactcaattataaacaattacttctctataggagtggacgcctcaatagcccaccgcttccacattatgagagagaagcaccccgagaagtttaatagccggatgaagaacaagttttggtattttgagtttgggacatcagaaaccttttcagccacatgtaagaaactccatgaatctgtggagatagaatgtgatggggtgcagattgacctaatcaacatatctctggagggtatagcgatcctgaatatcccctctatgcacggagggtccaacctctggggggagtcaaagaaacgccggtcccatcgaaggattgagaagaaaggcagcgataagaggaccacagtaacagacgctaaggaactgaagtttgcttctcaagacctttcagaccaactgctagaggtcgtgggcctggaaggggccatggagatgggccagatctatacaggtctgaaaagtgcaggtcggcgcctggcccagtgctcttgcgtggttatccgcacctcaaaatcgcttcctatgcagattgacggggagccatggatgcagaccccatgtaccatcaaaattactcacaagaaccaggcacccatgctaatgggaccccctcccaagactggccttttctgctctctcgtgaaacgaacacgcaataggagtaaagagtag

SEQ ID NO: 185291 - DNA, 2412 bp, synthetic construct
  misc_feature 1..2412: note = Description of Artificial Sequence: Synthetic coding sequence
  source 1..2412: mol_type = other DNA
atgaccaaccaggagaagtgggcccacctgagccccagcgagttctcacagctccaaaaatatgccgaatactcaacgaagaaactaaaagacgtcctggaagagttccatggcaacggagtgcttgctaagtacaatcccgaagggaagcaggatatcttgaaccagaccatagacttcgagggtttcaaactgttcatgaaaacctttcttgaagctgaactaccagacgactttactgcacatctatttatgtctttcagcaacaagttcccacatagttctccaatggtcaaatcaaagccagccttgctgtccggtggcttgaggatgaacaaaggcgccattactccacctcgcactacaagccctgcgaatacatgcagtccggaggtgatccacctcaaggacatcgtgtgttatttatcgctcttagagcgggggcggccagaggataagctggagttcatgtttcggctgtatgacacggatggcaacggctttctagattcatcggaattggagaatattatctcccagatgatgcatgtggcagaatatctggagtgggacgttaccgaactgaaccccattcttcacgagatgatggaggagattgattacgaccatgacggaaccgtttccctggaggagtggattcagggtggaatgaccaccatccctcttctcgtgctactcggcttggagaacaatgtcaaagatgatgggcagcacgtgtggcgactcaaacactttaacaagcccgcatattgtaacctctgcctaaatatgctaattggcgtgggcaaacagggcctgtgctgttccttttgcaagtacactgtgcatgaaaggtgcgtggcacgggcccctccttcatgcatcaagacttacgtcaagtctaagcgcaacacggacgtcatgcaccactattgggtggagggtaattgccctaccaagtgcgataagtgccataaaactgtcaagtgctaccagggactgaccgggctccactgtgtgtggtgtcagatcactctccataacaaatgcgcatcgcaccttaaaccagagtgtgactgcggcccacttaaggaccacatactcccacctactaccatatgtcctgtggtactgactctccccacgagtggtgtatcagtgccagaggaacggcagtctactgtgaagaaagaaaaatccggctcccagcagcctaacaaggtgattgacaagaacaaaatgcaacgtgccaatagtgtcacagttgacgggcagggcctccaagttacacctgttccaggaactcaccctttgttggtttttgttaatccaaagtccggtggcaagcagggtgaaagaatatacagaaaattccagtatctgcttaatcctcgccaggtctactcactttccggcaacggaccgatgcccgggctaaacttctttagagatgtccctgactttagggtccttgcatgtgggggcgatggaaccgtgggatgggtgttggattgcatcgagaaggccaacgtgggcaaacacccacccgtcgctatcctcccgctcgggaccgggaatgacctggcaaggtgtctccggtggggaggaggctatgaaggtgagaacctgatgaagatcctcaaagatatcgaaaactcgactgaaatcatgctggatcgctggaagttcgaggtgatccccaatgataaggacgaaaaaggggatcccgtcccctactccatcatcaataattacttttcaatcggcgtggatgctagcattgcccaccggtttcacataatgcgagagaagcaccctgagaagttcaactccagaatgaaaaataaattttggtacttcgaatttggcacatctgaaacgttcagtgccacctgcaagaagctgcacgagtcagtggaaatcgagtgtgatggcgtgcagatcgatcttatcaatatcagtctcgagggaatcgcaattctgaacatcccgagcatgcacggtggaagcaatctgtggggggagtcgaaaaagcggcggagtcacagaagaattgagaaaaaaggtagtgataagcggaccactgtgactgacgctaaggagctcaaattcgcatcgcaggacctgtccgaccagctacttgaagttgtgggtttggagggagccatggagatgggccaaatctacaccgggcttaagtccgccggcaggagacttgctcagtgttcctgcgtcgtcatccgtacgagtaagtcactgcctatgcagatcgacggagagccatggatgcaaacgccatgcacgatcaaaattacacataagaatcaggcaccaatgctcatgggtcccccacctaagaccggccttttctgttccctagttaagcgcacacggaaccggtctaaggagtag

SEQ ID NO: 185292 - DNA, 2415 bp, synthetic construct
  misc_feature 1..2415: note = Description of Artificial Sequence: Synthetic coding sequence
  source 1..2415: mol_type = other DNA
atgaccaaccaggagaagtgggcccacctgagccccagcgagttctcgcaactgcaaaagtatgcagaatattccaccaagaagctgaaggacgtgctcgaggagttccacggcaacggagtgctcgctaagtacaatcctgagggaaaacaggatatattaaaccagaccatcgactttgaaggattcaagctgtttatgaagacctttttagaggcagagcttccagatgacttcaccgctcatttattcatgtccttctcaaacaaattcccccacagttcccccatggtgaaaagtaaaccagccctgctgtccggcgggcttaggatgaacaagggcgctatcaccccacccaggaccacttctcccgctaatacctgctccccagaggtcattcatttaaaggacattgtgtgctaccttagcctcctggagcgaggcagacctgaggataagttggagtttatgttcaggctttacgatacagacggaaatgggttcctggactcttcggagttggagaatatcatttcccaaatgatgcacgtcgcggagtatctggaatgggatgtgacagaacttaacccaatcttacacgaaatgatggaagagatcgactacgaccatgatggtactgtgtccctggaagagtggattcagggcgggatgaccaccatacctctactggtcctgctgggcctagaaaacaacgtgaaggatgatggccagcatgtgtggcgcttgaagcactttaataagcccgcatattgcaacctttgtttgaatatgttgattggggtcgggaaacaaggtctgtgttgcagtttttgcaagtacactgttcacgaaagatgcgtagcacgggccccccccagttgtatcaagacatacgttaagagcaaaaggaacactgacgtgatgcaccattattgggtcgaggggaactgcccaaccaagtgtgataaatgccacaaaactgtgaaatgctaccaggggctcacgggcctccactgcgtgtggtgtcaaattacgcttcacaacaagtgtgcctctcaccttaaacccgaatgtgactgcggcccattaaaggaccatattctccctcccacgactatctgtccagtagtgttgcaaacattgcctactagtggcgtttctgtgcccgaagaacgccagagcaccgtgaagaaggagaagagcgggtctcagcaacccaacaaggttattgacaagaataaaatgcaacgggccaactccgtaactgttgacgggcagggactgcaggttactccagtgcccggcacccatccccttcttgtattcgtgaaccccaagtccggcggcaaacagggcgagagaatctacagaaagtttcagtatctgctgaacccgaggcaagtatattcactgagcggtaatggccccatgccagggctgaattttttccgtgacgtgccagatttccgcgtgctggcatgcggcggtgacggcaccgtggggtgggtgctggattgtatcgaaaaagccaacgttggaaagcacccacctgtggcaattctccctctaggcaccggaaatgacctggcacggtgcctgcgatggggcggcgggtacgagggggagaacctcatgaagattttgaaggatatcgaaaactctacggagatcatgctcgaccggtggaagtttgaagtgattccgaacgacaaggatgaaaagggggaccctgtcccctactccattataaacaactacttctcaatcggggttgacgcctccatcgcacaccgttttcatatcatgagggagaagcatccagagaagtttaatagcagaatgaagaataagttttggtactttgagtttggaacatctgaaaccttcagcgctacttgcaagaaattacacgagagtgttgaaatcgagtgcgacggagtccagatagacctgattaatattagcctcgagggaattgccattctaaatatcccatccatgcatggaggcagtaatctctggggagagagtaagaagcggaggtctcaccgacggattgagaaaaaaggctcggacaagcggactacagttacagacgcgaaggaactaaagttcgcctcccaagacttatctgaccagcttctcgaagtggtgggccttgagggcgcaatggaaatgggtcagatatacacaggcctgaagtctgctggacggaggttagcccagtgctcttgcgttgtcatccggacctcgaagtctctacccatgcagattgacggtgagccatggatgcagaccccttgcaccattaaaattacccacaagaatcaggcacccatgttgatggggccgccccccaagaccggactcttttgttccttggtgaaaaggacaagaaatcgaagtaaggaatag

SEQ ID NO: 185293 - DNA, 2322 bp, synthetic construct
  misc_feature 1..2322: note = Description of Artificial Sequence: Synthetic coding sequence
  source 1..2322: mol_type = other DNA
atgaccaaccaggagaagtgggcccacctgagccccagcgagttctcacaacttcagaaatacgctgagtacagtactaagaaactgaaggacgtgcttgaagaatttcatggcaacggggttcttgctaagtataaccccgaggggaagcaggacattttgaatcaaactatcgactttgagggcttcaaacttttcatgaaaacattcctggaagccgaattgccagatgatttcacagcacacttatttatgtcattttcaaataagtttcctcattcctcgcccatggtcaaatccaagcccgcgctgttaagtggtgggctgaggatgaacaaaggcgccatcaccccacctagaacaacttcccccgcaaatacctgttccccagaggtcatacatctgaaagatattgtctgttacctgagcctgctggagcggggcagacctgaagacaaactggagtttatgtttagactgtatgataccgacggtaatggctttttagattcatctgagctggaaaacataattagccagatgatgcatgtcgcggaatacctggagtgggacgtgaccgagcttaatcccattttacacgaaatgatggaggagatcgactatgatcacgatggcaccgtcagtctggaagagtggatacaaggaggtatgactaccattccactgctcgtgctgcttgggttagagaataacgtcaaggatgatgggcagcacgtctggcgactgaaacacttcaataaaccagcatactgcaacctctgtctcaacatgctgattggggtcggcaagcagggattatgctgttcgttctgcaaatacacagtgcacgaacgctgcgtggcacgcgctccaccaagttgtataaaaacatacgtgaaaagtaaaaggaataccgacgtgatgcaccattactgggtcgaaggtaattgccccactaagtgtgataaatgtcataaaacggtgaagtgctaccaaggcctgaccggactgcactgcgtgtggtgccagatcactctacacaataagtgtgcatctcatcttaaacctgaatgtgattgcggcccattgaaagatcatatcttgccacctacgaccatttgcccggtggtgttgcagaccctgccaacaagtggagtctcagtgccagaggagagacagtcgaccgtcaaaaaggaaaaaagcgggagtcagcagccaaataaagtgatagacaagaacaagatgcaaagagcaaactcggtgacagtggacggacaagggctgcaggtgacaccagttcctgggacccacccgcttctggtctttgtcaatcctaagtctgggggcaaacagggggagaggatctacaggaaattccagtatctgctaaacccccgtcaggtttacagtctctcaggaaatggtccaatgcctggcctgaacttctttcgcgatgtgccagactttagagtgcttgcatgcggaggagacgggaccgtgggatgggtgctggactgtatcgaaaaagccaatgtgggcaagcacccacctgtggccatcttaccactgggaacggggaatgatctcgcacgatgcctaaggtggggtggggggtacgaaggtgaaaacctgatgaagattctgaaagacattgagaatagtaccgagatcatgctggatcgatggaagttcgaggtgattcctaacgacaaggatgagaaaggagaccctgtaccatactcaattatcaataactacttcagtataggcgttgacgctagcatcgctcaccgatttcacatcatgcgggaaaaacatccggagaaatttaattctcgcatgaagaacaaattctggtattttgaattcggcacttcagagacctttagcgctacttgcaagaaacttcacgagtctgttgagatcgagtgcgatggggtacagatcgatctcatcaatatcagcttagagggaatcgctatcctaaacatcccctccatgcacgggggctcaaatctctggggagagagcaagaagagacgtagccatcggagaatcgagaaaaaaggcagcgataaacgtaccacagtcacggatgctaaggagctcaagttcgcatcccaggatttatccgaccagttgctggaggtggtgggattggagggagccatggagatgggccagatatacactgggctcaagtccgctggccgcagactggcccagtgcagttgcgtggtcatcaggacttctaagtctctccccatgcagatcgacggcgagccatggatgcagactccttgtactgtgagtacagaatag

SEQ ID NO: 185294 - DNA, 2391 bp, synthetic construct
  misc_feature 1..2391: note = Description of Artificial Sequence: Synthetic coding sequence
  source 1..2391: mol_type = other DNA
atgaccaaccaggagaagtgggcccacctgagccccagcgagttcagccaactgcaaaagtatgccgaatatagtaccaagaagctgaaagatgtcctcgaggagttccacggcaatggcgtccttgccaagtataatcccgaaggaacaattgattttgagggctttaagctgtttatgaaaacgttccttgaagcagagttgcctgacgacttcactgcccacttgtttatgtctttctctaacaagttccctcacagtagcccaatggtgaaatctaagccggcactgcttagtggtggccttaggatgaacaagggagctatcacacctccccgcacaacatctcccgccaacacctgcagccccgaggtgatccacctcaaggatatagtgtgctacctttctttgttggaaagaggcagacccgaagacaaactggagttcatgttcagactgtatgacactgacggaaacggcttcttggattcttcagagctggagaacatcatttcccagatgatgcacgtggctgagtacctggaatgggatgtgaccgagctgaatcctattctgcatgaaatgatggaggagattgattacgatcacgacggtacagtaagtctggaggagtggattcaaggtggaatgaccaccattcctctccttgtgttgcttggcctagagaataacgtgaaagacgacggacagcatgtctggcggcttaagcactttaataagcctgcgtactgtaacctctgcctgaacatgctgatcggcgtgggcaagcagggattatgttgcagcttctgtaagtataccgtgcacgagcgatgcgtggcccgggcaccgcctagctgcataaagacttatgtcaaatctaaacgcaataccgatgtgatgcaccattattgggttgaaggcaactgccccacgaagtgcgacaagtgtcacaagaccgtgaagtgttatcaggggttaaccggtttacattgtgtgtggtgccagattactctgcacaacaaatgcgccagccacctgaaacccgagtgcgactgcgggccccttaaggaccatatactcccacctacaacaatttgtcctgtagtgttaacattgcctactagcggtgtcagtgtccccgaggagcggcaaagtaccgtaaaaaaagagaagagtggatctcagcagccgaacaaggtcatcgacaagaacaagatgcagcgggccaatagcgtgaccgtggacggacagggactgcaggtgactccagtgcctgggacacacccactgctcgtgttcgtgaaccctaagtccggaggcaagcaaggcgagcgcatttaccggaagttccagtacctgctgaacccaaggcaggtgtattccttgagcgggaacgggcccatgcccggcctgaactttttccgggatgtgccagattttcgggtcctggcttgcgggggggacggaaccgtgggatgggtattggattgcattgagaaagcaaatgtggggaagcatccacccgtggctatcctccctcttggcacaggcaacgatttagccagatgtcttaggtggggtggcggttatgagggcgaaaatttaatgaagatactcaaagacattgaaaacagcacagaaatcatgctggacaggtggaagtttgaggtcattccaaacgacaaggatgagaaaggcgaccccgtcccgtattctattattaacaattacttctcaatcggtgtggatgcttctatcgcacatcggttccatatcatgagagagaagcaccctgaaaagttcaattccaggatgaagaataagttctggtattttgagttcggcacatcagaaacttttagcgccacgtgcaagaagttacatgaaagcgtcgagatcgagtgtgacggagtgcagatcgacctgatcaacatttctttagagggcattgccatactgaatatccccagtatgcacgggggaagtaacctgtggggagagtccaagaaacgtcggtcacatagacgcattgaaaaaaaaggtagcgacaagagaactaccgtgactgacgctaaggagcttaagttcgcatctcaagacctgtcagaccagctgctggaggtggtcgggttggagggggctatggaaatgggccagatatacacaggcctaaaaagtgccggccgaaggctcgcgcagtgctcttgcgtcgtcattcgaacctccaagagcctccctatgcagatcgacggtgagccatggatgcagacaccttgcacaattaagattactcacaagaaccaggctcccatgctgatgggaccgccacctaagaccggcctgttctgctccttggtaaagcgtactcgtaacagaagtaaagagtag

SEQ ID NO: 185295 - DNA, 228 bp, synthetic construct
  misc_feature 1..228: note = Description of Artificial Sequence: Synthetic coding sequence
  source 1..228: mol_type = other DNA
atgaccaaccaggagaagtgggcccacctgagccccagcgagttctctcaattacagaagtacgctgagtattcaacaaagaagttaaaggacgtcctggaagaattccacggcaatggagtgctcgccaagtataaccccgagggtaaacaagatatcctgaatcagactatcgactttgagggcttcaaactgttcatgaagacctttcttgaggcagagctctag

SEQ ID NO: 185296 - DNA, 2358 bp, synthetic construct
  misc_feature 1..2358: note = Description of Artificial Sequence: Synthetic coding sequence
  source 1..2358: mol_type = other DNA
atgaccaaccaggagaagtgggcccacctgagccccagcgagttcagccagctgcaaaagtacgctgagtatagtacaaagaaactcaaggatgtattagaggaattccacgggaatggtgtcctggcgaaatataatccggaggggacgattgatttcgagggcttcaagctgtttatgaaaacttttctggaagcagagctgcccgacgatttcaccgcccatttattcatgtccttcagcaacaagttcccccactcatctccaatggttaagtcaaaacccgccttgctgtccggagggctgagaatgaataagggagctatcacccctccacggaccacctcacccgccaacacatgctcccctgaggtcattcacctcaaagacatagtgtgttacctgtccttgctggaacgcggtcgccctgaggacaaattggagttcatgtttaggctctacgacaccgatggaaatggctttctggactcctccgaactggaaaatataatcagccagatgatgcacgtcgccgaatatttagagtgggacgtgactgagctcaatcccattcttcacgagatgatggaggaaatcgattatgaccatgatgggaccgtcagcttagaggaatggattcagggcggaatgacgactattccactcctggtgctcctcgggttggagaacaacgtaaaggatgacggacagcacgtctggaggctgaaacatttcaataagccagcatactgtaacctctgtcttaatatgttgatcggagtgggaaaacaagggttgtgttgcagcttttgtaagtacacagtgcatgagcggtgcgtggcaagagccccccccagttgtatcaaaacatacgtgaagtctaagcgtaacaccgacgttatgcatcactactgggtggaaggtaactgccccacaaaatgcgacaaatgtcacaagacagtgaagtgttatcagggactgaccggcctgcactgcgtgtggtgccagatcacattgcataacaagtgtgcttcccatctaaaaccagagtgtgactgtggcccacttaaggatcacattttgccaccaacgactatctgccccgtggttttagagagacagtccacagtgaagaaggaaaagtcgggcagccagcagccaaacaaagtaattgataaaaacaaaatgcaaagggccaactccgttaccgttgacggccagggtctgcaggtaactccagtcccagggacacatcctctgcttgtgttcgttaatcccaaatcgggtggaaaacagggggagcgtatataccgcaaatttcagtatctgctgaatccacggcaggtgtactcactctccggcaacggtccaatgccaggtcttaactttttcagggatgtgccagacttcagagtgctggcatgcggaggcgatgggacggtaggctgggtcctagactgcatcgagaaagccaatgtcggcaagcacccaccagtggcgatcctccctttgggtacagggaacgacttagctaggtgtctcagatggggcggaggatacgaaggggaaaacttgatgaaaatcctcaaggacatcgagaattcaactgaaatcatgcttgacaggtggaagttcgaggtgattccaaacgataaggatgaaaagggcgaccctgtgccatacagcatcatcaacaattatttcagcattggggttgacgccagcatagcccacagatttcatattatgagagagaagcaccctgagaagtttaacagccgcatgaagaacaagttttggtactttgagtttggtacaagcgaaaccttctcggccacttgcaagaaactgcacgagtcagtggaaatagagtgtgacggcgtccagatcgacttgattaatatcagcttggagggcatcgctatcctcaatatcccctctatgcatgggggcagtaacctttggggagaaagcaaaaagagaaggagccataggcgcattgaaaagaagggttctgacaagcgcaccaccgttaccgatgccaaggaactcaagttcgccagtcaagatcttagtgaccagctcttagaggtcgtcggcctggagggtgcaatggagatgggtcaaatctatactggcctgaaatccgcaggtcgacggctggcccagtgtagctgtgtggtaatccgtacctcaaaaagcctgcctatgcagattgacggagagccctggatgcagaccccctgcaccattaaaatcacacataagaatcaggcacctatgctaatgggaccgcccccaaagacgggtctattctgtagcttggtgaagcgaaccagaaaccgctccaaagaatag

SEQ ID NO: 185297 - DNA, 3645 bp, synthetic construct
  misc_feature 1..3645: note = Description of Artificial Sequence: Synthetic coding sequence
  source 1..3645: mol_type = other DNA
atggccgccgccgccggcgcccccccccccggccccccccagcccccaccacctcctcctcccgaggaaagttccgactcagaaccggaggccgaaccaggtagccctcagaagcttattcggaaggtgtctacttcagggcagattcgccaaaagactattatcaaagaagggatgctgactaagcaaaataatagcttccagagatcaaagaggcggtattttaaactcagggggcgcactctgtactacgcaaaaaccgcgaaatccatcatcttcgacgaggtggatctcaccgacgcgtccgttgctgagagttcaactaaaaacgtgaacaactctttcacagtgatcacaccctgtagaaagttgattctctgtgcagacaatagaaaggagatggaagactggatcgcggccctaaaaactgttcagaacagggaacatttcgagcctacacagtactctatggaccatttttctggaatgcataactggtatgcatgttctcatgcaaggcccacctactgcaacgtgtgcagagaagctctgagtggagtgacaagccatggacttagttgtgaggtgtgtaagtttaaagctcacaagcgttgcgcggtgcgcgcaaccaacaattgcaagtggacaaccctggcctcaatcggcaaggatattattgaggatgccgacgggattgccatgcctcatcagtggctggagggtaatttgcctgtgagtgccaaatgtacagtctgcgacaagacatgcggttccgtactccggttgcaggactggaggtgcctgtggtgcaaggccatggtgcacacatcctgcaaagaatcactgctgaccaagtgcccccttggtttgtgtaaggtttccgtgatcccacctaccgcactcaattccattgacagcgatgggttctggaaggcgtcatgtcctccttcttgcacgtcaccactcctggtgtttgtgaatagcaagtcgggggataaccagggcgtcaagtttctgagaaggttcaagcagctgctgaatcccgcacaagtttttgacttgatgaacggggggccccatcttgggctcagactattccagaaattcgatacatttcggattttagtatgcggaggtgatggttctgtaggctgggtactatccgagatagattctctgaacctgcataagcagtgccaacttggagtcctccccctgggcactggcaacgatctcgccagagtcctggggtggggatcagcctgcgacgatgacacgcagttgccccagatactcgaaaaattggaacgggcatctactaaaatgctggatcggtggtccgtaatggcatatgaagcaaaactgccccggcaagcttcctcaagtacagtcacagaagacttttcagaagatagtgaggttcagcagatcctgttctacgaggatagcgtagccgctcatctgtccaaaatcctaacaagcgaccaacactccgtggtgatcagcagcgctaaggtgctgtgtgaaacagttaaagatttcgtggcccgggtgggtaaagcatatgagaaaactaccgaatccagtgaggaatccgaagttatggccaagaagtgtagtgtgctgaaggagaaattagacagcctactaaagaccctcgacgacgaatctcaagcaagttcttctctgccaaacccccctcccacaatcgctgaggaggccgaagatggggatggttctgggagcatttgtggatccacaggtgatagactcgtggcgtcagcctgccccgctagaccacagatcttccggccccgcgaacagctgatgctgcgagccaactctctcaagaaggccattaggcaaattatcgagcatacagagaaagctgttgatgagcagaacgcacagactcaggagcaagagggattcgtgctcgggctcagcgaatcagaggaaaaaatggatcacagagtatgtccccctttgagccattcagagtcgttcggcgttccaaaaggccggtcccagcgcaaagtctctaagagcccatgcgaaaagttgatcagtaaaggaagcctgtccctgggaagttctgcctccttgcctccgcagccaggaagcagagacggtctccccgcactgaacaccaagattctctatccaaatgtcagggcagggatgtccggcagtttgcccggaggatctgtcatctctcgactgctgataaacgctgatccatttaattcagagcccgagactctggaatattacaccgagaagtgtgtgatgaataattatttcggcattgggctcgatgccaagatttcccttgattttaacaacaaacgcgatgagcaccctgaaaagtgtcgaagtagaactaagaatatgatgtggtacggagttctcggtacaaaggaattactgcatagaacatacaaaaatctggagcagaaagtgctgctcgagtgcgacgggcggcccatccctctgccttctctacaaggcattgctgtactcaatattccttcctacgctggaggcacaaatttctggggcggcactaaggaggatgatacgttcgctgccccttctttcgatgacaagattttggaggtggttgccgttttcggctcaatgcagatggcagtctcaagagtgatccggctgcagcatcataggatcgcccaatgtcgcactgttaaaatctctattctgggtgacgaaggagtccccgttcaggtcgatggggaggcttgggtgcagcccccgggatacattcggatcgtacacaagaatagggcacagactctgacccgcgacagagcctttgagtctactctgaagagctgggaagataaacagaaatgcgagctgccacgcccaccttcctgctcacttcatccggagatgctgagcgaagaagaagctacccagatggaccagttcgggcaggctgctggcgtactcattcactccatccgtgagattgctcagagtcacagagatatggagcaagaactggcacacgctgtgaatgcatcctccaagtctatggaccgtgtgtacggcaaacctcggaccactgagggactgaattgctctttcgttctggaaatggtgaataactttcgagcactcagaagcgagactgagctgctgttaagtggcaaaatggcccttcagttagacccacctcagaaagagcagttaggctctgctctcgcggagatggatcgccagctgcggagactcgccgacaccccttggctttgccagtccgccgagccaggggatgaggagtccgttatgttggatcttgctaagcgaagtcggtcaggcaagttcaggttagtcacaaagttcaagaaggagaagaataataaaaataaagaggcgcacagcagtctcggcgcacctgtgcatctgtggggaactgaggaagtggccgcatggctcgagcacctgtctctatgcgaatacaaggatattttcacacggcatgatatccgcggaagtgaattgctgcacctggagcgtcgggatcttaaggatctgggagttaccaaggtcggccatatgaagagaatcctctgtgggataaaagaactgtcacgaagtgctcccgccgtcgaagcttag

SEQ ID NO: 185298 - DNA, 3513 bp, synthetic construct
  misc_feature 1..3513: note = Description of Artificial Sequence: Synthetic coding sequence
  source 1..3513: mol_type = other DNA
atgaacatgttcctgtacttccagaccatcatcaaggagggcatgctgaccaagcagaataatagctttcagcggtccaaacggcgctacttcaagctccgaggtcgtaccctttactacgctaagaccgcaaaatcaatcatttttgacgaggtggatcttaccgatgcgtccgtggctgaatcttctaccaaaaacgtaaacaactccttcaccgttatcacaccctgcaggaagctcatactatgcgctgataatagaaaggaaatggaggactggattgcagctctgaagacagtgcaaaacagggaacacttcgaaccaacacagtattctatggatcacttcagcggcatgcacaactggtacgcatgttcccatgcgcggcccacttactgtaacgtgtgccgggaagctctgtcaggcgtgactagtcatggtttatcatgcgaagtttgtaagttcaaggcccataaaaggtgtgcagtgagggccaccaacaattgcaagtggacaaccctggcgtctattggtaaagacatcatagaggacgcagatggcatcgctatgcctcaccaatggctggagggaaatctccccgtatcagccaagtgtactgtctgcgacaagacttgtggttccgttttacggctccaggactggcggtgtctgtggtgcaaggccatggttcatactagttgtaaggagagcctgctgactaagtgccctctcggtctgtgtaaggtgagtgtaatccctccgacagcactgaattcgatcgacagcgatggtttttggaaggcatcttgcccaccgtcttgtacctccccacttctggtgtttgtaaattctaaatccggcgacaatcagggtgtgaagtttcttcgccgattcaaacagcttctgaaccccgcacaagtatttgacctgatgaatggaggcccgcacttggggttgcggctgtttcaaaaattcgacaccttccggattcttgtgtgtggaggagatggctcagttgggtgggtcctctctgagatagattcactaaatctgcataagcagtgccaactgggcgtgctacccctggggactggcaacgacttagcgagagttctgggctggggtagtgcttgcgatgatgacacccagctgccccagattctcgagaagctggaacgggcctctactaagatgctcgaccggtggtctgtcatggcgtatgaagcaaaactacctcggcaggcatcttcgtccactgtgactgaagatttctcagaagacagcgaggtacagcagatcttattctacgaagacagcgtggccgcgcatctttcaaaaattttgacctcagaccagcattccgtagtcatctccagcgctaaagtcctctgtgagaccgttaaggactttgtggccagggtgggtaaggcctacgagaaaacaacagagtctagtgaagagtcagaggtcatggcgaagaagtgctcggtcctcaaagagaagctggactctctcctgaaaacattagacgacgagtctcaggcctccagcagtttacccaacccaccccccacaatagctgaggaggccgaggatggcgacggcagtggcagcatctgcggttctaccggggacaggttggttgcatcggcgtgtccggcgcgaccgcagattttccggcccagagagcagctcatgctccgggccaactccctgaagaaagcaatccggcaaatcattgaacacacggagaaggctgtcgacgaacaaaacgcccagactcaggagcaagaagggttcgttctggggttgtccgagtcagaagaaaagatggaccaccgggtgtgcccccctttgtcccatagcgagtctttcggagttcctaaggggcgatctcagcgcaaggtgtccaagtctccttgcgaaaaactgatctctaaaggatcactgagcctgggatcttcagcctcactacctccacagccaggctcccgggacgggctccccgctctgaatacaaagatcctctatcccaacgtgcgcgctggaatgtccggcagtttacctggcgggtctgtgatctccagactcctcatcaacgcagatccttttaactctgaacccgagacactggagtactataccgaaaagtgcgttatgaacaactactttggaattgggttggacgccaaaattagccttgattttaataataagagggacgagcacccggagaaatgcagatccaggactaaaaacatgatgtggtatggagtgctcggaacaaaagagttactacatcgcacgtataaaaacttagagcagaaagtgttgctcgagtgcgatggccgccccatccccttgccctcccttcaaggcatcgcggttctcaacataccctcatatgctggcggcacaaatttttggggaggcacaaaagaagatgatacttttgcagcccccagttttgacgataaaatcttggaggtagtcgctgtgtttggtagcatgcaaatggcggtgtctcgggtgatccggttgcagcaccatagaattgcccagtgtagaacagtgaaaattagcattctgggtgatgagggggtcccagtgcaggtggacggggaggcatgggtgcagcctcccggatatataaggatcgtgcataagaatcgggcccaaaccttaactagagacagggcgttcgaaagcacactgaagtcttgggaagacaagcaaaaatgcgaactgcccagacccccttcttgcagcttgcatcccgagatgctgagtgaagaagaagcaacccaaatggaccagttcggacaggccgccggggttctgattcattccatcagggaaattgcacagtcccatcgagatatggagcaggagctagcccatgctgtcaacgcttcatccaaatccatggacagggtctacggcaagccgcgcacaacagagggcctcaactgtagctttgtgttagagatggtgaataactttagggcccttagaagtgaaacggaactcttactgtctggaaaaatggccctgcagcttgacccaccacagaaggagcagctagggtccgcccttgcagaaatggaccggcagttgcgtcggctggccgacaccccttggctgtgccaatccgccgagcctggggatgaggagagcgtgatgttggatctggctaagaggtctaggagcgggaaattcagactggtcaccaaatttaagaaagaaaaaaataataagaacaaggaggcacactctagcctgggggcccccgtgcacctctggggaaccgaggaggtcgccgcctggctggagcatctctccctctgtgaatataaggacatattcacacgccacgatattcggggctcggagctgctgcacttagaaaggcgcgacttaaaggatctgggtgttacaaaggtcggacacatgaagagaattctctgcgggatcaaggaacttagtaggagtgctcctgccgtggaagcatag

SEQ ID NO: 185299 - DNA, 1704 bp, synthetic construct
  misc_feature 1..1704: note = Description of Artificial Sequence: Synthetic coding sequence
  source 1..1704: mol_type = other DNA
atggaggccgagcggcggcccgcccccggcagccccagcgagggcctttttgcagatggtcatctgatcctttggacactctgtagcgtcctattgcctgtgtttattacattctggtgttctcttcaaaggagtaggaggcagctgcataggcgcgacatcttccgaaagtccaagcatggctggagagacaccgacttgtttagccaacccacctactgctgcgtttgcgcacagcacatcctgcagggggccttctgcgattgctgcggtttgagagttgatgaggggtgtctcaggaaggctgataagaggttccagtgcaaagaaattatgctgaagaacgataccaaagtgctggacgccatgccccaccactggattcgcggaaacgtacctctgtgttcttattgcatggtgtgtaaacagcagtgcggatgccaacccaagctttgtgactatcgatgcatctggtgtcagaaaaccgtccacgacgagtgcatgaaaaatagtctcaagaacgagaaatgtgactttggtgagtttaaaaacctaattattccccctagttatttgacttcgattaaccagatgcgaaaggataagaagaccgactatgaggttcttgcctcgaagctggggaaacaatggaccccactaattatccttgctaatagtcggagcggaaccaacatgggagagggtttgctgggagagttcaggattctcctgaacccagtgcaggttttcgatgtaacaaaaacacctccaattaaggccctccaactttgcacactgcttccatactatagtgctagagtcctggtttgtgggggggacggcaccgtggggtgggtcctcgacgcggtagacgatatgaagatcaaggggcaggaaaaatacattccccaggttgctgtactgccactgggcaccggcaatgacctcagcaacaccctgggctgggggactgggtacgccggcgagattccagtcgcccaggtgttacgaaacgtgatggaggccgatggcatcaagctagaccgttggaaagtgcaggtaaccaacaaaggatattataacctgcgcaagcctaaggagtttacaatgaataattacttcagcgtgggcccagatgccctgatggcactgaacttccacgcccacagagaaaaagctcctagcctgttttccagtcgaatccttaataaagctgtttatctgttctatgggacgaaggactgtctcgtgcaggagtgcaaagatttaaacaaaaaggtggaactggaactggatggagaaagagtcgctcttccttccctcgaggggataattgtgctgaatataggatactggggaggtggctgccggctatgggaggggatgggtgatgaaacctatccgttagccagacacgacgacggcctgctggaagtagtaggagtgtacggaagttttcattgcgcccagatccaagtgaagctggcaaacccgttccggattggacaagctcatacagtgagactcattctgaaatgttccatgatgcctatgcaggtggacggggagccatgggcacagggtccttgcacagttaccataacccacaagacccacgctatgatgctctattttagcggcgaacagaccgacgacgatatttcttccacgagcgatcaggaagatatcaaagcaactgagtag

SEQ ID NO: 185300 - DNA, 2376 bp, synthetic construct
  misc_feature 1..2376: note = Description of Artificial Sequence: Synthetic coding sequence
  source 1..2376: mol_type = other DNA
atgggcgaggagcggtgggtgagcctgacccccgaggagttcgaccagctgcagaagtatagcgagtattcatcgaagaaaataaaagacgcgttgaccgaattcaatgaaggtggcagcttgaagcaatacgaccctcacgagccaatctcttacgatgtgtttaagctgttcatgagggcctaccttgaggttgacctgccccagcctctgtctacacacctgtttcttgcgttctcacagaagccgagacatgagacgtctgaccaccctacagaaggagcatcgaactctgaggcgaattcggctgacaccaatattcagaatgcagataacgcgacgaaggcagacgaagcatgcgccccggataccgagtccaacatggctgagaaacaagcccccgcagaagatcaggtagccgccacccccttggaaccccccgtgccacgcagtagctccagcgagagccccgtggtgtacctgaaagatgtagtgtgctacctgtctctgctggagactgggcggccacaggacaaattggaatttatgttcagactatatgattcggacgaaaacggcctgctggatcaagcagagatggactgcatcgtgaaccaaatgctacatattgcgcaatacctagagtgggaccctaccgagcttcggcctatcctgaaggagatgctccaggggatggattacgaccgagatgggttcgtgtccctacaagaatgggtccacggaggaatgaccactattccccttctcgtcttgctcgggatggatgatagtgggtccaagggcgatggacgccacgcctggactatgaaacacttcaagaaacctacttattgcaatttctgccatatcatgcttatgggagtgcgaaaacagggcttgtgctgtacatattgcaaatatacagtccacgagcgctgcgtgtcccgcaatattcccgggtgcgtaaagacttactcaaaagcaaagcgtagtggggaggtgatgcagcatgcttgggttgaaggtaactctagcgtaaaatgcgaccgctgtcacaaatccatcaagtgctaccagtccgtgaccgcccgtcactgtgtgtggtgtaggatgacgttccacagaaaatgcgagctgagcacactgtgcgacggtggcgaattaagggaccatattttgctgcccactagtatttgtccaatcactagagaccggccaggtgaaaagtccgatggctgcgttagcgcaaaaggggagcttgtcatgcagtataagatcatccccactcccggcacgcacccactgctcgttttggtgaaccctaagtctggcggtcgccaaggtgaacggatactgcgcaaatttcactacttgctaaatcctaaacaggtgttcaatctcgataatggggggcctacccccgggctcaacttctttagggacacaccggattttagagtgctggcttgtggaggggatgggacagtcgggtggatcctggattgtatcgacaaagcaaacttcgccaagcacccccctgtcgctgtgctgcctctgggcaccggcaacgacctggctcgctgccttagatggggcggtggatacgagggcgggtcactgactaagattttgaaagatattgaacagagcccgcttgttatgttggaccgttggcacttggaggtgataccccgcgaggaggtggagaatggggatcaggttccatactccatcatgaacaattatttttcaatcggagttgatgcatctatagcacacagattccatgtcatgcgagaaaagcatcctgagaaattcaactcgagaatgaagaataagctctggtacttcgagttcggaacctcagaaaccttcgctgccacctgcaaaaagcttcacgatcatatagaactcgaatgtgacggtgttggggtggacctgtccaacatttttctggagggtattgccatcctcaacattcccagcatgtatgggggaaccaatctgtggggagaaaacaagaagaatcgagcggtgataagggagtcacgcaagggagtgaccgaccctaaagaactgaagttttgcgtgcaggacctgagcgaccagttattggaagtggtaggattggaaggagccatggagatggggcagatctatactggcttgaaatctgccgggaggagactggctcagtgtgccagtgtgactataagaacaaataagctgcttccaatgcaggtggatggtgagccatggatgcagccttgttgcactatcaaaataacacataagaaccaggctcctatgatgatggggccccctcaaaaatcttcattcttttctctgagaagaaagtctcgcagtaaagattag

SEQ ID NO: 185301 - DNA, 2301 bp, synthetic construct
  misc_feature 1..2301: note = Description of Artificial Sequence: Synthetic coding sequence
  source 1..2301: mol_type = other DNA
atgggcgaggagcggtgggtgagcctgacccccgaggagttcgaccagctgcagaagtacagcgaatatagctcgaagaaaatcaaagatgcactgacagaattcaacgaaggagggagcctgaaacagtatgatccacatgaacccatcagttatgacgtgttcaagcttttcatgcgggcatatcttgaagttgatttgcctcaaccgctgtctactcatctgttcctggctttctcccagaagccccggcatgagacaagtgatcacccgaccgagggggcttctaattctgaagccaattccgccgataccaatatccagaatgctgacaacgcaacaaaagccgatgaggcttgcgcacccgatactgagtccaacatggcagagaagcaagctccagcggaggaccaggtagctgccacccctctcgaacctccagtgcctagatcaagcagcagcgaaagcccagtggtctatctgaaagacgtggtgtgctatctatccctccttgagacaggaaggccacaagacaagcttgagtttatgtttcggctctatgactcggacgaaaacggactgctagaccaggccgagatggattgtattgtgaatcaaatgcttcatatagcccagtacctggagtgggatccaaccgaactccgcccgatccttaaggagatgctgcaggggatggactatgatcgggacggattcgtctccctgcaggagtgggtccacgggggcatgacgactatcccactgctggttctactgggcatggatgatagtggctctaagggcgacggtcggcatgcctggaccatgaaacacttcaaaaaaccaacctactgtaacttttgtcacatcatgctgatgggagtaagaaagcagggcctgtgttgcacctattgcaagtacactgtgcacgagagatgcgtctcaagaaacattccagggtgcgttaaaacatactctaaagccaagagaagtggggaggtgatgcagcacgcctgggtggaggggaactccagcgtaaaatgtgatagatgccataagagtattaagtgttatcagtcagtgacagctagacattgtgtctggtgcaggatgacctttcatcgaaaatgtgaacttagtacgctctgcgatggaggggaacttcgcgaccacattctgttgccaacctccatatgtccaatcactcgcgatagaccgggggagaaatctgacggttgtgtaagtgccaaaggagaactggtcatgcagtataagatcatccccacaccaggcacgcatcctctactcgtgctggtcaatcctaagagcggagggcgtcagggcgaacggctcaacttcttccgggatacccccgacttccgcgtgctggcgtgtggaggagatggaacagttgggtggattctggattgcattgacaaggcaaacttcgcaaagcatcctcccgtagcagttttgccactcggaactgggaatgatcttgcccgatgtctgagatggggcggcggctatgagggaggttctctaacaaagattctcaaagatatcgagcaatcacccctcgtaatgttggatcgctggcatcttgaggtcattcctcgagaagaagtggaaaacggagatcaggtcccctacagcatcatgaataattatttttccattggtgtagatgcatcaattgcacaccgctttcacgtaatgcgggagaagcatccagaaaagtttaactccagaatgaagaataagctgtggtatttcgagttcggaaccagcgaaactttcgctgcgacatgcaagaaactgcacgaccacatcgagctggaatgcgacggcgtgggagtggacctcagtaatatttttcttgagggtatcgcaattctgaatatcccctcgatgtacggcgggaccaacctttggggcgagaataaaaagaatagggcagtgatccgggagtcccgcaagggagtgaccgatccgaaagaactgaagttctgcgtgcaagacctgagtgaccaattgttggaagtcgtgggcctggaaggagctatggaaatgggacaaatctacactggactgaagtcggccggacgaaggctcgcccaatgtgctagcgtaactatccgcaccaataagctcttacccatgcaggtggacggcgagccatggatgcaaccttgctgtacgatcaagatcacacataagaatcaggctccaatgatgatgggccctccccagaagtcgtcctttttttcgctgcgccggaaatcccggagcaaagattag

SEQ ID NO: 185302 - DNA, 2259 bp, synthetic construct
  misc_feature 1..2259: note = Description of Artificial Sequence: Synthetic coding sequence
  source 1..2259: mol_type = other DNA
atgggcgaggagcggtgggtgagcctgacccccgaggagttcgaccaactgcagaaatacagcgagtattcctctaagaagattaaagatgccctcaccgagttcaatgagggaggaagcctgaagcagtacgacccccatgaacctatcagttacgatgtcttcaagctgtttatgcgggcttacctggaggtggacctaccccaacccctatccactcacttgtttctcgccttctcccagaagcctcgtcacgagacttcagaccaccccacagagggcgcatcaaattcggaggccaactccgcggatacaaacattcagaacgcagacaatgccactaaggccgacgaggcttgcgctccggacaccgagagcaatatggccgaaaagcaagcacctgctgaggaccaggtggccgcaacacctctggagcctcctgttcctcggtcttcaagcagcgagagtccagtggtgtatcttaaagacgtcgtctgctacctgagcctcctggagaccggcaggccacaggacaagttagaattcatgtttagactttatgacagcgacgaaaatgggctgctggaccaagccgagatggattgcatcgtgaaccaaatgctccacatagctcagtatcttgagtgggaccccactgagttaaggcctatattgaaagagatgttgcagggaatggattacgatcgtgatggttttgtgtctctacaagaatgggtccacggaggcatgacaactattcccctgctcgttctgttaggtatggacgattcaggcagtaaaggggacggccggcacgcatggacaatgaaacacttcaaaaagcccacttactgtaacttctgccatatcatgctgatgggtgtccggaagcagggactttgctgtacatactgtaaatacacggtgcacgagaggtgcgtaagcagaaatattccaggatgcgtcaaaacgtactcaaaagctaagcgtagcggtgaatttcatcggaagtgcgaactgtcgacattatgcgatggcggtgaactcagagatcacattcttttgcccactagcatatgccctatcacgcgggaccgtccaggcgagaagtctgatggctgtgtgagcgccaagggtgagctggtgatgcagtacaaaattattccaacgcctgggacccacccactgctggtacttgtgaacccgaaaagcggcggcaggcagggcgaacgcatcctgcgcaaatttcactacctgcttaaccctaagcaagtttttaacctcgataatgggggacctaccccgggtcttaacttttttagagacactccagattttcgagtgctggcatgtggtggggatggcaccgtgggctggattctggactgcattgataaggccaactttgcaaagcaccccccagtggccgtgctccccctgggcacaggcaacgatttggcccggtgcctaagatggggcggcggctacgagggcggctccctgacaaagattctgaaggatattgagcaatctccgttagtaatgttagacagatggcacctggaggtgattccacgcgaagaggtggagaatggcgatcaggtcccgtatagtattatgaacaactacttttccatcggcgtggacgcttctatcgctcatcgctttcatgtcatgcgcgagaaacacccggaaaagtttaattccagaatgaagaataagctctggtacttcgagtttggcacaagcgaaacattcgccgcaacatgtaagaagctgcatgatcacattgaactggagtgcgacggggttggcgtcgatctgtctaacatttttctagagggcatcgccatcctgaatattccaagcatgtatggaggcacgaacctctggggggagaacaagaagaaccgcgccgtcatccgcgagtcgaggaagggcgtgactgacccaaaggagctgaaattctgcgtacaggacctatctgaccaactcctggaagtggtgggcctagagggagctatggagatgggccaaatatatactggattgaagtcagcgggacgacgcctggcccaatgtgcctccgtaaccattcgcacaaataaactgctgccaatgcaggtggacggtgaaccctggatgcagccttgctgtaccattaagattacccacaagaatcaggcccctatgatgatgggtcccccacagaaatcatcctttttctccctgcgcagaaaatcccgaagcaaggactag

SEQ ID NO: 185303 - DNA, 1818 bp, synthetic construct
  misc_feature 1..1818: note = Description of Artificial Sequence: Synthetic coding sequence
  source 1..1818: mol_type = other DNA
agcctgaagatgggcgaggagcggtgggtgagcctgacccccgaggagtttgaccagttgcagaagtactccgaatacagtagtaagaagataaaagacgccctgactgagttcaacgaggggggaagtctaaagcagtacgatccacacgagcctatctcctacgacgtctttaaactgttcatgagggcatacctggaggtagacctaccacagcccttgtccacgcatctcttcttggctttctcgcagaaacctaggcatgaaaccagcgaccaccccaccgagggagctagcaacagtgaggctaatagtgctgataccaacattcagaatgctgataacgccacaaaagccgacgaggcctgcgctcccgatactgagtccaatatggcagagaaacaggcccctgccgaagaccaggtcgccgcaacacctttggaaccccccgtgcctcggtcaagttcatctgagtcccccgttgtatatcttaaggacgtggtgtgctatctgtcactgctggagaccgggagacctcaggataagttggagtttatgttccggctgtacgattcagacgaaaatggcctgctggaccaagctgagatggactgcatcgtcaaccagatgctccatatcgcccagtaccttgagtgggaccccaccgaacttaggccgatcttaaaggagatgctgcagggcatggactacgatagagatgggtttgtaagcctgcaagagtgggtccacggcggaatgacaacaatcccgctgctcgtcctcttgggaatggacgatagtggttcaaaaggagatggccgccacgcatggacgatgaaacattttaaaaagccgacttactgcaacttttgtcacataatgttgatgggcgttcggaagcagggtctgtgctgtacctattgtaaatacactgtgcacgagaggtgcgttagcaggaacatccccggttgtgtaaagacatattctaaagctaagcggagcggggaatttcacagaaaatgtgagctatccacactctgcgatggcggggagctgcgcgatcatatcctgttgccaactagcatctgccccatcactcgggacagacctggagagaaaagtgacggctgcgtgtctgccaaaggggagctcgtgatgcagtacaaaatcatccctactccagggacacaccctctcctcgttctggtgaatccaaagagtggcgggaggcagggagagagaatcctgcgaaaatttcactatctgctgaacccaaaacaggtctttaatctcgacaacggggggcctaccccagggctgaacttcttccgggatacccctgattttagggtcctggcttgtggcggggatggaaccgtgggctggattttagactgcatagacaaagcgaacttcgccaagcacccaccagtggccgttctacctctggggactggcaacgatctggcgcgctgtctccgctggggcggcggttatgaaggtgggtctcttacaaaaattcttaaggacatcgaacagtctcctctggtgatgctggaccggtggcacctggaagttataccccgagaagaagtggagaacggagatcaagtgccttacagtattatgaacaactactttagcattggggtggacgcgtcaatcgcccaccggtttcatgtcatgagggagaaacacccagagaagttcaattcacgcatgaaaaataagttgtggtatttcgagttcggtacgtcggaaacctttgcggctacctgcaagaagctccatgatcatatcgagctggagtggtgttag

SEQ ID NO: 185304 - DNA, 2199 bp, synthetic construct
  misc_feature 1..2199: note = Description of Artificial Sequence: Synthetic coding sequence
  source 1..2199: mol_type = other DNA
atgggcgaggagcggtgggtgagcctgacccccgaggagttcgaccagttgcagaaatacagcgaatactctagcaagaaaattaaagacgccttaaccgagttcaacgagggtggctcactgaagcagtatgacccacatgaaccaatatcctacgacgtgttcaaactgttcatgcgcgcttacctggaggtggatctgccccagcccttatctacccacttatttcttgcgttttctcaaaagcctaggcacgagacctccgatcatccgaccgagggagcgagtaactcagaggctaacagcgctgacaccaacatacagaatgcagacaatgccactaaggctgacgaggcgtgcgcgccagacacagagagcaacatggctgaaaagcaggctcccgccgaagaccaagtagccgccacgcctctggagccccccgtccctcgaagcagctcgtctgaatcccctgtcgtctatctgaaagacgtggtgtgttacctttcactgttagaaaccgggcgcccacaggataaacttgagttcatgtttcggctgtatgatagtgatgaaaatggcctgcttgaccaggccgagatggattgcattgtgaatcagatgcttcacattgctcaatatctggaatgggatcccactgagctgcgtcctatcctcaaggagatgcttcagggaatggattacgaccgggacggtttcgtttcactgcaggaatgggtgcacggtggtatgacaactatcccccttctggtgctgctgggtatggatgattctggatctaaaggggatgggcgacatgcttggaccatgaagcacttcaagaaacccacatactgcaacttttgtcacatcatgttgatgggagtccgaaagcaaggcctctgctgcacatattgcaaatacaccgtgcacgagagatgcgtgtcccgaaacatcccaggctgcgtgaagacttactctaaagccaaacggagtggcgagttccacagaaagtgcgaactgagcactttgtgtgatgggggcgaactgcgcgaccacatcttgcttccaaccagtatttgccccatcacccgctacaagattatcccgacgcctggcacccacccactgcttgtgctagtgaaccctaaatcaggcggccgccagggtgaacgaatccttcggaaattccattaccttctaaatcctaagcaggtttttaatttggataacggcggccctacccccggactgaatttcttcagggatacacctgatttccgggtcctggcctgcgggggagacgggaccgttggatggatcctcgactgcatcgacaaggcgaattttgccaagcatcctcccgtggccgtgctgcccctcggcacggggaacgacctcgccagatgcttgcggtggggcggcggctatgaaggcggttccctgacgaaaatattgaaagacatcgagcagagccctctggtgatgttagacaggtggcacttggaggttatacctagagaagaggtagaaaacggcgatcaggtgccatacagcataatgaacaattacttttccataggcgtggacgcatcaattgcacatcgattccatgtcatgcgggagaaacacccagagaaattcaactcaagaatgaaaaataaactttggtactttgaattcggtacttctgaaacgtttgccgcaacatgtaagaaattgcacgatcatattgaactggagtgcgacggagtcggcgtggacctttctaacatcttcctggaagggatcgcaatccttaacatcccatcaatgtacggagggaccaatctctggggagagaataagaaaaatagagccgtcatccgtgagtctcgcaagggagtgacggatcctaaagaactgaaattttgcgtgcaggacttatccgaccagctcctcgaggtcgtggggctggagggtgccatggagatgggccagatatacactggtcttaaatcagcgggccgccgcctggcccagtgtgccagcgttaccatcagaacaaacaagctgctgccaatgcaggtggacggagaaccatggatgcagccctgctgcaccattaagatcacccacaagaaccaggcacccatgatgatgggccccccccaaaagagcagcttcttctccctcagaagaaagtcgcggtcaaaggattag

SEQ ID NO: 185305 - DNA, 3198 bp, synthetic construct
  misc_feature 1..3198: note = Description of Artificial Sequence: Synthetic coding sequence
  source 1..3198: mol_type = other DNA
atggacgccgccggccggggctgccacctgctgcccctgcccgccgcaaggggccctgcccgtgctcctgcagccgccgcagccgccgctgcatccccgccgggtccttgttcaggcgctgcgtgtgctccctccgccgctgccggcgcgggggccatgaatccctctagtagcgctggggaagagaagggcgccaccggcgggagcagcagctcagggagcggcgcaggtagttgctgcttaggcgcagagggcggggcggaccctcggggtgcaggcagtgctgccgcagcaggtgcggccgctctcgatgaaccagccgccgcaggtcagaaagaaaaggatgaagcccttgaggagaagttaagaaatctgacatttcggaagcaggttagctacaggaaagccatttcccgagctggcctgcaacatttggcccctgcccaccctctaagtctccctgtcgccaacggacctgcaaaggaacccagggccaccctggactggtcggagaatgccgtaaatggagagcacctgtggttggaaacaaacgtgagtggggacctttgttacctgggggaggagaattgtcaggtgcgattcgccaagagcgccctgcgccgtaagtgcgctgtttgcaagatagtagtgcatacagcctgcatagaacagcttgagaagattaatttccgatgcaagcctacttttagggagggaggaagccgcagtcccagggagaattttgtcaggcaccactgggtacatcgccgacggcaagaaggtaagtgcaaacagtgtgggaaaggattccaacagaaattctcctttcacagtaaggagatcgttgccatatcctgtagctggtgtaagcaggcatttcataacaaagtgacctgttttatgctgcatcatatagaggaaccctgctccctgggcgcccacgctgcggtaatcgtccctccaacttggataatcaaggtaaaaaaaccccagaactcactgaaggcctcaaaccggaaaaagaagaggacctctttcaaaaggaaagcgagtaagaggggcatggagcaggaaaacaaagggcgcccatttgtgatcaagcccatctcttctcccctgatgaaacctctactggtgtttgtaaacccaaagtctggaggcaaccaggggaccaaagtactccagatgttcatgtggtatctcaaccctaggcaagtgttcgatttgtctcaggaaggcccaaaggacgccctggagctctatcggaaggtgcccaatctgcgcatccttgcatgtgggggcgacgggactgttggctggatactgtctatcctagacgagctccagttatcaccccaacctccggtgggcgtgcttccacttggcacaggaaacgacctggctaggaccttgaactggggcggagggtatactgatgagcccgtttccaagattctctgtcaagtcgaggacggtactgtggtgcagctggaccgctggaatctgcacgtggaacggaaccccgacttgccccccgaagaactggaagatggtgtgtgtaagctgcccctgaatgtgttcaacaattacttcagcctgggcttcgatgcccacgtgaccttagagttccacgagtctcgcgaggcaaacccggagaagttcaatagtcgctttaggaacaaaatgttctacgccggggcagcgttcagcgattttctgcagcggtcctccagggacttgtctaagcatgtcaaagtggtatgcgatggaacggacctcactccgaaaattcaggaattgaaattccagtgcattgttttcctgaacatccccaggtactgcgcgggtaccatgccgtggggcaatccaggagatcatcacgacttcgaacctcagcggcatgacgatggatacattgaagtgatcgggtttacaatggccagccttgccgctctgcaggtagggggtcacggcgagcgcttacaccagtgcagggaagtaatgttgcttacctataaaagcatacccatgcaggtggacggtgagccttgccgattggcacccgcgatgatccggatttcacttcgaaatcaggctaacatggtgcagaaatccaaacgcaggacatccatgcctctgctcaacgacccccaatccgtgccagatcgactgcggatcagagtgaataagatctctctgcaagactacgagggcttccactatgacaaggagaaactgagggaagcctccattagcgattggctgaggaccattgccggagaactcgtccagtctttcggtgctattcctcttggaatactggtcgtgaggggggattgtgacctggaaacttgccgtatgtacatcgaccgccttcaagaggatctgcagtccgtttcatccggctcacagcgagtccattatcaggatcacgaaaccagctttcctcgcgcactgtctgcccagcgcctatctccaaggtggtgcttcttggacgacaggagtcaggaacacctgcatttcgtgatggaaatctcacaagacgaaattttcatcttagaccccgatatggtggtctcacaaccagctggaacgccacctggcatgccagatctggtcgtggaacaggcatcgggcatcagtgattggtggaaccccgcattgcgaaaacgtatgttgagcgattcaggattgggcatgatcgctccttattacgaagattccgacttaaaggatctttcacatagccgtgtcctccaaagtcccgtgagttcggaggatcacgcaatccttcaagccgtaattgccggggacttgatgaagttgatagagtcgtataaaaatggcggtagtttgctgatacaggggccggaccactgctcactcctccattacgcggctaagacaggcaacggtgaaatcgtgaagtacatcttagaccacggcccaagcgagctgctagacatggccgactcagaaacaggtgaaacagcactgcacaaagctgcttgtcagcgaaaccgggccgtgtgtcaactgctggtggacgcaggtgcgtcactgcgcaagacagattctaaggggaaaaccccgcaagaacgagctcagcaggccggcgatccggacttagccgcctacctggaaagccgacagaactataaggtgatcggacacgaagacctggaaaccgccgtgtag

SEQ ID NO: 185306 - DNA, 3207 bp, synthetic construct
  misc_feature 1..3207: note = Description of Artificial Sequence: Synthetic coding sequence
  source 1..3207: mol_type = other DNA
atggacgccgccggccggggctgccacctgctgcccctgcccgccgcccgggggcctgcacgagcccccgccgccgccgccgccgctgccgcctcacctcctgggccatgttccggtgccgcttgcgcaccttccgctgccgccggggcaggggccatgaatccctccagcagcgcaggggaagagaagggcgctacgggcgggagttcatcctctggtagcggggcaggatcctgttgtcttggcgccgagggaggagccgacccccgcggggccggctctgcggccgctgccggcgctgcagccctggatgagcccgcggccgctggccaaaaggaaaaagacgaggcattggaagagaagctacggaatctgaccttccgtaaacaggtgagttaccgtaaggcgatttcaagagccggtctgcaacacctcgcacctgcccaccccctaagcttacctgtagctaacggaccagccaaggagcccagagcgaccctggattggtccgagaacgcagtgaatggcgagcacctgtggcttgaaaccaacgtttccggtgacctgtgctatttaggagaggagaactgtcaagtgaggtttgccaaatcagctctcaggcgaaagtgcgcagtgtgcaaaatcgtggtccatactgcctgcatagaacagctcgaaaagattaacttcagatgcaagcccacattcagggaaggagggtccagaagcccgagagagaacttcgtgagacaccattgggtccaccgaaggcggcaagagggtaagtgtaaacagtgtggcaagggctttcaacagaagttctcatttcacagcaaagagattgtggctatttcttgcagttggtgcaaacaggcctttcataacaaggtgacttgtttcatgctgcatcatatcgaggaaccatgttcgctaggcgcccacgccgctgtcattgtccctcctacatggattataaaagttaagaaacctcagaattctcttaaggcaagcaatcgcaagaagaagaggacgtctttcaaacgaaaagcttctaagcgcgggatggaacaggagaacaaaggtaggccgtttgtgattaaaccgatctcttcccctctcatgaaacccctcctagtctttgtgaatcccaaaagcgggggtaaccagggaaccaaggtgctgcagatgttcatgtggtacctgaacccaagacaggtctttgacctcagccaagagggccccaaagacgctctcgaactatataggaaagtacctaatctgagaatactggcttgtggcggcgatggcaccgttggctggatcctgtcgatcctggacgagctacagctctcaccacagccaccagtcggagtgctgcctctgggaacaggcaatgatctcgccaggactcttaattggggaggtggatataccgatgaaccagtgtcaaaaatattatgccaagtggaagatggcacggtcgtgcaattagatcgttggaatctgcatgtcgagcgtaatcctgacctcccacctgaggagttagaggatggcgtttgtaagctgcccctcaatgttttcaacaattatttctctcttggctttgatgcccacgttacactcgagttccatgagtcaagggaggcaaatcctgaaaaatttaacagtcgatttcgaaataagatgttctacgccggggccgctttcagcgattttctacagcggagtagtcgggacttatccaaacacgttaaggtggtgtgcgatggcacagatcttacacccaagattcaagaactgaaattccaatgcatagtttttctcaacattccccgatattgtgccggcacaatgccgtggggtaatcctggtgaccaccacgactttgagccgcagaggcacgacgatggctatattgaagttatcggattcactatggctagccttgcagccttgcaggtcggcggccacggggagcgattgcaccagtgtcgggaagttatgcttctgacctataaatcaatcccgatgcaggtggatggggagccttgcagattagctcccgcaatgattcgcattagtcttaggaatcaggccaatatggttcagaagtcaaagcggcggactagcatgccccttttgaacgacattcaccaggtccagaccgccgacctgagaagggtgagcgcaccccccggaagcttcactatccctcagagcgtgccagataggttgaggataagagttaataaaatttccttgcaggactatgaggggtttcactatgacaaggaaaaattgcgtgaggccagcataccactcggtattctggtggttcgtggcgactgcgatctggagacttgccgaatgtacattgaccgtctgcaggaagatttgcagtctgtgtcctcagggtctcagcgggttcattatcaagaccacgaaacgtcatttccacgggcgctgtctgctcaaaggttgagtccaagatggtgctttctcgatgaccggagccaggagcaccttcatttcgtaatggaaatcagccaagacgaaatcttcatactagatccggacatggtcgtgagtcagcccgccgggaccccgcccggcatgccagatctggttgtggaacaggctagcggcatatccgactggtggaaccctgctttgcgtaagcgcatgctctccgacagcggattgggaatgatcgcgccttactacgaagactccgatctcaaggacctgtctcattcacgtgtgctccaatccccagtatcaagcgaggaccacgcaatactacaggcagtcatcgcaggagatctcatgaaactcattgaatcttacaagaatggagggtctttgctgatacaggggcctgaccattgtagccttctgcactatgccgctaagacgggcaacggggaaatcgtcaagtacatcttggaccatgggcccagcgaactcctagatatggctgatagcgagactggagagaccgctctgcacaaagccgcctgtcaacgcaacagagcagtgtgccagctgctggtagatgcaggggcttcccttcgcaaaacagattctaaaggaaaaactccacaagagcgagcgcagcaggccggggatcctgacctcgctgcctatctggaatccagacagaattacaaagtcattggacatgaagatctcgagacagctgtgtag

SEQ ID NO: 185307 - DNA, 2949 bp, synthetic construct
  misc_feature 1..2949: note = Description of Artificial Sequence: Synthetic coding sequence
  source 1..2949: mol_type = other DNA
atgaaccccagcagcagcgccggcgaggagaagggcgccaccggcggcagtagttcttctggcagcggggctggctcttgttgtctcggtgcagagggtggggcagacccaaggggcgcgggtagcgccgctgccgctggtgctgccgctctggacgaaccagctgctgccggacaaaaggaaaaggatgaagctcttgaagagaagctgcgcaatctgacatttaggaaacaggtgagttatcgtaaggccatcagccgagccgggctgcagcacctggcgccagcccaccctctgagcctgccagtagcaaatgggccggcaaaagagccacgcgccactctggactggtccgaaaatgctgtgaacggggagcacttgtggctggaaacgaatgttagtggggacctgtgctatcttggagaagaaaactgtcaggtgagatttgcaaaaagtgccctgaggcggaagtgcgccgtgtgtaagatcgtcgtgcacacagcttgtattgagcaactggagaagatcaactttcgctgtaaacccacgttcagggagggtggttcacgctctccgcgcgaaaactttgtgagacaccactgggtgcaccgccggcgacaagagggtaaatgtaagcagtgtggtaaggggttccagcagaaattttcatttcactctaaggagatcgtggcgatttcttgctcatggtgtaaacaggcgttccataacaaggtgacttgttttatgcttcatcatatcgaagagccgtgtagtctgggagcacatgctgcagtgattgttcctcccacttggattattaaggttaaaaagccccagaatagtctcaaggcctctaatcgtaaaaagaaacggaccagtttcaaaaggaaggccagcaagcgggggatggagcaggaaaacaagggccgcccatttgtcattaaacccatctcaagtccgctcatgaagccacttctggtcttcgtgaatcccaagagtggggggaaccaggggaccaaggtgctgcagatgttcatgtggtatctgaatccccggcaggtatttgacttgagccaggaagggcccaaggatgcactagagctgtaccgcaaggttccgaatctgcgcattttggcatgcggtggagacggcacagtaggttggatactatctatcctcgacgaactgcagttatcgccccagcccccagtgggggtattacccctcggcactggaaatgatttagcccggactcttaactggggaggcggctacaccgatgagcctgtgtctaagatcctgtgtcaggtagaagacgggacagtggtgcaactggaccggtggaatctgcatgtggaaaggaatccagacttgcctcccgaggagctggaggatggagtatgtaaactgcccctgaacgtctttaataattatttctctcttggattcgatgcccacgtgacgttggagttccatgagagcagagaggctaaccccgaaaaattcaattcgaggtttcgcaacaaaatgttttacgcaggagccgcattctctgacttccttcaaagatcgtccagggatttgagcaaacatgttaaggtcgtttgtgacggtacagatttgacaccgaagatccaggaactgaaattccaatgcatagttttcttgaacattccaaggtattgtgccggaaccatgccctggggcaaccccggggaccatcacgattttgaaccgcaacgacatgacgatggctacattgaagttatcggttttacaatggccagtttggcggcactgcaggtgggcggccacggtgaacgactgcatcaatgtcgtgaggtgatgctcttgacctataagtctattcccatgcaggtggacggggaaccttgcaggctggctccggccatgatcagaatttcacttaggaaccaggctaatatggtccagaagagcaagagaagaacttccatgccccttttgaacgacccacagagcgtgccggatcggctccggattcgcgtgaataagatctccctgcaagattatgaaggcttccactacgacaaagagaaactgagagaggcaagcataagtgactggttgaggactatcgccggggaactcgttcagagtttcggcgccatcccccttggtatccttgttgtgaggggtgattgcgacctggagacatgccgcatgtatattgacagactgcaggaagatctgcaatctgtctccagcggttcacagagagtgcactaccaggatcatgaaacatctttcccgcgcgccctgagcgcacaacggttgtcacctcgttggtgctttctggatgccactagcgccgatcggttttaccgaatcgacagaagccaggagcatctccacttcgtaatggagatctcacaagatgaaatctttatacttgacccagacatggtagtgtcacagccggccggcaccccccccgggatgccagatcttgtggtggaacaggcatctggtagcccagtgtcctccgaagaccacgccatcctgcaggccgtgatcgccggcgatctcatgaagttaatcgaatcatacaagaacgggggatcgttgctcatccagggcccagaccactgctctctgctgcactacgccgcgaagaccggtaacggggagatcgtgaaatacattcttgaccacgggccctctgagctcttggacatggcagattcagagaccggtgagacggcattacacaaggcggcctgtcagagaaatcgagccgtttgccagctcctagtggacgcaggtgcaagcctcaggaagaccgatagcaaaggcaaaacccctcaggagcgagcccagcaggccggagatccggatctggccgcctatctggaatcacggcagaactacaaggtgattgggcatgaggacttagagaccgctgtgtag

SEQ ID NO: 185308 - DNA, 2829 bp, synthetic construct
  misc_feature 1..2829: note = Description of Artificial Sequence: Synthetic coding sequence
  source 1..2829: mol_type = other DNA
atggccgccgccgccgagcccggcgcccgggcctggctgggcggcgggtccccacgccccgggagtcccgcctgtagtccggtgctcgggagtgggggccgtgcccgtcccggtcctggcccgggacccggtcccgaaagagccggagtccgggctcccggtcccgccgccgcaccgggtcatagcttcagaaaagtgactctcacaaaacccactttctgccatctgtgtagcgattttatctggggactggccggctttctgtgcgatgtgtgcaactttatgagccatgaaaagtgtttgaagcatgtgcgaatcccctgcacctcagtggccccaagtcttgtgagggtccctgtggcacattgttttggaccccgcggactgcacaagcggaagttttgcgcagtgtgccggaaggtcctagaggctcccgctttacactgtgaggtgtgcgagcttcacctgcaccctgactgtgtcccttttgcctgctccgattgccgccaatgtcaccaggacggacaccaagatcacgacactcatcatcatcactggcgcgaaggcaacctgccctcaggagctcgatgcgaagtttgccgcaaaacctgtggttcatccgatgtcctggccggagtgcgttgcgagtggtgtggcgtacaggctcatagtttgtgctcagctgcactggcccctgagtgcgggtttggcaggctgcgcagcctagtcctcccccccgcatgcgtgaggctactccccggcggcttttccaaaacccaatcctttaggatcgtggaagccgctgagccaggcgagggtggtgatggcgcggacggcagcgctgccgtagggcctgggcgggagacacaggccactccagaatccggcaagcagacgctcaagatatttgacggcgatgacgccgtgcgccgcagccaattcagactggtgacagtgtctcggctcgcaggcgctgaggaagttttggaagcagcgctgcgagctcatcacatcccagaggaccccggtcatctggagctgtgcagactccccccctcttctcaggcctgcgacgcatgggccgggggaaaggcagggagtgccgtgataagcgaagaggggcggtctcctgggtccggcgaggccacacccgaggcttgggtgatcagagctctgccccgggcgcaggaggtcctgaagatttaccccgggtggctgaaagtgggtgtggcctacgtgtctgtccgcgtgacccctaagagtaccgcgcggagcgtggtgctagaggtgctaccactactgggtcgtcaggccgagtcacctgagagctttcagctcgtggaggtagcaatgggctgtcggcacgtgcagcgaaccatgctgatggatgagcaaccccttctagacagactgcaggacatccggcagatgagtgtccggcaagtttctcagacacgattttatgtggccgaaagccgtgatgtggctccccatgtctctctcttcgtcggcggtttgccccctgggctgtcaccagaggaatactcttcactcctgcacgaggcaggcgctacaaaggccaccgtggtgtccgttagccacatttattcttctcaaggcgccgtagtgctcgatgtagcctgtttcgcagaagctgagcgactgtacatgcttttgaaagacatggctgtgcgagggcgacttctgacagccctggtgctgccagacctgttacatgcaaaactccctccagactcatgcccactccttgtgttcgttaatcctaaatccggcggactgaaaggacgtgacctgctctgcagcttcaggaaattactcaacccccaccaggtgttcgacctcacaaacggcgggccactgcctggactgcatcttttcagccaggtcccctgctttagggttctggtttgcggtggcgatgggactgtagggtgggtcctcggggctctggaggagactagatacagactcgcctgtccagagccttccgttgcaatccttccactggggacaggtaatgacctgggtagggtgcttcgttggggcgcaggctattccggcgaagaccctttcagcgtgctgctgagcgtggatgaagcggatgcagtcttgatggataggtggacaatcctgctggatgcacacgaagctggttcggccgagaatgacacagcggacgcggaaccacctaagatcgtacagatgtcaaattattgcggaatcggcattgacgccgaactcagcctggatttccaccaggctcgtgaggaggaaccgggaaagtttacgagcagactgcataacaaaggggtgtatgtcagagtgggactgcaaaagatctcccatagtcgcagtctgcataaacagatcagactgcaggttgaacggcaggaagtggagcttccaagcattgagggcctcatcttcataaatattccaagctggggaagtggcgctgatttatgggggtcagactccgatactagattcgaaaaacctcggatggacgatgggctgctggaggttgttggtgtaacgggggtggtgcacatgggccaggtgcagggcggcttgaggagcgggatccgcatcgcacaggggagttattttcgcgtcaccctcctcaaggctacacccgtgcaggtggacggcgagccatgggtgcaggcccctgggcacatgataatcagtgctgccgggcccaaggtgcatatgctgaggaaggccaaacagaaacctagaagagcagggaccaccagagacgcacgcgctgatgctgcacccgccccagagtcggatcctcgctag

SEQ ID NO: 185309 - DNA, 1632 bp, synthetic construct
  misc_feature 1..1632: note = Description of Artificial Sequence: Synthetic coding sequence
  source 1..1632: mol_type = other DNA
atgcccggcatggtgctgttcggccggcggtgggccatcgccagcgacgacctagtctttccaggattcttcgaactagtggtgcgggtgctatggtggatcggcatcctgactctgtacttgatgcaccgaggcaaactggattgtgccggcggagccttgctgtcatcgtatctcatagtccttatgatcctgctggccgtcgtgatttgcactgtgtctgccatcatgtgcgtcagtatgcggggaacaatatgtaacccgggcccccgtaagagtatgtccaagctgttgtatatccggctggctctcttctttcctgaaatggtgtgggccagcttgggtgccgcctgggtggccgacggagtgcagtgcgacaggactgtcgttaatggtatcatagccacagtcgtggttcgcacgcagatctggtgtccggcgacactgcggagagccagcccttgctttatcagcaacagaacaatcagcggcacaacgaagagcctcccacggtggtccgcaatgccacagggagcaccttcttgccgtagtcgcacaactgactatgacctggtagggggtgaccagctcaattgccattttggaagtatcttacatacaacgggcctgcagtaccgcgactttattcatgtgtcattccacgacaaagtttatgaactgccctttttggttgctttagatcaccgcaaggaaagcgtagtagtagccgtgcgtggcaccatgtccttgcaggacgtcctcacagatctgtccgcagaaagcgaggtgctagacgtagaatgcgaagtgcaggataggctggcccataaggggattagtcaggctgccagatatgtctatcaacggctgattaacgatggcattctcagtcaggcattctcgatcgcgcctgaatatagactggtgattgtcggccattctctgggcggcggagcagccgctctgctcgcaaccatgctgagagctgcctatccacaagttcggtgctacgcattctccccaccaaggggcttatggagcaaggcactgcaggagtattcacagagtttcatcgtaagcctggtgctgggtaaggacgtgattccaaggctcagtgtcacaaatttggaagacctcaagcgtagaatcctgagagtagtagcacattgtaacaaacccaaatataagatcttgttgcacggtctgtggtacgagctcttcggtggcaatcccaacaacctcccaaccgagcttgacgggggcgatcaggaggtgttgactcaacccctgctcggggagcaatccttactcacccgatggagtcccgcatactctttcagttccgactctccgctggacagctctcctaaatatcctcctctgtatcctcctgggagaattattcacctgcaggaagagggcgcttcaggccggtttggatgctgctctgcggctcattactctgccaagtggagtcacgaggctgagttcagcaaaatcctgataggtcccaagatgctaacagatcacatgcccgacattctgatgcgtgcactggacagcgtggtaagtgacagagcagcttgcgttagctgccccgcacagggagtgtcgagcgtggacgtcgcctag

SEQ ID NO: 185310 - DNA, 3129 bp, synthetic construct
  misc_feature 1..3129: note = Description of Artificial Sequence: Synthetic coding sequence
  source 1..3129: mol_type = other DNA
atgcccggcatcgtggtgttccggcggcggtggagcgtgggcagcgatgatctggtgctgcctgctatctttttattcctgctgcatacaacctggtttgtaatactctctgtggtcttattcgggctcgtttataaccctcacgaggcatgctcccttaacctagtggaccatgggagggggtatcttggtatcctgttgtcttgcatgattgctgagatggctataatctggctgtcaatgcgcgggggcattctctacacagagccccgcgatagcatgcaatacgtgctctatgttcgcctggcaattctcgtgattgaattcatatacgctattgtgggtatcgtatggctcactcaatactacacttcctgcaatgatctcacagctaagaatgttactcttggaatggtagtatgtaactgggtggtgatcctcagcgtgtgtattacagtgctttgcgtctttgaccccacgggccgaaccttcgtgaagttacgcgctacaaagcggcgccagaggaaccttcgcacttataacctccgccaccgattggaggagggacaagctaccagttggtcccgcaggctcaaggtgttcttgtgttgcacgcggaccaaggactcacagtccgatgcctactccgagatcgcttatttatttgcggagttcttccgagatctggacatcgttccttctgacatcatcgccggcctggtgctgctgaggcaaagacagcgcgctaaacgcaatgccgtccttgacgaggcgaacaatgatattctggcattcctcagtggaatgcccgtgacgcgaaataccaagtatctggatctgaagaacagccaggagatgttacggtataaggaagtatgctattatatgctcttcgcacttgccgcttacggctggcctatgtacctgatgcggaagcccgcgtgtgggctctgccagctggcgcggtcttgctcgtgctgtctgtgccctgcccggcctaggttcgctccaggcgtcacgatcgaagaggacaattgctgtggctgtaatgccatagccatcagaaggcatttcttggatgagaatatgaccgcagtggacatagtttacaccagttgtcatgatgctgtatacgaaacaccgttttacgtcgccgtggatcacgacaagaagaaagtggttatatctattcgcggaaccctttctcctaaagacgcccttacagatctcacgggagatgctgagcggctgccagtggaagggcaccacgggacttggctcgggcataaaggcatggtgctgagcgccgagtacattaagaagaaattggagcaggagatggtgctgagtcaggctttcggccgagacttggggcgggggactaagcactatggtttgatagtcgttggacacagcctgggcgcggggacagcggccattctctcattcttattaagacctcagtatccaacactcaagtgttttgcttattcgccaccgggcgggcttctcagcgaggacgctatggaatactcaaaagagttcgtgacagcagttgtccttggcaaagacctggtgcctcggatcggactttcccagctggagggctttcgccggcagttgctggacgttctccagcgctcgacaaagcctaagtggagaattatcgtaggtgcaactaaatgtatcccaaagagtgaactgcccgaagaagttgaggtcaccaccctcgcctccaccagactctggacccatccgtccgatctaacaattgcccttagcgcctcaacacctttgtacccacccggacgtatcatccatgtggtccataatcaccccgccgagcagtgctgctgttgcgaacaggaggagccaacttattttgccatctggggcgacaacaaagcatttaacgaggtgattatctctccggcaatgctgcatgagcacctgccatacgtcgtcatggaaggactgaacaaagtgcttgagaactataacaaaggcaaaaccgcactgctgagcgctgccaaagtgatggtctcacccaccgaggtggaccttactccggagctaatttttcaacaacagcccctcccgactgggcctcctatgcctactgggctcgccctcgaactgcccaccgctgaccaccgtaacagcagcgtacgaagcaaatctcaatcggagatgagtttggagggcttttctgagggcaggctgctgagtcccgtggtcgctgcagcagcgcgacaagaccctgtcgagctcttactactgtctacgcaggaacgcctggcggccgaacttcaggcaagacgggctcctctggccaccatggaatctctatccgataccgagagtctttactccttcgactctagaaggtctagcgggttcaggagtattaggggcagcccaagcctgcacgcagtgctggaacgcgatgaaggacatctcttctatattgatcccgcgattcccgaggaaaatccatcgctgtcctctaggactgagctcctggcagccgactctctttccaaacatagccaggacacgcagccactagaagctgccctgggttcgggaggggtcaccccggagaggccaccatctgccgcagcgaacgacgaagaagaggaggtgggcggtggaggcggcggccccgctagccgcggagagctggctctgcataatggaaggctgggcgactctccatctccgcaggtactggagtttgccgagttcattgacagcctgttcaacctcgactccaaatcctcgtctttccaagacctgtactgcatggtggtcccagaatccccgacttccgattatgctgaaggtcctaaatcccccagtcagcaggagattcttctgagggcccagttcgaacccaacctggtcccaaaacctcctagactgttcgctggctcagccgacccttcaagcgggatcagtctgagtccgagcttccccctgtcaagcagcggcgagctcatggatctgacgccaacaggactgtcatctcaggagtgccttgctgcagataaaatccgcacaagtactcctaccggacacggtgccagccccgctaagcaggatgagttggttatctcagcccgttag

SEQ ID NO: 185311 - DNA, 2019 bp, synthetic construct
  misc_feature 1..2019: note = Description of Artificial Sequence: Synthetic coding sequence
  source 1..2019: mol_type = other DNA
atgcccggcatggtgctgttcggccggcggtgggccatcgccagcgacgacctcgttttcccaggcttttttgaactggtggtgagggttctgtggtggattggcatcctcacactatacttgatgcaccgaggtaaactggactgcgccgggggcgccctgctcagctcctatttgattgtactgatgatcctgctcgctgtcgtgatttgcaccgtgtcggccataatgtgcgtgtcaatgagaggcactatctgcaatcccggcccccggaagagtatgagcaaactactgtacatccgcctggccctgttctttccagagatggtgtgggcaagcctgggcgccgcctgggtcgctgacggcgtgcagtgcgacagaactgtggtcaacggcatcattgccacagtggtcgtctcttggattatcatagccgccaccgtcgtcagcatcataatcgtgttcgatcctctgggcggcaagatggcaccttactccagcgctggtcccagccacctggactcacatgattcttcgcaattgctgaacgggctcaaaactgctgctacatccgtgtgggagactcgaataaaactgctctgttgctgcatagggaaagatgaccataccagagtcgccttcagctccactgccgaacttttttccacctactttagtgatacggacttagttccttcagatatcgctgctggactagcactcctgcaccagcagcaggataacatcagaaacaaccaggaacctgcacaggttgtttgccatgctcccggatcctcacaggaagctgatcttgatgcagagctggagaattgccaccactacatgcagtttgcagcggccgcttacggatggccattgtacatctatagaaatcccctgactggcctgtgtcggattggtggcgactgttgtaggtcaaggacaacagactacgatctggtcggtggcgatcaactgaattgccacttcggtagcatcctgcacaccactgggctacagtatagagacttcatacatgtaagtttccatgacaaagtgtatgagctgcccttccttgttgccctcgaccatcgaaaagagtccgtggtggtggccgtgaggggcaccatgagcctgcaggacgtcctgaccgatctctccgcggagtctgaagttctggacgtggaatgtgaggtgcaggatcgtctggcccacaagggaatttcgcaagccgcccgctacgtctatcagaggctgatcaacgacgggatcctgtcccaagccttctccatagctcccgaatatcgcctggtcatcgttgggcattccctcggaggaggcgcggccgctttacttgccactatgttgcgagctgcataccctcaggtgcgctgctatgccttttcccccccaagaggcctgtggagcaaagccctccaggaatattcacagtcattcattgttagcttggttctgggcaaagatgttataccacggctgagtgtcaccaatctggaggacctgaagagaaggattctcagggtcgtggctcattgcaacaagcctaaatacaaaatcctgctgcacggcctgtggtacgagctgttcggcggaaatccaaacaatctgccgacagaactggatggtggcgatcaggaagtgttgacccaaccactgctcggagaacaatcgttgctcacccgctggtcaccagcctacagtttctccagcgatagcccgctcgacagctcccccaagtatcctcctctgtatcctcctggtagaataattcacctgcaggaggagggggcatctggacgatttggttgctgtagcgcagcccattatagcgctaaatggagccatgaggctgagttctccaagattctgatcggaccaaagatgctgactgatcacatgcccgacatcctcatgcgcgccctggattctgtcgtctctgatcgtgctgcctgcgtttcctgtccagcccaaggcgtgtctagtgtggacgtggcatag

SEQ ID NO: 185312 - DNA, 663 bp, synthetic construct
  misc_feature 1..663: note = Description of Artificial Sequence: Synthetic coding sequence
  source 1..663: mol_type = other DNA
atgtactgcgtgagccaccacgtgtgccagcacgagcggacccagatttggtgccctgcgaccttgcggcgagctagtccctgcttcatctccaatcgcactatctccggaaccaccaaatctttgccccggtggagcgctatgccccagggcgctccgagctgtaggtcccgaactaccgattatgacttggttggaggcgatcagctaaactgccactttgggtcaatccttcacactaccggcctgcagtatagagacttcatccatgtaagcttccacgataaagtgtatgagctgccgttccttgtggccctggatcaccgaaaagagtcagtggtagtcgccgtccgaggcactatgtcacttcaggacgtgctgactgatctcagcgccgagagcgaagtgctggatgtggagtgcgaagtacaggaccgcctggcccacaagggaatctctcaggctgcgcgctacgtttatcagcggctgattaacgacgggattctgtctcaagctttttcaattgctcccgagtacagattagtaatcgttggtcatagtctgggcgggggtgccgccgctctcctcgctactatgctgcgtgccgcctacccccaggtgaggtgttatgcattctcaccgcctcgtgggctctggagatag

SEQ ID NO: 185313 - DNA, 1140 bp, synthetic construct
  misc_feature 1..1140: note = Description of Artificial Sequence: Synthetic coding sequence
  source 1..1140: mol_type = other DNA
atgtactgcgtgagccaccacgtgtgccagcacgagagctggatcataatagccgctactgtcgtgtcaatcattatcgtgttcgaccccctgggcggtaagatggcaccctattccagcgctggccccagccatctggatagccatgattctagccagctgctgaacggactgaagaccgccgccacaagtgtctgggagaccaggatcaagttactctgctgttgcattggcaaggacgatcacacgagggtcgcattttcttccaccgccgagctgttcagtacctacttttctgatactgatctggtaccatctgacatcgccgcaggcctggccctgctccaccagcagcaggacaatatccgtaataatcaagagcccgctcaagtggtgtgtcacgcccccggtagcagccaggaagctgacctggatgcagagcttgaaaactgtcaccattatatgcagttcgcagcggccgcttatgggtggccactttatatctacagaaaccccctcacgggactgtgtagaatcggcggcgattgttgcaggagcagaaccaccgattacgatctggttggcggagaccagctgaattgccactttggttccattctccacactacaggcctgcagtaccgcgacttcatacacgtaagctttcatgataaggtgtatgagctccctttcctggtggcactggatcacaggaaggaatctgtagtcgtcgcagtgcgtggaacgatgtcactgcaggatgtcctgactgacctgagcgccgagagcgaggtgttagacgtggagtgtgaggtgcaggataggctggcccacaagggcatctcccaagccgctcggtatgtctaccaaaggctcatcaatgatgggattcttagccaggccttctcaatcgcaccagagtaccgcctggtgatcgttggacacagtttgggcggcggcgccgccgcgcttctcgccaccatgctccgtgccgcatacccacagcagtcatcggcaggaattttttcggagctgcatagggtcaccagaccaggagaaggctgtgattcacaggcccagtgcgaccagctaggtagaagtgaagagaaaaacctggccagcgggagagcactgcaatag

SEQ ID NO: 185314 - DNA, 804 bp, synthetic construct
  misc_feature 1..804: note = Description of Artificial Sequence: Synthetic coding sequence
  source 1..804: mol_type = other DNA
atgcccggcatggtgctgttcggccggcggtgggccatcgccagcgacgacctcgtgttccccggcttctttgaactggtcgtgagggtactgtggtggattgggatccttaccctgtacttaatgcatcggggaaaactcgactgcgcaggaggggccctcctgtcaagctacctaatcgttctaatgattcttctggccgtagtgatctgcaccgtgagtgctattatgtgcgtaagcatgcgtggaacaatctgcaatccgggccccagaaagtcgatgtccaagctgctatacatccgcttggctctcttcttcccggaaatggtatgggcctcattgggtgcagcctgggttgctgacggcgtccaatgtgataggacagttgtgaatggcattattgcaacagtcgtggtgtcatggattatcattgctgctacagtggtatctattataatcgtcttcgatcccctcggggggaagatggcaccatactcaagcgccgggcctagccacctcgattctcacgatagctcccagctgctcaacggactgaagacagctgccacatccgtttgggagacacggattaaacttctctgctgctgcatcgggaaagacgatcataccagggtagcattttcttcgacggccgagctgttttcaacttatttttctgataccgatttggtaccatctgatatcgctgctggccttgccctgctgcaccaacagcaagacaatacaagggccaccggcaactgtccccgtaacgacgggctgactctgctgtccctaaattag

SEQ ID NO: 185315 - DNA, 1467 bp, synthetic construct
  misc_feature 1..1467: note = Description of Artificial Sequence: Synthetic coding sequence
  source 1..1467: mol_type = other DNA
atgggcgaccggggcagcagccggcggcggcggaccggcagccggccctcctctcatgggggtgggggccccgcggcggccgaagaagaagtgagggatgctgctgcagggcccgatgtcggagccgccggagatgctcccgctccagctcccaacaaggacggcgacgcaggcgtcggcagtgggcattgggagctccgttgccatcgattacaggattccctcttttccagcgattctggcttctcaaactatcgtggcatcctgaattggtgcgtcgttatgctcattttgtccaacgcccggctcttcctggagaacctgattaaatacgggatcctggtagaccccatccaagttgtgtctctctttttaaaggatccttactcctggccagcgccctgccttgttatagcggcaaacgtgttcgcggtagcggcctttcaagtggaaaagcgtctggccgtaggtgcgcttaccgaacaggcagggctgctgctgcacgtggcaaatctggccaccatactgtgcttccctgctgctgtcgtgttattagtcgaaagcataacccccgtggggtctctcttggcactaatggctcataccattctcttcctaaagctcttttcttaccgtgatgtgaactcctggtgtagacgcgctcgagccaaagctgcatcggccggaaagaaggctagctctgccgcggccccacacactgttagctaccccgacaacctgacataccgagatctgtactactttctgtttgcaccaacgctgtgctatgagctgaattttcctcggagcccccggatccgtaagcgatttctgctgcggcggattttagagatgttgttcttcacacagctgcaggtgggcttaatccagcaatggatggtgcctaccatccagaatagcatgaagcccttcaaggatatggactactcgagaattatagagcgactattgaaattagcggtcccgaatcatctgatttggctgatcttcttttactggctcttccactcttgccttaatgcggtcgccgaactaatgcagtttggcgacagagagttttatcgggattggtggaactcagaaagcgtgacctatttctggcagaactggaacatccctgtgcataaatggtgcataaggcacttctacaaaccaatgctccggcggggtagctcaaagtggatggctcggaccggagtgttcctggccagcgcgtttttccacgaatatttagtgagcgtgccccttaggatgtttagactgtgggccttcacaggtatgatggcgcagatccccctggcatggttcgtgggcaggtttttccagggcaactacggcaatgccgccgtgtggctaagccttatcatcggccaacccattgcagtgttgatgtacgtacatgactactatgtgcttaactatgaagcgccagccgctgaggcttag

SEQ ID NO: 185316 - DNA, 282 bp, synthetic construct
  misc_feature 1..282: note = Description of Artificial Sequence: Synthetic coding sequence
  source 1..282: mol_type = other DNA
atgaagctgctgatggtgctgatgctggccgccctgagccagcactgctatgccgggtctgggtgcccacttctcgaaaatgttatctcaaagaccatcaaccctcaggtttcaaagactgaatacaaagagctgctacaagaatttatcgatgacaacgcaactacgaacgctatcgatgaactgaaggaatgcttcctgaatcaaaccgacgaaacacttagcaacgtcgaggtctttatgcagctgatctacgattcttctctgtgcgacctgttctag

SEQ ID NO: 185317 - DNA, 1038 bp, synthetic construct
  misc_feature 1..1038: note = Description of Artificial Sequence: Synthetic coding sequence
  source 1..1038: mol_type = other DNA
atgaagaccctgatcgccgcctacagcggcgtgctgcggggcgagcgacaggccgaggccgatcgctctcaaaggtcccatggaggtcccgcactaagccgggagggatccggccgttggggcgtggcatgctccgctatccttatgtatatcttttgcactgattgctggctcattgccgtgctgtatttcacctggctcgtgttcgattggaatacgcccaaaaaaggtggaagaagatcccaatgggtgcgcaactgggccgtatggcgctactttagagactattttccgatacagctcgttaagactcataacctcctaacgacacggaattatatctttggttaccatccacacggaattatgggactgggtgcattttgcaatttcagcacagaagcaacagaagtgagtaagaaattccccggcattagaccctatctagctacgctcgctgggaactttaggatgccggtgttacgggagtatctgatgagcggcggcatttgtccagtgagccgcgacaccattgattatcttctttcgaagaacggatctggaaatgcaattattattgtagttggcggtgccgctgagagtctctcatcaatgccaggcaagaacgccgtgactctgcgaaatagaaaagggttcgtcaaactcgcgctgagacacggtgcagacttggtccccatctattcttttggcgaaaatgaggtgtacaaacaggtgatctttgaggagggttcctgggggaggtgggtgcaaaagaagttccagaaatacatcggtttcgcgccatgcatatttcacggaagaggattgttctcatctgacacgtggggtcttgtgccttattctaaacccattacaacagtagtaggtgaacccattaccatccctaagcttgagcaccctactcaacaggacattgacttgtatcacactatgtatatggaggcactggtcaaactatttgacaaacacaagacaaaattcggtctgcccgaaactgaggtacttgaagtaaactag

SEQ ID NO: 185318 - DNA, 3306 bp, synthetic construct
  misc_feature 1..3306: note = Description of Artificial Sequence: Synthetic coding sequence
  source 1..3306: mol_type = other DNA
atggagcagcccggcgccgccgccagcggcgccggcggcggcagcgaagagccaggcggcggccgctccaataagcgctcagctggcaacagggcagccaacgaggaggagactaagaacaaaccaaagcttaacatacagattaagactttggccgatgacgttcgagaccggatcactagtttccgcaagtctacagtgaaaaaagaaaagccacttattcagcacccaattgacagtcaggtggctatgtctgaatttcctgccgcacagcctttgtatgatgaaaggtccctcaacctttccgaaaaagaggtactggacctgtttgagaagatgatggaggatatgaatctgaacgaggaaaagaaggcaccattgcgcaacaaggacttcaccacgaaacgcgaaatggtcgtccaatatatcagcgccactgcgaagagtggtggacttaagaacagcaaacacgagtgtaccctttcgtctcaggagtacgtgcatgaattgaggagcgggatcagtgatgaaaagcttctcaattgtttggagagtttgagagtgagtctgacctctaatcctgtcagttgggtcaacaattttggccacgaaggcttgggcttacttctggatgagctggagaaactgctggacaaaaagcagcaggagaatattgataagaaaaaccagtataaactaattcagtgtttaaaggccttcatgaacaacaagtttggactgcagcggatactgggtgatgaacgctcgctgctgcttctggctagagccatcgaccccaaacagcctaatatgatgaccgagattgtgaaaattctgtccgctatttgtattgtaggagaggagaacattctcgataagctgttgggtgctataacgacggctgcagagcgtaacaatcgggagaggtttagccccatcgtggagggcctggagaaccaggaggccctccaactccaagtcgcttgtatgcaattcattaatgctttggttacatctccatacgaattagactttcggatacatctgcgcaacgaattcctcaggtccggcctcaagacgatgttgcctgatctgaaggagaaggaaaatgatgaacttgacatacagttgaaggttttcgatgagaataaagaagacgacttgaccgagctatcgcacagattgaatgacataagagccgagatggacgacatgaatgaggtgtatcacctcctgtacaacatgctcaaagatacagctgcggagaattacttcctgtccatattgcaacactttctcctgatccgcaatgattattacatcagaccccagtattacaagatcatcgaagagtgcgtgagccaaatcgtgctgcattgctctgggatggatcctgactttaagtaccgtcagcggttagatattgaccttacccatttaattgactcctgtgtgaataaggccaaagttgaagagagcgagcaaaaggccgcagaattcagcaagaagttcgatgaggagttcactgcacgccaagaggcccaagccgagttgcaaaaacgcgacgagaagatcaaggaactcgaggccgaaattcagcagttgagaacccaagcgcaagtgcttagcagctcatcaggcattccgggacccccagccgctcccccactgccgggagtggggccgcctcctcctccccctgcgccacctctgcccggaggagcccctctgccaccgccccctccaccactgcccgggatgatggggataccgcctccccccccccctcccctgctgttcggaggtccgcctccaccaccacctctgggcggcgtgcccccaccgcccggaatctcactcaacctgccttacggcatgaaacagaaaaagatgtacaaacctgaagtaagcatgaagagaatcaattggtctaaaatcgaacccacggagttgagcgaaaactgcttttggctgcgcgtcaaagaagataaattcgaaaaccccgacctttttgccaaactggctcttaacttcgcaacccagatcaaagtacagaaaaacgccgaggcgcttgaagaaaaaaagacaggtcctactaagaagaaagtgaaagagctgcgcatcctggatcccaagacggctcaaaatctgtcaatcttcttgggctcctaccgcatgccatacgaagatatccggaacgtgattcttgaggtgaacgaagatatgctatccgaagcacttatacagaacctggtgaagcatcttcccgagcaaaaaatactgaacgaactggcagaactgaagaatgagtacgatgacctgtgtgaacccgagcaattcggagtcgtgatgagctcagtgaaaatgctgcagcctcgtcttagctccatattattcaagctgacgtttgaggaacacatcaacaacatcaagccatccattatcgctgtcacccttgcatgcgaggagctgaaaaaatccgagtcctttaaccgtctcttggagttagtgctactggtgggaaactatatgaatagtgggtcgcgtaatgcacagagcctggggtttaagatcaatttcctttgtaagattagggacactaaaagcgcagatcagaaaaccacacttttgcactttattgccgatatctgtgaagagaaatatagggacatcttaaagtttccagaggagctggaacacgttgagtcagcaagtaaggtgagcgctcagatactcaaaagcaacctggcatccatggagcagcaaatcgtgcacctagagcgcgacattaagaaattcccacaggcagagaatcaacacgataaatttgtggaaaaaatgactagcttcaccaaaacagctagggagcagtacgaaaagctgagcactatgcataataacatgatgaaactatacgaaaacctcggtgaatacttcattttcgattccaagacggtaagcattgaagagttctttggagatctgaacaattttcgcacattatttctggaggccgtgagggagaacaataaacgccgggagatggaggagaaaactcggcgggctaagttggcgaaagaaaaggccgaacaggaaaaactggagcggcaaaaaaagaagaaacagctcattgatatcaataaggaaggggatgagaccggggttatggacaatctgcttgaagccttacaatcaggagctgcatttcgggaccggagaaagaggatccctcgcaatcccgacaaccgccgggttccccttgaaaggagccgaagtcgccataatggagccatctcatcgaagtag

SEQ ID NO: 185319 - DNA, 3291 bp, synthetic construct
  misc_feature 1..3291: note = Description of Artificial Sequence: Synthetic coding sequence
  source 1..3291: mol_type = other DNA
atggagcagcccggcgccgccgccagcggcgccggcggcggcagcgaagaacctgggggtggacggtcaaacaagagaagcgccggcaatcgcgcagcaaacgaggaggagactaaaaataagcccaagttgaacatacagattaagactctcgctgatgatgtccgcgacagaatcaccagtttcagaaaaagcaccgtcaagaaggagaagccattaatacagcatcctatcgattcccaggttgccatgtccgagtttcccgctgctcagcctctgtacgacgagcggtcactgaacctaagcgagaaagaggtgttggacctctttgagaaaatgatggaggacatgaacttgaatgaggaaaagaaagctccactaagaaacaaggactttacaaccaagcgcgagatggttgtacagtacattagtgcaacagccaaaagcggagggttgaaaaattctaagcacgaatgtactctgagttctcaggagtatgttcacgagctacgtagcggcatatcagatgagaagttgttaaattgtctcgaatccttgagggtgtcgctcaccagcaaccccgtcagttgggtgaacaactttggacatgaaggcctggggttgcttctggacgagctcgaaaagctgctggacaagaagcagcaggagaatattgataagaagaaccagtataagctcatccaatgtctgaaagccttcatgaataacaaattcggactgcaacgtattttgggagatgagaggagcctgcttctattggctcgcgccatcgaccccaagcagcccaatatgatgaccgaaatcgtcaaaattctcagtgcaatatgtattgtcggggaggaaaacatcctcgacaagttgctgggagcgatcaccacggctgccgaaaggaataatagagagcgcttttcccccattgtagagggtcttgagaatcaagaagccctccagctgcaggtggcttgcatgcagttcattaacgctctggtaacttccccctatgagctagacttcaggattcacctcaggaatgagttccttcgtagcgggctgaagacaatgctgcctgatctgaaggaaaaggagaacgacgagttagatattcagctgaaggtatttgacgagaataaggaagacgatttgaccgaattgtctcaccgtctgaacgatatcagggccgaaatggacgatatgaacgaagtgtatcaccttctctacaatatgctgaaggacacagctgctgagaattacttcctgtctatcctgcagcatttcctgctaatccgcaatgattactacatcagaccccaatattataagatcattgaggaatgtgtctcccaaatcgttctgcactgctcaggcatggatccagacttcaaatatcggcagcgcctggacatcgatctcacccaccttatcgactcatgcgttaataaagcaaaggtggaggagtccgagcagaaggctgcggaattctcaaagaagtttgatgaagaattcaccgccagacaagaggcccaggccgagctgcagaagagggatgagaaaataaaagaactcgaggcagagattcaacagttacggacccaggcccaggtacttagtagcagcagtggcatccctggcccacccgcagccccccctctgcccggtgttggtcccccccctcctcctcccgctcctccactaccagggggcgcacctctacctcctcccccaccaccattaccgggtatgatgggcattcccccccctccaccaccaccccttctgtttggagggcctcctccgcccccacccctcgggggcgttccaccacctccaggtattagcctaaacctgccttacggaatgaagcagaaaaaaatgtacaagccagaggttagtatgaaacgtatcaattggtccaaaattgagcctacagagcttagtgagaactgcttctggcttcgggttaaagaggataaatttgaaaaccccgatctatttgcgaaactggctttaaactttgcaacccagatcaaagtccaaaaaaatgccgaggctctcgaggagaagaagacaggtcccaccaagaagaaggtaaaggagctcagaatccttgatccaaaaactgcgcagaatctgagcatctttctcggctcctatcgaatgccgtatgaagacatcagaaacgtgatactggaagtaaatgaagatatgttgtcagaggccttgatccaaaacctggtgaagcacctaccggaacagaagatcttaaatgaattagctgagctcaagaatgagtatgacgatctgtgtgagccagagcagttcggagtcgtgatgtcttccgttaagatgttgcaaccccggctgagttctatcttatttaaactgacgttcgaggaacatatcaacaacattaagcccagcatcatcgcggtgaccctggcatgcgaagaactcaagaagtccgagtcattcaatcggctccttgagctcgttctcctcgtcggaaactacatgaacagcggctcaaggaacgctcaaagtctaggatttaagatcaacttcctttgtaaaatcagggacacgaaaagtgccgatcagaagaccactctgttgcactttatcgccgacatctgcgaggagaaataccgggacatcctcaagttccctgaggagctggaacatgtagagagcgcttccaaggtgtcggctcagatattgaagtccaacctggcctctatggagcagcaaatagtgcacctagagcgagacatcaagaagttccctcaagcagagaaccagcacgataaattcgtggagaaaatgaccatcttcactaaaacagccagagagcagtatgagaagctcagcaccatgcataacaacatgatgaaactatacgagaatctaggtgagtatttcatctttgactctaaaaccgtctcaatcgaggaattcttcggcgacctgaataactttagaacgttgttcctggaggccgtgagggaaaataacaagcgcagagagatggaagagaaaacaagaagagctaaactagcaaaggaaaaggcagagcaggaaaagctggagcgacagaagaaaaagaagcagctcatcgatattaacaaggaaggggacgagacgggggtgatggataatttattggaggcgctacagtcaggggctgcctttcgggacagaagaaagcggatcccccgaaaccccgtggttaaccacccatgtgccactcgggctaaccccagaagcgccacatag

SEQ ID NO: 185320 - DNA, 3291 bp, synthetic construct
  misc_feature 1..3291: note = Description of Artificial Sequence: Synthetic coding sequence
  source 1..3291: mol_type = other DNA
atggagcagcccggcgccgccgccagcggcgccggcggcggcagcgaggaaccaggcggcggccgatccaataaaagaagcgcgggcaatcgcgcggccaacgaggaagagaccaaaaacaaacccaaactgaacatacagatcaagaccctggccgatgacgtgagggatcgcatcacgagtttcaggaagagcaccgtgaaaaaagagaaaccgctgatacagcatcccatcgattcacaagtagcaatgtccgagttccccgcagcccagccattatatgacgaacggtctttgaacctgtctgaaaaagaggtcctcgatttgtttgaaaagatgatggaagatatgaatctgaatgaggagaagaaggctcccctgcgaaacaaagacttcacgacgaaaagggagatggtggtgcagtatatttcagcaacagctaagagcggcgggctcaagaactcaaagcatgagtgcactttatcctctcaggaatacgtgcacgagctgcggagtgggatctccgatgaaaagcttctgaactgtctagagtcccttcgcgtgtccctaacttctaaccccgtgtcctgggtcaataactttgggcatgaggggttgggcctcctgctggatgagctggagaaactcctcgacaagaaacagcaggagaacattgacaagaagaaccaatacaaacttatccagtgcctgaaggccttcatgaacaacaaatttggcttgcagcgcatactaggcgacgaacggagtctgctcctcctagcaagggccatcgacccaaaacagccaaacatgatgaccgaaatcgttaaaatcctgtctgcaatctgtattgtgggcgaagaaaacatactagataaactgctgggggcaatcacaaccgcagccgagcggaataatcgggagcggttctcccccatagtcgaggggctggagaatcaggaggcattacagctgcaagtcgcatgcatgcaattcatcaatgctttggtgacatccccatacgagctagacttccgcatccatctgcgcaacgagtttctgcgttcaggactgaaaactatgctgcctgatctcaaagagaaggaaaacgacgagctggatatccaacttaaggtctttgatgagaacaaagaggatgacctgacagagctgagtcatcgcctgaacgacatcagggcggagatggatgatatgaacgaagtgtaccacttgctgtataacatgcttaaggacaccgccgcagagaattacttcttatcaatcctgcagcacttcttgctgattcgcaacgactactatattagaccacagtactacaagattatcgaggaatgcgtgtcccagatagtcctgcattgtagtggcatggaccctgattttaagtaccgacagaggcttgatatcgatctgacacatctgattgatagctgcgtgaacaaagccaaggttgaggagagtgagcagaaagcagcagaattctcaaaaaagtttgacgaggaattcacagccagacaggaggcacaggctgaactccagaagcgcgatgaaaaaatcaaagagctcgaagcggaaattcaacaacttagaacccaggcacaggtactttcatccagcagtgggatcccagggcccccagccgccccgcccctgcccggggttgggccccccccgccaccccccgccccacccctgcccggtggggccccactccctcccccacccccacctctgcctgggatgatgggcatccctccccctccacccccaccactcttatttggcggcccccctccccctcctcccttagggggggtgccaccccctcccggtatatcccttaatctgccatatggcatgaagcagaagaaaatgtacaaacccgaggtgtccatgaaaagaataaattggtctaagattgagcctactgagctgtccgagaactgtttttggctccgcgtcaaggaagataagtttgaaaaccctgatttgttcgcaaaacttgccctgaattttgcaactcagatcaaagtgcagaagaatgctgaggcactggaggagaaaaagacagggcctactaaaaagaaggtcaaagaactgcgcattttggatcccaagacggcacagaacctgtccatctttctgggatcctacagaatgccatacgaggacatccggaatgtaatcttggaggttaacgaggacatgttgagcgaggccctcatacaaaatttggtcaagcatctgcccgagcaaaaaatcctgaatgaactcgcagaattgaagaatgaatatgacgatctgtgcgagcctgagcagtttggcgtggtgatgtctagcgtgaaaatgctgcaaccacgcctttcttctattctgtttaagctgacgtttgaagaacacatcaacaacattaaaccctccattatcgccgtgacccttgcgtgcgaagagctgaaaaagtcagaaagcttcaatcgcctcctggaactggttctgttagttggaaattatatgaacagtgggtctcgcaatgcacagagtttagggttcaagatcaattttctctgtaagattagagacacaaagtcggccgaccagaaaacaaccttacttcacttcatagctgacatctgtgaggaaaaatatcgcgatatactgaaattccctgaggaattagagcacgtagagtccgcctctaaagtatcagcacaaatcctcaagtcaaatctagctagcatggaacagcaaatagttcaccttgagagagacataaaaaaatttcctcaggccgaaaaccagcacgacaagttcgtggagaaaatgacatcattcactaaaaccgcacgggagcaatatgaaaagctgagtacaatgcacaataacatgatgaagctgtatgaaaatctgggcgagtatttcattttcgattcaaagactgtatcaattgaagagttctttggagatctgaataattttcgaacgctgttcttggaagctgtgcgggagaataacaagcgacgtgagatggaagagaagacacggcgtgccaagttagcaaaagaaaaggctgaacaggaaaaactcgagaggcaaaagaagaagaaacagcttatagatataaacaaagagggagacgagaccggggtaatggacaatctactggaggccctgcaaagcggggccgctttcagagaccgcaggaagcggatcccaaggaatcccgttgtgaatcacccatgcgccactcgagccaatcctcgctccgcaacctag

SEQ ID NO: 185321 - DNA, 3294 bp, synthetic construct
  misc_feature 1..3294: note = Description of Artificial Sequence: Synthetic coding sequence
  source 1..3294: mol_type = other DNA
atggagcagcccggcgccgccgccagcggcgccggcggcggcagcgaggagcctggcggtggaaggtccaacaaaagatcagcagggaacagagcggcaaatgaagaggagaccaagaataaaccaaagctacgagatcgaattacctcatttcgtaaatccacagtgaagaaggagaaaccccttattcaacaccctattgattcccaagtggctatgtcagaatttcctgccgcacagcccctgtacgacgagaggtcccttaacctcagcgaaaaggaagttctcgatctgtttgagaagatgatggaggatatgaatctgaacgaggaaaagaaagcacctttgcggaacaaggactttactacaaagagagagatggtcgtccagtatataagcgcaacagccaaaagtgtaataagctctcatatcaagggtgggcttaagaatagcaaacatgagtgcacactctcgagccaggagtacgtgcacgagctgagatcggggattagcgacgaaaaactgctgaactgcctggaaagcctgcgggtaagtctgactagcaacccggtatcttgggttaataacttcggacacgagggactgggcctcctgcttgacgagcttgagaagttgctcgacaaaaagcaacaagaaaacattgataaaaaaaaccagtacaaactgatccagtgcttaaaggcatttatgaataataaattcggactacaacgcatcctgggagacgagcggtcactgctcctgctggccagggctatcgatcctaaacagcctaacatgatgactgagatcgtgaaaatattgagcgcaatctgcattgtgggggaagagaacatactggacaagttgcttggcgccataacaactgctgccgaacgcaataatcgggaaagattttccccaatcgtggagggcctggagaaccaggaagctttacagttgcaggttgcttgtatgcagtttataaacgcgttggtcacctctccctatgaactggattttaggatacatttacggaatgagtttttaaggtccggtctgaagaccatgctccccgacctcaaagaaaaggaaaacgatgagcttgatatacagcttaaagtgtttgacgagaataaggaagacgacttgacagaacttagtcatcggctgaatgacatcagagcggagatggatgacatgaacgaggtctatcacctgctgtacaatatgcttaaagacaccgctgcagagaactacttcctgtctattctgcagcacttcctcctaattcggaatgattattatatccgcccacaatactataaaatcatagaagagtgtgtgagccagattgtgcttcattgttccggcatggatccagacttcaagtaccgccagcgactggacatagatttaacccatctgatcgactcatgcgtaaataaggccaaagtggaagaaagcgagcagaaggcagccgaattctcaaaaaagtttgacgaagaatttaccgcgcgacaggaagctcaggctgaactgcagaaacgtgatgagaaaattaaagaacttgaagcagagattcaacagcttcgaactcaagctcaggtgctgagctcgtccagcgggattccgggccctcccgccgccccgccactcccgggtgtggggcccccccctcccccccccgccccccccttacctgggggcgctccccttcccccgcccccaccaccactgcctggaatgatgggaatcccgccaccgccaccccccccacttttgtttggggggcctccaccaccccccccactgggaggcgtgcctccaccgcctggcataagccttaacctgccttacggtatgaagcagaagaagatgtataagcccgaagtctctatgaaacgaattaattggtctaagatcgaaccaactgagctcagcgagaattgtttctggctgagagtcaaggaagacaaatttgaaaaccctgatctgtttgccaagcttgccctaaactttgcgacacaaatcaaggtgcagaagaacgccgaggcactggaagagaagaagactggcccaaccaaaaagaaagtcaaggaactgcgaatcttggatcccaagacagcccagaacctttctatatttctcggctcctacagaatgccttatgaggacatccgcaatgtaatcctggaggtgaacgaggatatgctgtcggaggctctgattcagaatctggtcaagcacctccccgaacagaaaattctcaacgagctggccgagctgaaaaatgaatatgacgatctgtgcgaacctgagcagttcggggttgtgatgtctagcgtaaagatgcttcaaccaagattgagctctatcctttttaagttaacatttgaagaacatatcaacaacatcaagccatccatcatcgccgttaccctggcgtgtgaggaactgaagaagtctgagagtttcaataggctgctggagctggtgctgctggtgggaaactacatgaatagcggctcccggaacgcacagagcctggggttcaagattaattttctttgcaaaatccgagacaccaagagcgccgaccaaaagacaacccttctgcacttcattgcagatatttgtgaggagaagtatagagacatcctaaagtttcctgaggaattggaacacgttgaaagtgcttcaaaagttagtgctcagattttaaagtctaatcttgcttctatggaacagcagatcgtgcatttggagagagatattaaaaaatttccccaagccgagaaccagcacgacaaattcgtcgagaagatgactatctttacaaagactgctagagagcagtatgagaagctctctacaatgcataataacatgatgaaattatatgaaaatttaggagagtactttatcttcgattccaaaacggtttctatagaggagttcttcggggatctgaataattttagaactcttttcctagaggctgtgcgggagaacaataaaagacgcgaaatggaggagaagacccggcgggcgaagctggccaaagagaaggccgagcaggagaaactggagcggcaaaaaaagaagaaacagctaattgatataaacaaagagggcgatgaaaccggtgtcatggacaatctgctggaggctcttcagtctggggccgcattcagagaccggcgtaaaaggattcctcgaaatccagacaaccgtcgagtgccccttgagcgtagtaggtctcgtcacaacggtgcgataagcagtaagtag

SEQ ID NO: 185322 - DNA, 3306 bp, synthetic construct
  misc_feature 1..3306: note = Description of Artificial Sequence: Synthetic coding sequence
  source 1..3306: mol_type = other DNA
atggagcagcccggcgccgccgccagcggcgccggcggcggcagcgaagaaccaggaggtggacggtctaataagaggtctgccggaaacagggcagctaacgaggaagagaccaagaacaagcctaagctgaacattcaaatcaagactcttgcggatgacgttagagacaggatcacaagttttaggaagtcaacagtcaaaaaagagaagcccctcatccaacacccaattgactctcaagtcgcaatgtccgagtttccagctgcacagccactctatgatgaacgatcattgaacctcagcgaaaaagaggttttggatctgtttgagaagatgatggaagatatgaatctgaacgaggagaaaaaggctcctctgcgcaacaaagacttcactactaagcgagagatggtcgtccagtatatctctgctactgcgaagagtggaggactgaagaacagcaaacacgaatgtactttaagttctcaagagtatgtccatgagctgaggtccggcatctctgacgagaaattgctgaattgtctagagtcactgagggtcagtctgacttcaaatcctgtaagttgggttaacaatttcggccatgaaggactgggactgttgctggatgaactggagaaactgctcgacaagaagcagcaggaaaatatagataaaaaaaaccagtataaactgatccagtgtctcaaagcattcatgaacaataagtttggcctccagcgcatcttgggtgatgagcgtagtctattgttgttagcacgggccattgaccctaagcaaccaaacatgatgactgaaatcgtgaaaatactgtctgccatctgtattgtaggagaagagaacattttggataaacttcttggcgcaataaccaccgcagcagagcgcaataacagggaaaggttttcccctattgtggagggtttagagaaccaggaagcgttgcagctccaggttgcctgtatgcagttcatcaatgctctggtcactagcccctacgagttagatttccggattcacctgcgtaatgagttcctgcggtctggcctgaagacaatgcttccagatcttaaggaaaaagagaacgacgagttggatatacagctgaaggtgttcgatgaaaacaaagaggacgatttaacggagctgtctcacaggttaaacgatatcagggccgagatggatgatatgaatgaagtgtatcacttgctgtacaatatgctcaaggataccgctgcagaaaattacttcctgtcgattttgcagcactttctgctgatccgaaatgattattacatcaggccccagtattataaaattatcgaagagtgtgtctctcagatcgtcctccattgttccgggatggacccagatttcaagtatagacagaggctcgatattgacttaactcacctgatcgactcatgcgttaacaaggcaaaggtagaggagtcagagcagaaagctgctgagttttcaaaaaagtttgatgaggagtttaccgctcggcaggaggcccaggccgaattgcagaaaagggacgaaaagattaaggaactcgaagcagagatccagcaacttcgcacccaggcccaggtgctatcctcatcgagcggcattccggggcctcctgcggccccaccactgcctggagtggggcctcccccccctccccccgccccgcctctccccgggggcgcaccacttccccctcccccaccccccttgcctggaatgatgggcattcctccccctcctccccccccgctcctgttcggaggcccccccccccctcccccgttgggcggtgtccctcccccgccgggcatcagtctgaacctaccgtatgggatgaaacaaaagaagatgtataaacccgaggtgtctatgaaacgtatcaattggtccaagatcgaaccaacggaactgtcagagaattgtttttggctgcgagtgaaagaggataagtttgagaatcccgacttgtttgctaaactggctctaaactttgccacccaaataaaggttcagaagaatgcggaagcactggaggagaaaaagaccgggcctaccaaaaagaaagtgaaagaactgcgtattttggatcctaagacagctcagaacctgtctatatttctaggctcttatcggatgccttacgaggatatcagaaatgtgattttagaagtgaatgaagacatgttgagtgaggcattgatccaaaacctagtcaaacatttgcctgagcagaagattctaaacgagctggctgagctgaagaatgagtatgatgacctctgcgagcccgagcaatttggagtcgtaatgagcagcgtcaaaatgttgcaacctagattgtcttccattctcttcaagctcaccttcgaggaacatatcaataatattaaaccctcgatcatagctgtcaccctcgcctgtgaggagctgaaaaaaagcgaatcctttaatagacttctcgaattagtgctgcttgtcggaaattacatgaattcaggctctaggaacgcccaatccctgggcttcaagatcaacttcctttgcaagatccgggatactaaatcagccgaccagaagacaaccctccttcactttattgcggatatctgtgaagagaagtaccgcgacatattgaaatttcccgaggagttagagcatgttgagtcggcgtctaaggtcagtgcacagatcctgaagtccaacctcgctagtatggaacagcagatcgtgcatctggaaagagacataaagaaattcccacaagctgaaaaccaacatgacaaattcgtcgagaagatgaccatctttactaaaacagctagagaacagtatgaaaaactgtcaactatgcataataatatgatgaagttatacgagaacctgggggagtacttcatttttgactcaaagacagtgtcaatagaggagttcttcggggatttaaacaattttcgcacacttttcctggaagcggtcagagaaaacaacaaaaggagagagatggaagagaaaaccaggagggctaaactagccaaggaaaaggcggaacaagagaagctggagaggcaaaaaaagaaaaagcagttgattgatatcaataaggaaggagacgaaactggcgtgatggacaatctcctggaagcactccagagcggcgccgcttttagagaccgcaggaagcggattcctcgcaaccccgacaacaggcgcgtgcccttagagagaagccggtctcgtcacaatggggctatttcttccaaatag

SEQ ID NO: 185323 - DNA, 3312 bp, synthetic construct
  misc_feature 1..3312: note = Description of Artificial Sequence: Synthetic coding sequence
  source 1..3312: mol_type = other DNA
atggagcagcccggcgccgccgccagcggcgccggcggcggcagcgaggagcccgggggaggccgcagtaataaaagaagcgccggcaatagggctgccaatgaagaggaaacaaaaaacaagccaaagttaaacatccagattaagaccctggcagatgacgttagagacaggattacgtcctttagaaagagtacggtgaaaaaagaaaagcccttaattcagcacccaatagacagccaggtcgccatgagcgaattcccagctgcacagccactgtatgatgaacgctcactcaacttaagcgagaaagaagttcttgatctgtttgagaaaatgatggaagatatgaatctgaatgaggagaagaaggccccactgcggaacaaagatttcacgacaaagagagaaatggtggttcagtacatatctgctactgccaagtccatagttgggagcaaagttacaggaggcttgaaaaactcaaagcacgagtgcacactcagctcccaagagtacgtgcacgaacttcgctcgggaatctccgacgagaaactgctcaattgtctggaatctctgcgtgtttcgctcacttccaatccagtatcgtgggtgaacaatttcgggcacgaaggcctcggactgctcttggacgagttggagaagttgctggacaagaagcaacaggaaaatattgataagaagaatcagtacaaactgatccagtgcctgaaagcttttatgaataacaagttcggtctgcagaggatcttgggcgacgaaagaagccttctcctgctagcccgcgccatagacccgaaacagcctaatatgatgactgagatcgttaagatcctttccgcaatctgtatcgtcggcgaagaaaatattctcgacaaactgctcggggccatcacaacggccgctgaacggaacaacagagagaggttcagcccgattgtggagggcttagaaaatcaggaagccctgcagttgcaagtggcttgtatgcaatttataaacgccctagtaacctctccatatgagttggacttccggatacaccttaggaacgaatttctgcgttcaggcctcaaaacaatgcttccagacttgaaagagaaggagaacgacgaactcgatatccagctgaaggtgtttgatgaaaataaagaagatgatttgacggaattgagccacagactgaacgacatccgcgctgaaatggacgacatgaatgaggtgtatcatctgctgtacaacatgctcaaggacaccgccgctgagaactactttttatctattctacaacattttctcctcatcaggaatgactactatatccggccgcagtactataagattatcgaagaatgtgtatcccagattgtgctgcactgctccggaatggacccagatttcaagtaccggcaaagactcgacatcgacttgactcacctaatcgactcatgtgttaataaggctaaagtagaggagtctgagcagaaggcagccgaattcagtaaaaaattcgacgaagagtttaccgccagacaggaggctcaagcagaattgcagaaaagggatgaaaaaatcaaagaattagaagccgagatccagcaattacgtactcaagcacaggtcttgtcctccagctccggcattccaggccccccagcggctccgcccctccctggcgtgggaccccccccaccccctcctgctccccccctgccgggcggggcaccgctgcctccaccacctccccctttgccaggcatgatggggattcctcctccaccgcccccccctttgctgtttggaggtccccctccgcctccccccctgggtggggtgccccctccccccggcattagcctgaaccttccatacggcatgaaacagaaaaaaatgtacaaaccggaggttagcatgaaaagaatcaattggagcaagattgaacccacagaactgtccgaaaactgtttctggcttcgagtgaaagaggataagtttgaaaatcccgaccttttcgccaaattggctctaaactttgcgactcagataaaggttcagaaaaatgccgaggctctggaagaaaagaagaccgggcccactaagaagaaggtgaaggaattgcgcatcttagatcccaaaactgcgcaaaacctgagcatctttttggggagttatagaatgccatacgaagacatcagaaacgtaattttggaggtcaacgaagacatgctcagcgaagcgcttatccagaatcttgtcaagcacctcccagaacagaagatcttaaacgagcttgcggagctcaagaatgaatacgacgatctgtgtgagcccgagcagtttggagtggttatgtcaagtgttaagatgttgcagccccgcctaagttctattctgttcaagctgacctttgaagaacacattaacaacatcaagccctctatcatcgcagtgaccctggcatgcgaggagctgaagaaaagcgaatccttcaaccgcctgctggaactggtgctgctggtgggaaattacatgaactctggctctcgtaacgcacagtccctcggattcaaaatcaatttcctgtgcaagattcgagataccaaaagcgcagatcagaagaccacactgcttcacttcattgccgatatctgtgaagagaaatatagggacatactgaagttccccgaggaactcgaacatgtggagagtgcaagcaaggtgagcgcacaaatacttaagtcgaacctggctagtatggagcaacagatagttcaccttgagcgcgacatcaagaaatttcctcaagcagagaaccagcatgacaagttcgtggagaaaatgaccattttcaccaagaccgcacgggagcagtacgaaaaactctccacaatgcacaacaacatgatgaaattgtacgagaacctgggcgagtattttatttttgattctaagacggtatctatcgaggaattcttcggcgatttaaacaactttcgtaccttgtttctggaggccgtccgggaaaacaacaaaaggagagagatggaagagaaaacgcggcgggccaaactagccaaggagaaagcagaacaggagaaactggagaggcaaaaaaaaaaaaagcagctgattgatatcaataaggagggcgacgagaccggcgtgatggacaatctcctggaggctttacagtccggcgccgcatttcgcgatcggcggaaacggattcctcgcaacccagtggtaaaccacccatgtgctacacgcgccaatccacgctctgccacttag

SEQ ID NO: 185324 - DNA, 735 bp, synthetic construct
  misc_feature 1..735: note = Description of Artificial Sequence: Synthetic coding sequence
  source 1..735: mol_type = other DNA
atggagctgttcctggccggccggcgggtgctggtgaccggcgccggaaagggtattggacgaggaaccgtacaagcactgcatgccactggcgcccgggtagtggcagtcagtaggacgcaggccgatttggattctctggtcagggaatgccccgggattgaacctgtttgcgtcgacctcggcgattgggaagccaccgagcgcgccctgggctctgtaggcccagtagacctgctagtgaacaatgcagcagtcgcacttttacaacctttccttgaggttacaaaggaagcgtttgacagaagcttcgaagtcaacttgcgcgcggtgatccaggtaagtcaaattgtagcccgaggactgattgcacgcggcgtacccggggcaattgtgaatgtttcatctcagtgctcacagagagcagtgacgaatcatagcgtgtattgctcaaccaagggtgcacttgatatgctgacgaaagtaatggccctagagctcggcccccataaaattcgggtaaacgcagtgaatccgacagtggtgatgacatccatgggacaggccacgtggtctgacccgcacaaagcaaagaccatgctcaacagaatcccactgggcaaattcgccgaggtcgagcacgttgtaaatgccatccttttcttactctcagataggtccggtatgaccacgggctcaaccctgcctgttgaaggaggattttgggcatgttag

SEQ ID NO: 185325 - DNA, 5769 bp, synthetic construct
  misc_feature 1..5769: note = Description of Artificial Sequence: Synthetic coding sequence
  source 1..5769: mol_type = other DNA
atgaagagccccgccctgcagcccctgagcatggccggcctgcagctcatgacccctgcttcttcgcctatgggacccttctttggtctcccttggcagcaggaggccatccacgataatatctatacaccgagaaaataccaggtcgagctcctcgaggctgcccttgaccataacacaattgtgtgcctgaacacgggtagtggcaagacttttatcgctgtgctgctgaccaaggaactgagctaccagatcagaggagacttcagccgcaatggaaaaagaacagtgttcctcgtcaatagcgctaaccaagtggcgcagcaggtatcagcggtgcgcacccacagcgatctgaaggtcggcgaatattcaaacctggaagtgaacgccagctggactaaggagcgatggaaccaagaattcaccaaacatcaggtgctgattatgacatgttatgtggcccttaacgtcctgaagaatggatacctatccctgtccgacatcaatttacttgtttttgatgagtgtcatctggctatactggaccacccatatagagagattatgaagctgtgtgaaaactgtccatcttgccctcgcattctgggcttaacggcttctatattaaatggaaagtgtgatcccgaagagttagaagagaagattcagaaactcgaaaaaatcttgaaaagcaacgcagagaccgcaacggatcttgtggtgctggataggtacacctctcaaccttgtgagatagtggtcgattgtggccccttcacagaccggtccgggctgtacgagcggctccttatggagcttgaggaggctctcaattttattaacgactgtaatatatcggttcactctaaagaacgcgattcaacgctcatttctaaacaaatccttagtgactgcagagccgtgctcgtagtgctggggccgtggtgtgcagacaaagtcgccggaatgatggttagagaattgcaaaagtatattaaacacgaacaagaggagctccacaggaagtttttgctttttactgacacttttctgcgcaagattcatgcactctgtgaggagcacttctcacctgcgtcactggacttgaagttcgttacacctaaggtgatcaagcttctggaaattttacggaagtataaaccttatgaaagacaacagttcgagagtgtcgaatggtataataaccggaaccaggataactacgtgtcatggtccgatagcgaagatgatgacgaagacgaagagatcgaggaaaaagaaaaaccagaaaccaacttccctagcccgtttactaatatcctgtgtggaataatcttcgtggaacggaggtatactgcagtcgtactgaatagattgattaaggaagccggtaagcaagaccccgaactggcatacatctcctctaatttcatcaccggacacgggattggcaagaaccagcccaggaacaagcagatggaggccgagtttcgcaagcaggaagaggtgctgcgaaagtttcgtgcacatgaaactaatttactcattgcaacatcgatcgttgaggagggggtggacattcccaaatgtaacctggtcgtgcggtttgatcttcccacggaatacagatcttatgtgcagtccaaaggaagagcgcgcgcgccaatctccaattacattatgctcgctgacacagacaagattaagagctttgaagaggacctgaagacatacaaggccatagagaaaatcttacggaacaagtgtagcaagagtgtcgatacgggggagacagacatcgatcccgtgatggacgacgatgacgtgttccccccctatgttctcaggccagatgacggcggtcccagagtgacaatcaacacagcaatcggtcatatcaacagatattgcgccaggctaccgtcagacccttttactcatctggctccaaaatgcagaacaagagagctgccggatggtacgttttactccacactgtacctccctatcaattcgccactgagggcgagcattgttggaccccctatgtcctgcgtgaggctcgccgagcgcgtcgttgcgcttatctgttgtgaaaagttgcacaaaatcggcgaattggacgatcacctgatgcccgtgggcaaggaaacagtcaaatacgaagaggagctagatttgcacgacgaagaggaaacatcagtcccaggaaggcctgggtccactaaaagacggcaatgctacccgaaggccatacctgagtgccttcgcgatagttatccgcgccctgatcagccttgttacctgtacgtgattggtatggtccttactaccccattgccagacgaattgaattttaggcgcagaaaactatacccgcctgaggataccactcgatgcttcggcattcttacggcaaagcccatcccacagataccccatttccccgtctatacccggtctggagaggttactatcagtattgaactgaagaagagtgggttcatgctgtctttacaaatgctcgaattgatcacccggctgcaccaatatatattcagccatatcctaagacttgagaagccagccttggagttcaaacctacagacgccgattcagcctactgtgttttgcccttgaacgtggtgaatgattcgagcactctggacattgattttaaattcatggaagacattgaaaaaagcgaggctcggatcggtatacccagcaccaaatacaccaaggagactcccttcgttttcaaactcgaggattaccaggacgcggtaataattcctcgctatcgaaacttcgaccaacctcataggttctatgtcgccgacgtctataccgatttaacccccctttcaaagtttccatccccggagtacgagacatttgcagaatactataaaactaaatacaatcttgacctgactaatttgaaccagcccttacttgatgtagaccatacttcatccaggttaaatctgcttactcccagacacttaaatcagaaggggaaggcgcttccactcagttccgcagaaaagcgcaaagctaagtgggaatctctgcagaataagcagatcctggtcccagaactttgtgccattcaccccatccctgccagcctgtggcgcaaggccgtctgccttccatctattctgtatcggctgcactgtttgctgactgcggaggagctgagagctcagacagcctctgatgccggtgtgggggttcgctcactaccagctgatttcagatacccaaacctggactttggatggaagaagtctattgattctaaatctttcatttccatttctaactccagctctgcggagaacgacaactactgtaaacactcaacaattgtccccgaaaacgctgctcatcagggtgcaaacaggacgagttccctcgagaatcacgaccagatgagtgtgaactgccgaacactgctttcagagagcccaggtaagctgcatgttgaggtttccgcagacttgacagccatcaatggactcagctataaccaaaatctggccaacggctcatacgacctcgccaatagggacttttgccaaggtaatcagctgaattattacaaacaggaaatccccgttcaacctaccacctcctattcgatccaaaatttgtattcctatgagaatcagccccaacctagcgacgaatgcactctcctctctaataagtacctagacggcaatgcaaacaaaagcacctcagacggttctcctgtgatggctgtgatgcctggcacaacggacactattcaggttctgaagggccggatggacagtgaacagagccctagcatcggttattctagtaggactctggggccgaacccaggcttgatcttgcaggctctgaccctgtcaaatgcctctgatggttttaatctggaacgcctcgagatgcttggcgattcatttttgaagcacgcaataactacttatttgttctgcacataccccgatgcgcacgagggccgcctgtcctacatgcggtcaaagaaagtctcaaactgcaatctgtaccgcttgggaaagaagaagggccttcccagtcgcatggtggtctctatattcgacccgcccgtcaattggcttccacccggctacgttgtgaaccaggacaagagcaacacagacaagtgggagaaggacgagatgactaaggactgcatgttggccaacggaaagctggacgaggattatgaggaggaggacgaagaagaggaatcactcatgtggagggctcctaaggaagaagctgactatgaggatgacttcctcgagtatgatcaagaacatattcgcttcatcgacaatatgctgatgggttccggcgcattcgtcaagaagatcagcctcagccctttctcaaccactgatagcgcctacgagtggaaaatgcccaagaaaagttcactcggcagcatgccattttcctctgacttcgaggatttcgattatagtagctgggatgcaatgtgctacctggatccaagcaaggccgtcgaagaggacgatttcgttgtaggcttctggaaccctagcgaggagaactgcggtgtggataccgggaaacagagtataagttatgacctccataccgaacagtgcattgcagataaatccatcgcagattgcgtggaggctctgcttgggtgctacctgacttcttgcggcgaacgggccgcccagctttttctgtgtagcctgggacttaaagtgctgccggtcattaagaggacagacagagagaaggctctgtgccccacccgagagaatttcaattcacaacaaaagaatctttccgtaagctgtgccgccgcgtccgtggcctcttcaaggagttccgttctgaaggacagtgaatatgggtgcctgaaaatcccccctcgatgcatgttcgaccaccccgatgccgacaagaccttaaaccaccttatctccggcttcgagaatttcgagaaaaagatcaactaccgctttaaaaacaaggcctacctgctgcaggcttttacacatgcctcctaccactacaacactatcacagactgttaccagagactcgaattcctgggggacgccatcctggactacctgataacgaaacatctgtatgaggatccgagacagcactcccctggagttctgaccgacctgcgtagcgcgttagtgaataacaccattttcgcctctctggcggttaagtacgactatcataaatattttaaagcagtgagtcccgagctctttcacgtaatagacgattttgtgcagtttcagctcgaaaagaatgagatgcaagggatggattccgaactgagacgaagtgaagaggatgaggaaaaggaggaagacatcgaagttccaaaagctatgggagacattttcgagtctctagccggcgccatctatatggactcagggatgagcctggagacagtctggcaagtgtattatcctatgatgcgccccttgatcgagaaatttagcgcgaacgtcccacggtctcccgtcagagagctactggagatggaaccagaaaccgctaaattttcgcccgccgagaggacctacgatggaaaggtgagagtcaccgttgaggtggtcggaaagggtaaatttaagggcgtggggcggtcctaccgaattgccaagtctgcagctgcaagaagggctctcagatcactcaaggccaaccaaccacaggtccctaattcctag

SEQ ID NO: 185326 - DNA, 5769 bp, synthetic construct
  misc_feature 1..5769: note = Description of Artificial Sequence: Synthetic coding sequence
  source 1..5769: mol_type = other DNA
atgaagagccccgccctgcagcccctgagcatggccggcctgcagttaatgacccccgcctcttccccaatggggccattctttggcttgccctggcaacaggaagctatccatgacaatatctatacaccaagaaaataccaggtggagctccttgaggctgctttggaccacaacacgatcgtttgtctgaataccggcagcggaaagacctttattgcagtgctgttaaccaaggaactgtcctaccagatccgtggagacttcagtcggaacggaaagaggacagtgttcctagtaaacagcgctaaccaagtggcacagcaggtgtctgctgttcgtacacactcagacctgaaggtcggcgaatactccaacctggaagtgaatgcttcatggactaaggaacggtggaaccaggagttcactaagcaccaggtactcatcatgacatgctatgttgcactcaacgtgttgaagaatggctacctgtcactttcggacattaatctactggtttttgacgaatgccacctggccattctggaccacccctacagggagattatgaaattgtgcgaaaactgtccctcatgccccaggattctgggattgacagcgtccattcttaacgggaagtgtgatccagaagaactcgaggaaaaaattcagaagctggagaagatcctgaagtccaacgctgaaaccgcaactgacctggttgtcctggacaggtacacttcccagccttgcgaaattgttgttgactgcggtccatttaccgataggtccggcctgtacgagaggctgcttatggagcttgaggaagccctgaacttcatcaatgactgtaatatctctgttcacagcaaagagcgggacagcactcttattagtaaacagatccttagcgactgtagggcagtgctggtggtcttagggccttggtgcgccgataaggtggccgggatgatggtgcgagaactgcagaagtatataaagcacgagcaggaggaacttcacaggaaattcctcctgtttactgacacatttctgcgtaaaattcatgccctttgtgaagagcactttagtccggcgagcctggaccttaaattcgtcacccccaaggttatcaagctcttagagattctgagaaagtacaaaccatatgaaaggcaacagttcgagagtgtcgagtggtacaataacagaaatcaggacaattacgtcagttggagcgattccgaggatgacgatgaagatgaggagatcgaagagaaggagaaacccgaaacaaactttccaagcccttttaccaacatcctttgcggtattattttcgtggaacgtcgatacactgccgtcgtgctgaataggttgattaaggaggcaggcaagcaggaccctgaattagcctacattagttctaactttatcaccgggcacggcattggtaagaaccagcctaggaacaagcagatggaggctgagttccgcaaacaggaagaagtcttgcggaaatttcgagctcacgagactaacctgcttatagctacatccatcgttgaagaaggtgtggacatcccaaaatgtaatctggtggtgcggttcgatctgcccaccgagtacaggtcctacgtgcagtcgaagggcagggcaagagcccccatttccaactatatcatgctggcagacaccgataagattaaatcctttgaagaggacctcaagacttacaaggcaatcgagaagattttgagaaataaatgcagtaaatcagtggatactggagaaacagacatcgaccctgtgatggacgacgacgatgtgtttcctccttacgtccttagaccagacgacggaggaccccgggtgacaattaacacagctattggccatataaacagatattgcgctcgtttaccgagtgacccatttactcatcttgctcccaagtgccgcacccgggagctgccagatggcacgttttacagtacactctatctgccgatcaattctcccctgagggcaagcatcgtgggtcctcccatgagttgcgtgcggttggccgagcgggtggtggccctcatttgctgtgaaaagttacacaaaattggcgaactcgatgatcacctgatgcccgtaggtaaagagaccgtgaaatacgaggaggagcttgacctccacgacgaagaagagacatcagtccctggcaggcccggaagcacaaaacggaggcagtgctatcccaaggccatacctgagtgtctccgcgactcttatccacggcctgatcagccttgctatctgtatgtgattgggatggtcctgacaaccccactgccagacgaactgaacttccgaaggcgcaagctctatccccccgaagacacaacgagatgcttcggaatccttactgcaaagccgatcccccaaatcccccacttcccagtgtatacaagatccggtgaggttacaatttctatagaactgaaaaagtccgggttcatgcttagtctgcagatgctcgagctcattactcgcctgcatcaatacattttctcccatatcctgaggcttgaaaagcccgcattggagtttaagcccacagacgctgactccgcgtactgcgttctgcccctgaatgtagttaacgattcctccactctggacattgatttcaagttcatggaggatatcgagaagtccgaggctcgcatagggattcccagcactaaatacaccaaggagacacccttcgtcttcaagctggaagattatcaggacgccgtcatcatacccaggtaccggaatttcgaccagcctcataggttctatgttgcagatgtgtatactgacctgaccccattgtctaagtttccatctcccgagtacgagacgtttgcggagtattacaagactaagtacaacttggatctgacaaacctcaaccaaccattgctggatgtggaccacacaagctcccggctaaatctgcttaccccccgtcatttgaaccagaagggcaaagccttacctctctccagtgccgaaaaacgaaaggcgaagtgggagtcactccagaataaacagatcttggtgcccgaattatgcgccatacaccccatcccggccagtctgtggcgaaaagcagtatgtctgccctccattctgtatcgccttcactgcctcctgaccgcagaggagctgcgggcgcagacagcctccgacgctggggtgggcgtgagatcattacccgccgatttccggtatccaaatctggacttcggatggaagaagagtatcgacagtaaatcttttatctctatctccaatagctcctctgccgaaaacgataattactgtaaacacagcacaattgttccagaaaacgccgcccaccagggcgcgaatagaactagctctctggaaaaccatgaccagatgtcagtaaattgcaggacccttctctctgagtctccaggaaagctccatgtagaagtgagcgcagatcttacagcaatcaatggcctctcatacaaccagaatctggctaatggttcatatgatcttgccaaccgggacttctgccaggggaatcagctgaactactacaagcaggagatccccgtgcaaccaaccacctcttatagcatccagaacctgtactcctacgagaaccagccccagccatccgacgagtgcacacttttgtctaacaaatacttggacggaaacgccaataagtctacgtcagacggcagtccagtgatggcggtgatgcccggcacaactgacacaattcaggtcctgaagggccggatggactcagagcagtcaccttctatcggttattcttctaggactctgggccccaacccaggcctgatcctgcaagccctgactttaagtaacgcaagcgacggctttaacttagagcggttagagatgctaggtgattccttcttgaaacacgccatcacgacctacttgttctgtacctaccctgatgcacacgagggaagactaagctatatgaggagtaagaaggtgagtaattgcaacctttaccgacttgggaaaaagaaggggttaccatcaagaatggtcgttagcattttcgatccacccgttaattggcttcccccaggctatgtagtcaaccaagataagtccaatacagataaatgggagaaggatgagatgaccaaggattgcatgctcgcgaacggtaaactcgatgaagattatgaggaggaagacgaggaggaagagagtttgatgtggcgggcccctaaagaggaggcagattacgaggatgacttccttgagtacgatcaggaacatattaggtttatcgataacatgcttatgggcagtggagctttcgtgaaaaagatcagtctgtccccattctcaaccacggattccgcctacgagtggaaaatgccaaagaagagttcactggggagcatgcctttttcttctgacttcgaggacttcgactacagcagctgggatgcgatgtgttacctggatcccagcaaggccgtagaggaagacgatttcgttgtgggtttctggaatccttccgaagagaactgcggtgtggacacagggaagcagtccatttcctatgacctacataccgaacagtgtattgccgataagagcatagcggactgcgtagaggcactgctggggtgctacctgacgagttgcggagagcgggcggcccagctttttctctgttctctgggcctgaaagtgctccctgtaataaagagaacagacagggagaaggcactgtgcccaaccagagaaaactttaactcccagcagaagaatctgtctgtcagctgcgccgcagcctctgttgccagctcaaggagttctgtgttgaaagacagcgagtatgggtgcctaaagattcctccccgctgtatgttcgaccaccctgacgcagataaaactttgaatcacctgatctctgggttcgagaacttcgagaagaagataaactacaggtttaagaataaagcttacttacttcaggctttcacccatgccagctaccattataatacaatcaccgactgctaccagagactagagtttttgggcgacgccatcctggattatctgatcacaaagcatttgtatgaggacccccggcaacattccccgggggtactgacagatctgcggtccgctctcgtgaacaatacaatatttgcctctctcgctgtgaaatacgactaccacaaatattttaaagccgtgagcccggaactcttccatgtaattgatgactttgtgcaatttcagctcgaaaaaaacgagatgcagggaatggactccgaactgaggcggtcagaggaggacgaggagaaggaggaggatattgaagtacccaaagcgatgggggacatttttgagtccctggcaggagccatttacatggatagtgggatgtctttagagacagtgtggcaggtgtattaccctatgatgaggcctcttattgagaagttctctgcaaacgtccctagatccccagtgagggagctcctggaaatggaacccgagacggccaagttctcccccgcagaaagaacttacgacggcaaagtccgggtcactgtggaagtggtgggaaagggcaagttcaagggtgtgggcaggtcttataggattgctaaatctgccgctgcccggagggctttacgctccctgaaggccaatcaaccacaagtgcccaactcctag

SEQ ID NO: 185327 - DNA, 5769 bp, synthetic construct
  misc_feature 1..5769: note = Description of Artificial Sequence: Synthetic coding sequence
  source 1..5769: mol_type = other DNA
atgaagagccccgccctgcagcccctgagcatggccggcctgcagctgatgactccagcttccagccccatgggaccttttttcggcctcccatggcagcaggaggctatccacgacaacatctacaccccgcgtaaataccaggtggaactgctggaagctgccctcgaccacaacactatcgtctgccttaatacgggatctggcaaaacgtttattgccgtattgctaactaaggaactgagctatcagattcgtggggattttagccgcaacggaaaacgcacagtttttcttgtaaattctgcaaatcaagtagcccagcaggtatccgccgtgcgaactcactccgacctcaaggtgggcgagtactccaacctggaggtaaatgcatcttggacaaaagagagatggaaccaggaattcactaagcatcaggtgttaataatgacttgctacgtcgccctgaacgtgctgaaaaacggctacctgagtctgtctgacattaacttgctggtgtttgacgagtgtcacctggccattctggaccatccttatagagagattatgaaactatgtgagaactgcccctcttgtccccgcattctcggattgacagcatctatcctgaacgggaaatgtgaccccgaagagctggaggaaaagatacaaaaactcgagaagattctcaagagcaatgcagaaacagcgacagacctggtggtgctggatcgatacacaagccagccatgtgagatcgtggtggactgcggcccattcacagaccgcagtggcctgtatgaacggcttctaatggaactggaggaggcactcaactttattaatgactgtaacatctcagtgcatagcaaggaacgagactccaccctcatttctaagcagattcttagtgattgccgagccgtgctggtggtgctggggccatggtgcgcagacaaggtggccggaatgatggtgcgggaattgcagaaatatataaaacacgagcaggaagagctgcaccgaaagtttctgctgtttacagacaccttcctgcgcaagatccacgcgctttgcgaagaacactttagcccagcatctctggacctgaagtttgttactcctaaagtcataaaactgctggagatattgcgcaaatataaaccctatgaaagacagcagtttgaaagtgtggagtggtataacaatcgtaaccaggacaattacgttagctggtcagattcagaggacgatgacgaggacgaggaaatcgaggagaaggagaaacccgagacaaatttcccctccccctttaccaacatcctctgtggaatcatcttcgtagaaaggcgctacacagcagtcgtcctcaatcggcttatcaaagaagccggcaagcaggatcctgagctggcatatatctcttccaattttatcactgggcatgggatcggcaagaatcagcctcgcaataaacaaatggaagcggagtttcgaaagcaagaagaggtgctccgcaagttccgggcacacgagaccaacctcctcatcgctactagtattgtggaggagggagttgatattccaaaatgtaatttagtagtcagattcgatctcccgacagagtaccgctcttatgtccaaagcaaaggacgcgcaagagcaccaatatcaaattatataatgctcgctgacacagataagattaaaagcttcgaggaggacctcaagacttacaaagctatcgaaaagatattgcggaataaatgttcaaagagtgtggacaccggagaaacagatatcgatcctgtaatggacgatgacgatgtgttccctccttatgtgttgcgccccgacgatggcgggcctcgcgttacaataaatactgcaatcggccacattaatcggtactgcgcccgtctgcccagtgacccttttacacacttagccccaaaatgtagaacacgtgaattgcccgacggcacattctactcaactttgtacctgcctattaactccccgctacgggcgtctatcgtggggccccccatgtcgtgtgtccgactggcagagcgtgtggtagcattgatctgctgcgaaaagctgcacaagataggagaacttgacgaccacctgatgcccgtcggaaaagagaccgtgaagtatgaggaagaactggatttgcacgatgaggaagaaacttcagttcctggccgccccggttcaaccaaacgcaggcaatgctatcctaaagccatcccagaatgcctccgcgattcctacccacggcccgaccagccatgttatttgtacgtgatcggtatggtgctgacaactcccctccccgacgaacttaattttcgcagaaggaaattgtacccccccgaggatacgaccaggtgctttggcatcctaactgcaaagcctatcccacagatcccacattttccagtgtacacacgaagcggcgaggtcacaatatctattgagttgaagaagtccgggttcatgttaagtttgcagatgctggaactgattacaaggctgcaccagtatatattcagccacattttacggttggagaagccagcgctggagttcaaaccgacagacgctgacagtgcctactgtgtgctacccctgaacgtggtcaatgattcaagcactctggatatcgactttaaattcatggaggatatcgagaaatcagaggcccggattggtattccctctacaaagtacaccaaggagactcccttcgtctttaagttggaggactatcaagacgcagttattataccgagatatagaaacttcgaccaaccccacagattttatgtcgcagacgtttatactgatcttacccccctgagcaaatttccgagcccagagtatgagacttttgcagaatattataagacgaagtacaacttagatcttactaacctcaatcaacccttgttagacgtggaccacacttcttccagacttaacttactgaccccccgtcatctcaatcaaaagggcaaagcccttcccctttccagcgctgaaaagaggaaggccaagtgggagtctttacaaaataagcagattctggtgccggagctgtgcgccattcaccccatcccagcgagtctctggaggaaggccgtgtgcctgccttctatcctgtatagactgcattgtctgcttacagcggaagagttgcgtgctcagactgcgtcagacgcgggtgttggcgtcagaagtctgcccgccgacttcaggtatccgaatcttgacttcggatggaagaagagcatcgactcgaagtcttttatctccatcagtaattcttccagtgcagagaacgacaactactgtaagcacagtacaatcgtaccggagaacgccgcgcatcagggcgctaacaggaccagctctctggagaatcacgaccagatgtccgttaactgtcgtacgctgttgtctgagtcaccgggaaaattgcatgtcgaagtcagcgctgaccttactgctataaatggactgtcctacaatcagaatctggcgaacggcagttatgacctggcaaaccgggatttttgtcagggcaaccagctcaattattacaagcaagagatccctgttcaacccacgaccagctacagcatccagaacctgtacagctatgagaatcaaccccagccaagcgatgaatgtacccttctgtctaataaatatctagacggcaatgcgaataaatctactagcgatggatcgccggtgatggcggtcatgcccggaactaccgacactattcaagttttgaagggacgcatggacagtgagcaaagcccaagtatcggctactcaagtcgaaccctggggccgaatcctgggctgattctacaggcccttactctgagtaatgcgtcagacgggttcaatctggagcgcctggagatgctcggggatagcttcctcaaacatgctataaccacttatcttttttgcacctatcctgacgcccacgagggtcggcttagttatatgaggtcaaagaaggtgagcaactgcaacctgtatcggcttggaaaaaaaaaaggcctcccatcacgtatggttgtttcaattttcgatccacctgtaaactggcttccaccaggctatgtagtcaatcaagataagagtaacactgataagtgggagaaagatgaaatgacaaaggattgtatgctggccaatgggaaattggacgaggactatgaggaagaggatgaagaagaagaatctctgatgtggagagcacccaaggaagaggccgattatgaagacgactttctagaatatgaccaagagcatatccggtttatcgataatatgttgatgggcagcggcgctttcgtgaaaaagatcagcctctcacccttcagcactaccgactcagcgtacgagtggaagatgcccaagaagagcagcctcggaagcatgcccttctcttcagattttgaggattttgattattcatcttgggacgcgatgtgctatctggacccatccaaagcagtggaggaagatgatttcgtggtaggcttctggaatccgtcagaggagaactgcggggttgacactgggaagcagtccatttcctacgaccttcacacagaacagtgtattgctgacaaaagtattgctgactgtgtcgaagctctgctcggctgctatctgacttcctgcggagagcgggccgcccagctattcctgtgcagcctgggtctgaaggtccttccagtgatcaaaaggacagatagagaaaaagctctgtgcccgacaagggagaacttcaactctcaacaaaagaacctgagcgtgagctgtgccgctgcctctgtggcctcgtcccgaagctcagttttgaaagactctgagtatggctgtcttaagatcccacctaggtgcatgtttgatcacccggatgcggacaagacactgaaccatttgataagtggattcgagaacttcgaaaaaaaaatcaactaccggttcaagaacaaggcgtatctgctccaggcctttactcacgcctcctatcactacaacacaatcaccgattgttatcagagattggagttcctgggcgacgctatccttgattacctaatcacaaaacacctgtatgaggacccaaggcagcattcacccggagtgctgactgatttgaggtctgctttagtgaacaatacaatctttgcctcactcgctgtgaagtatgactaccataagtactttaaggccgttagtccagagctctttcacgtaattgacgacttcgttcagtttcagctggaaaagaacgaaatgcaggggatggactcagaactgcggcggtccgaagaggacgaagagaaagaggaggacatcgaggtccccaaggctatgggggacatttttgagagcctggccggagccatctacatggacagcggtatgtctctggaaacagtttggcaggtctactacccgatgatgagaccactgatcgaaaaattcagcgctaatgtgcctagatcccctgtgcgagagctcctagaaatggagcctgagactgctaaattttctccggcagagcggacctacgatggcaaggtccgggtgactgtagaggtagtagggaagggaaagtttaaaggggtcggacgctcataccggatagccaagtctgccgccgccaggagggcattgagaagcctaaaggccaaccaaccacaggtccccaacagctag

SEQ ID NO: 185328 - DNA, 5769 bp, synthetic construct
  misc_feature 1..5769: note = Description of Artificial Sequence: Synthetic coding sequence
  source 1..5769: mol_type = other DNA
atgaagagccccgccctgcagcccctgagcatggccggcctgcagctcatgacccctgctagctcccccatgggccctttctttgggctcccttggcagcaggaagccattcatgataatatctacacgcctcggaagtatcaagttgagttgttggaggccgccctggaccacaataccattgtttgtctgaatactgggtccggcaagacatttattgccgtgttgctgaccaaagagctttcctaccagattcgcggggacttcagtagaaacgggaaaagaacagtgtttcttgtgaacagtgctaatcaggtggcgcagcaggtgagcgctgttagaactcattcggacttgaaagtgggcgagtactccaacctggaagtgaacgcaagttggaccaaagagagatggaatcaggaatttacgaagcatcaggttctcattatgacatgctatgtggcactgaatgtgctcaagaacgggtatttaagtctgtcagatatcaacctcttggtgttcgacgagtgtcacctggccatcctggatcatccctaccgcgaaattatgaagctgtgcgagaattgtccgtcctgcccgagaatcctgggtcttacggcatctattctaaacggcaaatgtgaccctgaggagctggaagagaaaatccaaaagctggaaaagattcttaaatcaaatgcagagacagcgactgatctcgttgtgctggatagatataccagccagccatgtgagatcgtcgtagactgcggccccttcacggatagaagtggactttacgaaagactcctcatggagctggaggaggctcttaacttcatcaacgattgcaatattagtgtgcacagcaaagagagggatagtactctgatctccaaacaaattctaagcgattgcagagccgtgctggtggtgctaggcccgtggtgtgctgacaaggtggccggaatgatggtccgggagctgcagaagtacataaagcacgagcaagaggagctacatagaaaattccttctttttaccgacacatttttgaggaagatccacgccctctgtgaagaacatttttcgccggcctccctcgacctgaagtttgtaacccctaaggtgatcaagttgttggaaatactgcggaagtataaaccgtacgagaggcaacagtttgaaagcgttgaatggtacaataacaggaatcaggacaactacgtatcatggtcggactctgaggacgatgacgaagatgaggagattgaagagaaggagaaacccgaaaccaatttcccatcaccgttcactaacatcctctgcggcatcatctttgtcgagaggcgctacaccgccgtggtcctgaacaggctcattaaagaggcgggcaagcaggacccggaattggcctatattagttctaactttatcacaggtcatggcatcggtaagaaccagccccgcaataaacagatggaggctgagttccgaaagcaggaagaggttctaaggaaattccgagcacatgaaacaaatctcctgatcgccacaagtatcgtggaagaaggagtggacatccctaagtgtaacctcgttgttaggttcgacctacctaccgaatataggagctatgtgcaaagcaagggcagggcacgcgcacctatcagtaactacatcatgctggctgatactgacaaaatcaagtcctttgaggaagatttaaagacctataaggccattgaaaaaatcctgcggaataaatgcagtaagagtgtcgataccggggagaccgacatcgaccctgttatggacgatgatgatgtcttcccgccctacgttctgcgacccgacgacggtggccccagagtcacgattaacacagctattgggcacatcaatagatattgtgctcgtcttcccagcgaccccttcacccacctggcaccaaaatgccgtacacgggaactgcccgatggcaccttctatagcacactttaccttccaataaactctccacttagggcttcgattgtaggaccccctatgtcttgcgttcgcctggccgagcgagtggtagcgttgatttgctgcgagaagcttcacaaaattggggagctcgacgatcacctgatgccggttgggaaagagacagtgaaatacgaggaggaattagacttgcacgacgaagaagaaacgagtgtccccggtcgtccaggcagcaccaagcgaagacagtgttatccgaaagcgatcccagagtgcctgcgggattcctatcccaggcctgaccaaccctgctatctgtatgttattggcatggtgctaacgacgcccctcccggacgagctgaattttcgaaggcggaaactctacccacccgaggataccaccaggtgtttcggcattcttaccgccaaacccattcctcagatcccccactttccagtgtacaccagaagcggagaggtgactatttcaatagaactaaaaaaatcggggtttatgttgtccttacagatgctcgagcttattactcggctgcaccagtatatcttctctcacatactgaggttagaaaagccggcactggagtttaaacctacagacgccgactcagcttattgcgtcctacccctgaacgttgttaatgatagttctaccctggatatcgatttcaagttcatggaagacattgaaaagtcagaagcgcgtatcggaatcccaagtacaaaatatacgaaggagactccattcgttttcaaattagaagattaccaggacgccgtgataatacctcgttacagaaatttcgaccagccccatcgcttttacgttgcagatgtgtatacagatctgactcccctatcaaagttcccctccccggagtacgagacttttgcagaatactataaaactaaatataacttggatcttactaacctcaaccaaccgctgctcgacgtggatcataccagttccagacttaatttgcttactcctagacatctgaatcagaaaggcaaggccctccccctgtccagtgccgagaagcggaaagccaagtgggagtccctgcaaaacaaacaaatcctggttcccgagctgtgcgctattcatccaattcctgcctcactgtggcggaaagctgtgtgtttgccatctattctgtaccggctgcactgtttgctgaccgctgaggaactgcgtgcccagacggcaagcgacgcaggtgtgggagtgcgctcactccctgctgattttaggtatcctaaccttgatttcggctggaagaaaagtatagactcaaaatccttcatcagtatatcaaatagctcgagcgccgagaatgacaactattgcaaacatagcaccattgttcctgagaacgctgcccaccagggtgcaaataggacaagcagtctggaaaatcacgaccagatgagtgtcaattgccgcacactgctgtctgagtcccctggaaaattacacgtggaggtgagcgcagatctcaccgctattaatgggctttcgtataaccagaatttggctaacggctcctacgatctggccaaccgggatttctgtcaaggaaatcaactcaactactataagcaggaaattcccgtgcagcccactacatcatacagcatacaaaatttatactcctacgagaaccagccacagcctagcgatgagtgtactctgttgtctaataagtatcttgatggaaacgccaacaagagcacttcagacggcagcccagtcatggctgtgatgccagggaccactgacaccatacaggtcctgaagggaagaatggattctgagcagtcgcccagcatcggatactcctccaggacgctcggacccaatccagggcttatacttcaggcattgaccctgtcgaacgcctcagacggatttaatctagagcgcctagagatgctcggcgacagtttcctcaaacacgctattacaacctatttattctgtacttatccagatgcacacgagggcagactgagctacatgagaagcaagaaggtgagcaactgtaatctatatcggctgggcaagaagaaaggcctgccttcaaggatggtcgtttccatctttgatccccccgtcaattggttgcctcccggttacgtcgtgaaccaggataaaagcaataccgacaagtgggagaaagatgaaatgactaaagactgcatgttagccaatgggaaactggacgaagattacgaggaggaagatgaggaagaagagtccctgatgtggagagcccctaaggaggaggcggattatgaagatgattttttagagtatgaccaggagcatatccgattcatagacaatatgttaatgggaagtggagccttcgttaagaaaatctccttgagccctttctccactacagattcagcctacgagtggaaaatgccaaagaaaagctcgttgggctcaatgccattctcgtcagatttcgaggacttcgattactccagctgggatgctatgtgttatctggatcctagcaaagccgtggaggaagacgattttgtggtgggattttggaatccttcagaggaaaactgcggtgtagacactggaaagcaaagcatcagctacgacttacacacggaacaatgtattgcagataaaagcattgcagactgcgtggaagcgctgttgggctgctaccttaccagctgcggggagagagcggcacagctgttcctttgttctcttggtctgaaggtactccccgtaataaaacggacggaccgcgagaaagctctttgtccaactagagaaaactttaactcccagcagaagaacctgtccgtttcatgtgccgctgcttctgtggcttccagccggtcctctgttctgaaggattcagaatacggatgtctcaagattccaccaaggtgcatgttcgatcaccctgatgccgacaaaacccttaaccatcttatcagcgggttcgagaacttcgagaaaaagatcaactaccggtttaagaataaggcctatctcctgcaagcgttcactcatgcctcataccactataacacaattactgactgctatcagaggctggagtttctcggcgacgctatcctggattatctcatcacaaagcacctttatgaggacccccgccaacatagcccaggagttctgactgacctgcggtccgcgttggtcaataacaccatcttcgcgtcactggctgtcaaatacgactatcacaagtatttcaaggcagtgtcaccagagctcttccacgtgatcgacgacttcgtgcagtttcagcttgagaagaacgaaatgcagggcatggactccgaactgagaaggagcgaagaagacgaggaaaaagaggaggacatagaggtgccgaaagcaatgggggacatctttgaatccttagcaggggccatctacatggactcgggaatgagcctggaaacggtgtggcaagtatattacccgatgatgcgtcccctaatcgaaaaatttagcgccaacgtgccaaggtcacctgtgagagagctcctggagatggagcccgagactgctaaatttagtcccgctgaacgcacatatgatggcaaggtgcgagtaacagtggaagttgtcgggaagggcaagtttaaaggggtcggccggtcctaccgtatcgccaaatctgcagccgcacggcgggccctgaggtctcttaaagccaaccagccacaggttcccaatagttag

SEQ ID NO: 185329 - DNA, 213 bp, synthetic construct
  misc_feature 1..213: note = Description of Artificial Sequence: Synthetic coding sequence
  source 1..213: mol_type = other DNA
atgaagagccccgccctgcagcccctgagcatggccggcctgcagcttatgactcctgcttcctctccaatgggcccattcttcggcctgccctggcaacaggaggctatccacgacaacatctacactccaaggaagtatcaggtggagctgctagaagctgcactggaccataacactatagtttgcttgaacaccgggagcggaaagtag

SEQ ID NO: 185330 - DNA, 213 bp, synthetic construct
  misc_feature 1..213: note = Description of Artificial Sequence: Synthetic coding sequence
  source 1..213: mol_type = other DNA
atgaagagccccgccctgcagcccctgagcatggccggcctgcagctcatgacacccgcgagcagtcccatgggtccttttttcggtctgccttggcaacaagaggccattcacgacaatatttacacaccgagaaagtaccaggttgaactgctcgaggcagccctggatcataacaccatcgtatgtctgaacacaggctcaggcaagtag

SEQ ID NO: 185331 - DNA, 5490 bp, synthetic construct
  misc_feature 1..5490: note = Description of Artificial Sequence: Synthetic coding sequence
  source 1..5490: mol_type = other DNA
atgaagagccccgccctgcagcccctgagcatggccggcctgcagcttatgacccccgccagtagtcccatgggacctttttttgggctgccttggcagcaggaagctattcacgacaacatctacacccctaggaaataccaagttgagctgctggaagcagctctggatcacaatactatcgtatgtctcaacaccggctctggaaaaacctttattgccgtcttgctgactaaagagttaagttatcagatcagaggcgacttctctaggaatggcaaaagaaccgtctttctggttaactctgcaaatcaggtagcacaacaggtttccgccgtgcgcacccactcagatcttaaggtgggggagtactccaatctcgaggttaatgcttcctggacaaaggaacgctggaatcaggagttcactaagcaccaggtactcataatgacttgttacgtcgctttgaacgtcctcaaaaacggatacctgagcctgtctgacataaacctccttgtcttcgatgagtgtcatctcgctatcctggatcatccatacagggagattatgaaactctgtgagaattgcccctcctgccctcgaattcttgggctcactgccagcatcctgaatggcaagtgcgatcctgaggaacttgaggaaaaaattcagaaactggagaagattctgaaaagcaatgctgagaccgccacagacctggtggtgctagaccgatacaccagccaaccatgcgaaatcgtagtcgactgcggaccttttaccgatcgaagcggcctttacgaacggttgttgatggagctggaggaggccctgaactttatcaatgactgcaatatcagcgtccattcaaaggaacgcgattcaacactgataagcaagcagattctgagcgactgtcgcgccgtgttagtcgtgctgggcccatggtgtgctgacaaggtcgccggtatgatggtgcgggagcttcagaaatacattaagcatgaacaagaggaattgcaccgtaaatttctgctcttcacggataccttcctaagaaagatccacgcgctttgcgaagagcacttcagccctgcttctttggatcttaagttcgtgactccaaaggtgatcaaactcctggagattctcaggaaatataagccctacgaacgccagcagttcgaatcggtggagtggtataataacaggaatcaggacaactatgtgtcctggtccgactccgaagatgatgatgaagatgaagagatcgaggaaaaggagaaaccagagaccaacttcccaagccctttcaccaacattctctgcggtattatcttcgttgagcgtagatacacggcagtcgtcctcaaccgcttgatcaaggaggccggtaagcaagaccctgaactggcttacatatccagcaatttcatcactggacacggcattggcaaaaatcagccccgaaacaagcagatggaagcagaattccgtaaacaggaggaggtgctgcgcaagtttagagcccacgagactaatctccttatcgctactagcattgtagaggagggagtggatatacctaagtgtaacctggttgtgcgctttgacctccccacagaataccggtcttatgtccagagtaaagggagggctcgtgccccaattagcaactatatcatgttagcagacacagacaagattaaaagctttgaggaggatttaaagacatataaagcgatagagaagattttgcgtaataaatgcagcaaatccgtagacacaggggaaaccgacattgacccagtgatggacgacgatgacgtgtttcccccatacgtattgcgcccggatgacggcggaccaagagtgactatcaatacggccataggccatatcaaccgttattgtgccaggctgccttccgacccttttactcatttagctcctaagtgtcgcaccagagagctacccgatggcactttctacagcactttgtatcttcctatcaattcccctttaagagcgtcgatcgtcgggcctcctatgagctgcgtgcggctggccgaaagagtggtggccctgatttgctgtgagaaattacacaaaattggagaactggacgaccacctcatgcccgttggcaaggaaactgtgaagtacgaagaggagctggatctgcacgacgaagaggaaacaagtgtcccagggcgccccgggagcacaaagcgcagacagtgttaccctaaggccatccccgagtgtcttcgagattcatacccccgacctgatcagccctgttatctttatgtgatcggaatggtgctgacaactccattgcccgacgaactgaacttcagaaggcgcaagctttaccccccagaagacacaacaaggtgcttcgggatcctgacagcgaaacccataccacagatcccgcactttcccgtctacacacgttctggagaggttactatctccatcgagctgaagaaaagcggcttcatgctgagcctgcagatgcttgagcttataacccggctccatcagtacatcttttctcacatactgagacttgaaaagccagccttagagttcaaaccaacggatgctgactcggcatattgcgtgctgcctctaaacgtcgtgaacgattcaagcactttagatattgattttaaattcatggaggacatagaaaagtctgaagccaggatcggcatccccagcactaaatacactaaggaaaccccctttgtattcaagttggaggattaccaggacgccgtgatcattccccggtatcgcaacttcgaccagccacaccggttctatgtcgcagatgtctataccgacctgacccctctgtctaagtttccttcacccgaatatgagacttttgcagaatattacaaaacaaaatataatctcgacttgaccaatttgaatcagccactgctggatgtcgatcatacaagttcacggctcaacctactgactccccgccatctgaatcaaaagggcaaggcacttccactcagtagtgctgaaaagcgtaaggccaaatgggaaagcttgcagaacaagcaaattctggtgcctgagctgtgcgccattcacccaatccctgcctctctctggaggaaggcagtttgtttaccctctatcctatatcgcctccattgcctgctgacagccgaagaactgagagctcagaccgcgagcgatgccggggttggagttcggtccctgccagcggactttaggtaccctaacctggattttggatggaaaaagtctatagattccaagagctttatatcgatttccaacagtagttctgctgagaacgacaactactgtaaacactcaacaatcgtgcccgagaatgctgcccaccagggcgccaacagaaccagttcccttgagaatcacgatcagatgagtgtgaattgccggacactactgtctgaatcacctggaaaactgcatgtggaagtgtctgctgaccttacagccattaacggtctgagctataatcaaaatctggcaaatggttcgtatgatcttgccaatcgcgacttctgccagggaaaccagcttaactattacaagcaagagattcctgtccagccaaccacatcatacagcatccagaacctgtatagctacgagaaccagcctcaaccaagtgacgagtgcacacttttgtcaaataaatacctcgacggcaatgctaataaatccacgtctgacggctcaccggttatggccgtcatgccagggaccacagacacaatacaggtccttaagggtcgcatggactctgagcagtcaccatccatcggctattcctccagaacactgggacctaaccctgggctcattctgcaggccctcactctctccaatgcttcggacggctttaacctggagcgcctggagatgctaggcgattccttcctgaaacacgcgatcactacatatctcttctgcacatacccggacgctcatgaagggcgcctgtcctacatgcgctccaagaaagtgtcaaattgcaacctctaccggcttgggaaaaaaaaggggctgccaagccgaatggttgttagcatcttcgacccacccgtgaattggctcccgcccgggtatgtcgtgaatcaggacaagtccaataccgataagtgggaaaaagacgagatgaccaaggattgcatgttggcaaacggaaaactagacgaggactacgaagaggaagacgaggaagaagaaagcctgatgtggagggccccaaaggaggaggccgactatgaggatgactttctggagtacgaccaggaacacattcgtttcatcgataatatgctgatgggctctggcgcatttgtgaagaaaataagtttgtccccattctccactacagacagtgcatatgagtggaaaatgcccaagaagtcatcgcttggctccatgcctttcagctctgacttcgaggatttcgactatagcagttgggatgctatgtgttatttggacccttccaaggcggtggaggaagatgacttcgtggttgggttctggaacccttccgaggaaaactgtggtgtggacactggcaagcagtctatcagctacgacctgcatactgaacagtgtattgctgacaagagcatagctgactgcgtggaggcgctgctaggatgctatctgacaagttgtggtgaacgggcggctcagctttttctctgctccctcggcttgaaggtccttcccgtgatcaaacggacagacagagagaaggctctgtgccccactagggaaaacttcaatagtcagcaaaaaaacctgtctgtttcttgcgcagcagccagcgtggcttccagcagatcttctgtattgaaggatagcgagtacggatgccttaagatcccaccaagatgcatgttcgatcatcctgacgccgacaaaactttaaaccacctaatctcggggtttgaaaatttcgaaaaaaaaatcaactatcggtttaagaacaaagcttacttgcttcaggctttcacccatgctagctaccactataacacgattaccgattgttaccagaggctggaatttctcggggacgccatcctggactacttgataacgaagcacctgtacgaagatcctcgccagcactcccccggtgtgctcacagacttgaggtcagccctcgtcaacaacaccatctttgcgtcgctggctgttaagtacgattaccataagtactttaaagcagtaagtccagagctgtttcatgtcatagacgatttcgtgcagttccaactggagaaaaacgagatgcaggggatggattctgagaagtctttcctacaaatgtaccccgtgccgctctgcgagaactgtctgaagtggaaccagaagctgcccaatctcgccagactccgcgaactgaccacgggccgctctgaatctctgtggaaatag

SEQ ID NO: 185332 - DNA, 2463 bp, synthetic construct
  misc_feature 1..2463: note = Description of Artificial Sequence: Synthetic coding sequence
  source 1..2463: mol_type = other DNA
atgctggcctgggagagcgaccacttcctgcggatcctggccgagaatgacaattattgcaagcacagtactatagtgccggaaaacgctgcccatcagggagctaaccgaacctccagcctggagaatcatgaccagatgagcgtgaattgccggaccctactgtcggagagtcccgggaagttgcatgttgaggtgtcagcagatctgactgccattaacggattgagttataaccagaacctagcaaacggtagttatgatcttgccaatagggacttttgccagggcaatcagctgaactactacaaacaggagatccctgttcagcctactacctcctactccattcaaaatctgtattcctacgaaaaccagccacaaccctcagacgagtgtaccttattgagcaataagtacctggacggcaatgcaaataagagcacgagcgatgggtcaccggtcatggcggtcatgccaggaacgaccgacaccatacaggtccttaagggtaggatggactctgaacagtccccctccatcggatacagttcccggaccctcggcccgaaccctggattgatcctccaggcactcactctgtctaatgcttcagacgggtttaacctggagaggctcgagatgctgggcgatagctttctcaagcacgccatcaccacgtacctgttctgtacttatccagacgcacacgagggacgtctgtcgtacatgcggtccaaaaaggtttcaaactgcaacctgtatagactgggtaaaaaaaaggggctaccatcaagaatggtggtctccatattcgatccccctgttaattggctgccaccaggttatgtcgtgaatcaagacaagtcgaacaccgacaaatgggaaaaggacgaaatgaccaaggactgcatgctcgccaatggcaaactagacgaggactacgaggaggaggatgaggaggaagaatccctgatgtggagagctccgaaggaggaggcagactacgaggatgattttcttgaatacgaccaggagcacatcagattcatagacaacatgttaatgggttctggggcatttgtgaagaaaattagcctgagccctttttcaactacagacagtgcctacgagtggaagatgccaaagaagagcagtctcggtagcatgcctttttcatccgactttgaggactttgactattctagctgggatgctatgtgctacctcgatccgtcaaaagccgtggaggaagatgactttgttgtgggcttttggaatccgtctgaggagaattgcggagtggataccgggaagcagagcatcagctatgacctccacaccgaacagtgcattgctgataaatcaattgctgattgcgtggaggctttactggggtgctatcttacttcttgcggtgaacgggccgcccaactgtttttgtgttctttgggcctcaaggtgctgcccgttatcaagcgaacagaccgagaaaaggcactttgtcccaccagagagaacttcaactcacagcagaaaaacctaagcgtgtcttgcgcagccgcctccgtcgcaagcagcaggtcctcagttcttaaggattcagaatatggttgtctgaaaatacctcctaggtgtatgttcgatcaccccgatgctgataagactctgaatcatctgatctccgggttcgaaaatttcgagaaaaaaattaactatcggtttaagaacaaggcatatctgttgcaggctttcactcacgcgagctaccactataacacaatcaccgactgctaccagaggcttgaattcctgggagatgccattctcgattaccttattacaaagcatctttatgaagacccaaggcagcacagtcccggcgtgttaacggatctccgctccgctctggtgaacaatacaatcttcgcttcactggctgtcaagtatgactaccataaatatttcaaggccgtctccccggagctgtttcatgtgatcgatgactttgtccagtttcagcttgagaaaaatgagatgcagggaatggactcggagctccgccgcagcgaggaggacgaggagaaagaggaagacatcgaggtgcccaaagctatgggcgatattttcgaatccttggcgggtgcaatctatatggacagcgggatgtcattggaaactgtctggcaggtatattatcctatgatgcggcccctgatcgagaaattctctgccaatgtgcctcggagtccagtgagggagctgctggaaatggaacccgaaactgctaagttttcccccgcggagcggacctacgatgggaaggtccgggtaaccgtggaggtggtcggcaagggaaaattcaagggcgtgggaagatcctatcggatagcaaagtccgcggctgcgaggagagccctgcgctcgctaaaggcgaaccaacctcaggtaccaaatagctag

SEQ ID NO: 185333 - DNA, 801 bp, synthetic construct
  misc_feature 1..801: note = Description of Artificial Sequence: Synthetic coding sequence
  source 1..801: mol_type = other DNA
atgatggccctgggcgccgccggcgccacccgggtgttcgtggccatggtcgccgctgcactgggggggcacccattgttgggtgtctctgccacgttaaatagcgtcctgaactcaaacgcaatcaaaaatctgccccctcccctgggcggcgcagctgggcatcctggctccgccgtgtctgctgctccaggaattttatatcctggaggaaataaatatcagactattgacaattatcagccctacccttgcgctgaggatgaagaatgtggcaccgatgaatactgcgcgagccccacccggggaggggacgcgggagtccagatttgcctggcctgtaggaaacgcaggaagcgctgtatgcgtcatgctatgtgttgcccaggtaattactgcaagaatgggatttgcgtgtcatctgatcagaatcatttcagaggcgagattgaagagaccattactgagtcatttgggaatgatcactccactttagacggatatagccggcgaactaccctgagcagtaagatgtatcacactaagggtcaggaggggtccgtgtgtctgagaagtagtgactgtgcttccggtctgtgttgtgccagacacttttggtccaagatctgcaaacccgtactgaaggaggggcaggtgtgcaccaaacatcgccgcaaaggaagccatggcctcgagatttttcagcgatgctattgtggcgaaggcctgtcgtgcaggatacagaaagatcatcatcaggcctccaattcatctcgactccacacctgtcagaggcactag

SEQ ID NO: 185334 - DNA, 1689 bp, synthetic construct
  misc_feature 1..1689: note = Description of Artificial Sequence: Synthetic coding sequence
  source 1..1689: mol_type = other DNA
atggacgccatgaagcggggcctgtgctgcgtgctgctgctgtgcggggccgtcttcgtaagcccctcccaggagattcacgccaggtttcgcagaggagcccgaagctatcaggtaatatgcagagacgagaagacccagatgatataccagcaacaccaatcctggctgcgtcccgtcctgagatctaatcgggtggaatattgctggtgtaactcggggcgagcccaatgtcattccgtgccagttaaatcatgttctgaacctaggtgttttaatggcggaacttgccagcaggccctttactttagcgactttgtgtgtcagtgtcccgagggatttgcgggtaagtgctgcgaaatcgataccagagcgacttgttacgaagatcaagggatttcgtatcgggggacgtggtctacagccgagagcggcgctgagtgcactaattggaactccagcgccctagcgcagaagccatatagcgggcgaaggccggatgctattcgcctggggttaggaaaccataactattgtcggaaccccgaccgcgattccaaaccttggtgttacgtcttcaaagccgggaaatatagttccgagttttgctccaccccggcatgctcagagggaaacagtgactgttattttggcaatgggtctgcctatcgcggaacccattctttgactgagtccggagcgtcctgcctgccatggaattcgatgattctcattggaaaagtatacacagcccaaaatccaagcgcccaggctctggggctcggaaaacataactattgccgcaaccctgatggcgacgcaaagccttggtgccatgttctcaagaatagacggcttacatgggagtactgtgacgtgccctcgtgttcaacttgtggcctgaggcaatactcccagcctcagtttcggatcaagggcggcctatttgctgatatcgcaagccacccatggcaggctgctatattcgctaagcacagacggtctccgggcgagagattcttatgcggcggaatactgatttcttcttgttggatactgagtgccgcacactgttttcaggagagattccctccccaccatctcactgtgattctcgggcggacctatcgagtggttcccggagaggaggagcagaagttcgaggtggaaaagtatatagttcataaggaattcgacgacgatacctacgataacgacattgccctgctacagctcaagagcgattcctctaggtgtgcacaagaaagcagcgtggtcagaacggtgtgtttacctcccgcagacctgcagctgcccgattggacagagtgcgagctaagtggctatggaaagcatgaggctctgagtcccttctactcagagcgtctgaaggaggctcacgtgcgactctacccaagttctagatgtacgtcccagcatcttttgaatcgaaccgttacagataacatgttgtgcgccggggataccagaagcggggggcctcaagccaatctacacgacgcctgccaaggcgacagcgggggcccactcgtttgcctgaacgatggaagaatgaccttggtgggcattatttcttggggcttgggatgtggtcagaaagacgtccctggagtgtatactaaagtgaccaattacctcgactggatcagggataacatgcgcccatag

SEQ ID NO: 185335 - DNA, 420 bp, synthetic construct
  misc_feature 1..420: note = Description of Artificial Sequence: Synthetic coding sequence
  source 1..420: mol_type = other DNA
atggtggccgccgtgctgctgggcctgagctggctgtgcagccccctaggcgccttagttttggattttaataatataaggagctccgccgacctgcacggagcgcggaaaggaagccaatgcctgtcagacaccgattgcaatacacggaaattctgcctccaacctagagacgaaaaacccttttgcgctacatgtaggggccttcgcaggaggtgtcagagagatgccatgtgttgtcccggcacactgtgcgtgaatgacgtatgtacgactatggaggatgccacacccattctggagcgccagctggatgagcaggatggcacccacgcagaagggacaacgggccatcccgtccaagagaatcagcctaagcgaaagccttccataaagaagagcagcagtatgctagactag

SEQ ID NO: 185336 - DNA, 1683 bp, synthetic construct
  misc_feature 1..1683: note = Description of Artificial Sequence: Synthetic coding sequence
  source 1..1683: mol_type = other DNA
atgcgggacctgcccctgaccagcctggccctggtgctgagcgccctgggggccctgttgggaaccgaagctctcagggccgaggagcctgcagtgggcacatcgggcctcatctttcgggaagacttagactggcctcctggaagcccacaggagcccctctgcttggtggcgctaggcggcgatagcaatggcagcagctcacccctgcgggtggtgggggccctctctgcttatgaacaagctttcctgggtgccgtgcagcgggcaagatggggtcctcgcgacctcgccacatttggcgtctgcaacaccggtgaccgacaggccgccctcccctccctgagaagactgggggcctggttgcgcgatcctggaggacaacgactcgtggtcctgcacctcgaggaggtgacctgggaaccaacaccttcccttcggtttcaggagcccccgcccggcggggccggcccacctgagctggctctgttagtcctgtaccctggcccaggtcccgaggttacagtgactagagctggactccctggggcgcaatccctctgtccatcacgggacacaagatacttggtgctggcggtggatagacctgccggagcgtggcgtggatctggcctagcacttactctgcaaccacgtggtgaggactcccggctgtctaccgctaggcttcaggccctcctgttcggcgatgatcatcggtgcttcacccggatgactcctgccctgctgcttctgcctagatctgagcctgcccccctacccgcccacggccagctggacaccgtcccctttccccccccgagacccagcgccgagctggaggaatctcccccatccgcagatccctttcttgaaacactgacccggttagtgagggcactgcgggtgccgcccgctagagcttcagcaccgcgccttgctctggaccctgatgcattggccgggtttccacagggcctggtgaacctcagcgaccctgccgctctcgagagacttctagacggcgaggagccgctgctgctactgctgcggcccacagcggcaactacaggcgatccagccccactccacgatcccaccagtgcgccctgggccacagctctggctaggagggttgctgctgaactgcaagccgctgcagctgagctgagatctcttcccggtctgccaccggctacggccccactgctggcccgactgttggccttatgtccgggcggccctggtggtttgggtgatccgcttagagctttgctgcttctcaaggctttacagggacttcgcgtagaatggcgagggcgcgatcccagaggccctggtcgtgctcagagatcggcaggcgccacagcggctgatggcccatgcgccctgagggagctgtctgtggatctgcgagctgagcgttccgtgctgatcccggagacgtaccaggcaaacaactgccagggcgtgtgcggatggccacagtctgataggaatccccgttacggaaaccacgtggtgctccttttaaagatgcaggtgcggggcgctgcactcgctaggcctccttgctgcgtgccaaccgcttatgcagggaaactactgatcagtctctctgaagagagaatatccgctcatcacgtgcccaacatggtcgccactgaatgcggctgtcggtag

SEQ ID NO: 185337 - DNA, 600 bp, synthetic construct
  misc_feature 1..600: note = Description of Artificial Sequence: Synthetic coding sequence
  source 1..600: mol_type = other DNA
atgggcgaggccagcccccccgcccccgcccggcggcacctgctggtgctgctcctgctcctgtctactctggttatccccagcgcagcagcacccatccatgacgccgatgcccaagagagctcacttggcttgacagggctgcagagtttgcttcaaggtttttctcgactttttctgaaggggaatctgttacgcggaattgactcgctcttctcagccccaatggattttcggggcctgcccggaaattatcataaagaggaaaaccaagaacaccagctcggaaataacaccttatccagtcacctgcagatagacaaagtcccaagaatggaggaaaaagaagcgctcgtaccaattcaaaaggcgacagacagttttcacacagaactccaccctagggtagcattttggattattaaactccccagaagacgaagccatcaggatgcactagaggggggacactggttgtcagagaagcggcatagactccaggcgattcgcgacggactccgcaaagggactcacaaagatgtcttggaggagggaactgagtcgtcttcacactccagactgtccccaagaaagacctag

SEQ ID NO: 185338 - DNA, 1896 bp, synthetic construct
  misc_feature 1..1896: note = Description of Artificial Sequence: Synthetic coding sequence
  source 1..1896: mol_type = other DNA
atggccctgcggaaggagctgctgaagagcatctggtacgccttcactgctctggacgtggaaaaatctgggaaagtatcgaaatcacagctgaaggttttgtctcacaacctgtataccgtgctccacatcccacatgatcctgtcgcactcgaggagcacttccgcgacgacgatgatggccctgtgagcagccaaggatacatgccctatcttaataagtatattttagacaaagtcgaagaaggcgcatttgtgaaagagcacttcgatgagctctgttggaccctgactgctaagaagaactaccgcgccgactctaatgggaactctatgctctccaaccaggatgcatttcgcctatggtgtttatttaacttcttatcagaagataaataccctctcatcatggtaccggatgaagtagagtacttacttaagaaagtccttagctctatgtccttagaagtctcccttggtgagcttgaagagctcctcgctcaggaggcgcaggtagcacagacaacgggtggactttctgtctggcagtttctggaactgttcaattctggcaggtgcctgcggggggtgggacgtgacacactgtctatggcaatccatgaagtgtatcaagaacttatccaagacgtccttaagcaggggtacctctggaagaggggacacctccgccggaactgggcagaaagatggtttcagctgcaaccctcctgcctttgctatttcgggagcgaggagtgtaaggaaaagagagggatcatcccacttgatgcccactgctgtgtggaagtgctcccagacagagatggaaagcgctgtatgttttgcgtgaaaaccgcgaaccgcacgtatgaaatgtccgcttctgatacgagacagcgacaagaatggacggccgcgatacagatggccatcaggctccaagcggaaggcaagacatccctacacaaggacctaaagcagaaacgcagggaacagcgtgagcaaagagagaggcggcgagccgctaaggaggaagaactgctgcgccttcagcaactccaggaagagaaggagaggaagttgcaggagcttgagttgctgcaagaagcacagcggcaagcagaaaggttactacaggaagaggaagagcggcgccgttctcagcaccgcgaactgcagcaggccctggagggtcagctgagagaggccgagcaggccagagcctctatgcaggcagaaatggaattaaaagaggaggaggccgcccggcagcgtcagcgcatcaaggagctggaagaaatgcaacagcgcctgcaggaggctttgcaactggaggttaaggcaagacgggacgaggaaagcgttcgcatcgctcagaccaggcttctggaagaagaagaagaaaagctcaagcaactgatgcaactgaaggaggagcaggaaaggtacattgaacgcgcgcagcaggaaaaagaggagctgcagcaggagatggcccagcaatctaggtctctgcaacaagcccagcagcagcttgaggaggtaaggcagaatcgccagcgtgccgacgaggatgtggaggccgctcagcggaagctccgccaggcaagcacaaatgtgaaacattggaatgtacagatgaatcggctgatgcaccctattgaaccaggggataaaaggccagtcacgtcttcgtccttttccgggttccagccacccctgctcgctcacagggattctagcctcaagcgtctcacccgatgggggtcacagggaaaccggactccctctccgaactctaacgagcagcagaagtctctgaacggaggcgatgaagccccagctcctgcgagtactccgcaggaggataagcttgatccagctccagaaaactag

SEQ ID NO: 185339 - DNA, 555 bp, synthetic construct
  misc_feature 1..555: note = Description of Artificial Sequence: Synthetic coding sequence
  source 1..555: mol_type = other DNA
atggccctgcggaaggagctgctgaagagcatctggtacgccttcactgccctcgatgtggaaaagtctggcaaggtgtcaaagtcacagctcaaagtgctgagtcataatctgtacacagtcctgcacattccccacgatcctgtggccctggaggagcacttcagggacgatgacgacggacctgtatcaagccagggctatatgccctacctcaacaaatatatcctggacaaggacgcattccggctttggtgtctcttcaattttctctccgaggacaagtatcccttaatcatggtgcctgatgaggttgagtacctgctgaagaaggttttatcgagcatgtcactagaggtgagtctcggggagttagaggagctgttggcccaggaggcccaggtggctcagaccaccggcgggttgagcgtttggcagttcctggaactttttaactcagggaggtgtctacgcggagtgggaagagatactttgagcatggccatccacgaagtgtaccaggagctcatccaggacgtactcaaacagggctag

SEQ ID NO: 185340 - DNA, 393 bp, synthetic construct
  misc_feature 1..393: note = Description of Artificial Sequence: Synthetic coding sequence
  source 1..393: mol_type = other DNA
tgacgggacgacgacgacggccccgtgagcagccagggctacatgccttacctcaataagtatatactagacaaggatgcattccgtctctggtgcctgtttaactttttatccgaggacaagtacccactgattatggtaccagacgaggtggaatacctgttgaagaaagtcctcagctctatgagcctcgaggtcagcttgggcgaacttgaagagctgctggcacaggaggcgcaggtggcacagactacagggggattgagcgtttggcagtttcttgaattgtttaacagtggtcgatgtctccgaggtgtcgggcgggataccctttctatggctatacatgaggtgtaccaggagctgatccaggatgtcctgaagcaaggttag

SEQ ID NO: 185341 - DNA, 1131 bp, synthetic construct
  misc_feature 1..1131: note = Description of Artificial Sequence: Synthetic coding sequence
  source 1..1131: mol_type = other DNA
atgatctgccccccccggccccccaaggtgctgggcctgcaggtgctgccagatcgggacggcaaacgctgtatgttctgcgttaagacggctaacaggacatatgaaatgtccgcatcggatacccggcagagacaggaatggaccgctgctatccagatggccatccggttgcaggctgaaggcaagaccagtctgcataaggaccttaagcagaagcggagagagcagcgggaacaacgcgagagacgccgagctgctaaggaggaggaattactacgactgcagcagcttcaagaagagaaggaaagaaagttacaagagctggagctgcttcaggaggcccagcggcaggccgaaaggctgctccaggaggaggaggaaaggagacggtcccagcatcgggagttgcaacaggcgctggaaggtcagctgcgggaagctgagcaggcccgcgcatcaatgcaagctgagatggagctgaaggaagaggaggcagctcggcagagacagagaattaaagagctggaagagatgcagcagcggctccaggaggcgctgcaactggaggtcaaggccaggagagacgaagagagcgtgcgcatcgcccaaactagattgttggaggaggaggaagagaaactaaagcagctcatgcagctgaaggaagagcaagagcgttacatcgaacgcgcccagcaagagaaggaggagttacagcaagaaatggcccaacagtcaagatctctgcaacaggcgcagcaacagttggaagaggttcgccagaaccgacaacgggcagatgaggatgtggaagcggcacagaggaagctccggcaggcgtcgactaacgtgaaacactggaacgtccagatgaatcgcctgatgcaccccattgagcccggtgataagcgccctgtaacatcgtcctccttcagtgggtttcagccccctttattggctcacagagatagctctcttaaacgattgactaggtgggggagtcagggtaaccgcactccctcacccaatagcaacgagcagcagaaatctctcaacggaggggatgaagcacctgcccccgccagtactccccaggaggataagctggatcccgccccggagaactag

SEQ ID NO: 185342 - DNA, 708 bp, synthetic construct
  misc_feature 1..708: note = Description of Artificial Sequence: Synthetic coding sequence
  source 1..708: mol_type = other DNA
atgacccaggtgaccgagaagagcaccgagcaccccgagaagaccacgtcgacaactgagaagaccacccgcactccagaaaagcccacactgtacagcgaaaagacaatctgtacaaagggtaaaaacactccagtgcctgagaaacctactgagaaccttggcaacactaccctgaccacagagacaatcaaagcccctgtaaagtcaacagagaatcctgagaaaaccgctgctgtgacaaagaccatcaagccatcagtgaaggtgactggcgataagtcacttacgactacatcctcccatctgaacaaaaccgaggtgacgcatcaggtcccaactgggagcttcacactaatcaccagccggacaaaactgtcgtctatcaccagcgaagctaccggaaatgagtcacacccctatctgaacaaggacggcagccaaaaaggcatccacgctggtcagatgggcgaaaatgatagcttcccagcctgggcaattgttattgtggtgttggtggctgtgattctcctcctggtctttttagggctgatttttctggtatcatacatgatgaggactcggaggacgcttacacagaatacacagtataatgatgcggaagacgagggcggaccaaactcatatcctgtctatctgatggaacagcaaaacctgggcatgggccagataccctcgccacgctag

SEQ ID NO: 185343 - DNA, 1524 bp, synthetic construct
  misc_feature 1..1524: note = Description of Artificial Sequence: Synthetic coding sequence
  source 1..1524: mol_type = other DNA
cccctggccaacgagaagaccaccctgagccccgccgagcccaccgagaatggcgagaggacaccattcactaatgagaagacaaccccctccagcgcagaacctacagagcatggcgaaagaacaccactggctaacgaaataacgaccccatccagagctgagccaacggagcacggggaacggattgccaacgagaaagccactcctagcccagctaaaccgaccgaacacggcgaaactacggttaatgaagacactacaccttcatcagcagagccaactgagaacggtgagcgcaccccccttgcaaatgagaataccaccacctcccccacggaatcaactgagcacggcgaaagaaccgccaatgagaagaccactcccagccccgccgagcctacagagcacggtgagagaactccatctgctaacgagaagactattccgtcccccgctaagcccactgaacacgaggagatgactcctagcgcaaatgagaataccaccccaagccccgtgaagccaacagagcatggcgaaaaaacaacactggccaacgagaaaattactttatcccctgaaggccctaccgagcacggcgctaagacgacatcagctaacgagaaaataactccaagtttagccaagcctaccgaacacggtgaacggaccacatccccaaacgacaagataacatcttcggctgccgagtctactgagcaccgagaccgcgctacgagcgccaatgtgataacgcccgccccagctgagccgattaagcacgcaaagcgcaccactctggcccacgagaaaatgacacaggttacggaaaagtcaactgaacatcccgagaagaccaccagtacgacagagaagactactcggactcccgaaaaacccacactttactctgagaagacaatttgcactaaggggaagaacacccccgtgcctgagaagcctacagaaaatctcggtaacaccacactcactacagaaacaatcaaagcccccgtgaaatccaccgagaatcctgaaaaaactgccgccgtgactaaaactataaagccttctgtgaaggtgacaggcgacaagagcttgacgaccaccagttctcatttgaataaaaccgaggttacacatcaagtccccactgggagtttcactcttattacaagcaggacaaagctgtcgtcaataacttcggaagcgacaggcaacgaatctcacccttacttgaataaggatggctcccagaagggcatccatgccggtcagatgggagagaatgactctttccctgcttgggccatagtaattgtcgtgcttgtggccgtgattctgctgctggtttttctgggcctaatttttttagtcagctacatgatgcggacacgcagaactctgacccaaaacacacaatacaatgatgctgaagatgaaggaggcccgaattcataccctgtgtacctgatggaacagcaaaatctgggtatgggacagatccccagccctcgctag

SEQ ID NO: 185344 - DNA, 1524 bp, synthetic construct
  misc_feature 1..1524: note = Description of Artificial Sequence: Synthetic coding sequence
  source 1..1524: mol_type = other DNA
cccctggccaacgagaagaccaccctgagccccgccgagcccaccgagaacggtgaacgtaccccctttacgaatgaaaagacgacgccttcgagtgcagaacccactgaacatggcgagaggacaccgcttgctaatgagatcactaccccatccagggctgagcctaccgaacacggagagaggattgcaaacgagaaggccacaccttccccagctaaacccacggagcacggtgaaaccaccgtgaacgaggataccaccccttcatcggcagaacctaccgagaacggagaacggacccctctggcaaacgagaatacaactacctcccccactgaatccaccgagcacggtgagcgcaccgcaaacgagaagactacaccttcgcccgctgagcccacagagcacggagagcgaacaccttcagctaacgagaaaaccatcccatctcccgccaaacccaccgaacacgaagaaatgacacctagcgccaacgagaatacaaccccatcacccgtgaagcccactgagcatggcgagaaaaccacactggccaacgagaaaattaccctatctccggagggtccgactgaacacggcgctaagacgacatctgcgaatgagaagatcactccttcactggcgaagcccacagaacatggagaacggaccacgagtcccaatgacaaaattacatccagcgctgcagagtccactgaacacagagatcgtgctacttctgctaatgtgatcacccccgctcccgctgagcctattaaacacgctaaacgcacgaccctcgcccatgagaagatgacacaggtaaccgaaaagtcgactgagcatcccgagaaaaccaccagcacaacagagaaaactacccggactcccgaaaaacctacgttatattcagagaagactatctgtactaaagggaagaacacaccggtgcccgagaagccaaccgagaatctgggaaatacgacacttactaccgagacaataaaggcgcctgtaaagtctacagaaaaccccgaaaaaaccgcagccgtaaccaagaccattaagccgtctgtgaaagtgacaggcgataagtcactgacgaccacttcttctcaccttaacaagaccgaagttactcaccaggttcccacaggctccttcacactgattacctcacggactaaactttcctcaataacatctgaagcgactggaaataagtctcacccgtacctcaacaaagacggatcccaaaaaggcatacacgctggtcagatgggggagaacgactctttccccgcctgggcaattgtgattgttgtgctcgtcgcggtcatcctgttgctggtattcttggggctgatctttctggtatcctacatgatgcggacaagacgaacgttgactcaaaacactcaatacaacgacgcggaggatgagggtggacccaacagctacccagtgtacctcatggaacagcaaaatctagggatgggccagatcccatcacctagatag

SEQ ID NO: 185345 - DNA, 1524 bp, synthetic construct
  misc_feature 1..1524: note = Description of Artificial Sequence: Synthetic coding sequence
  source 1..1524: mol_type = other DNA
cccctggccaacgagaagaccaccctgagccccgccgagcccaccgagaacggtgaacgcaccccctttaccaatgaaaagacgactccatcttcagccgagccgaccgagcatggggaacggacgcccctggccaatgagattaccacccctagtcgtgccgagccaaccgagcatggcgaacgaatcgccaatgagaaggccaccccatccccagcgaaaccgaccgagcacggcgagaccacagttaacgaagatacaacaccttcttcagcagaaccgaccgagaacggtgaacgtacccccttggccaatgaaaacactacgactagtccaaccgaaagcaccgagcacggtgaaaggacagcaaacgagaaaacaactccttcacccgcggagcctaccgaacatggagagcgaactccatcagcaaacgaaaaaacaattcccagcccagcaaaaccaacagagcacgaggaaatgacgccaagcgccaacgaaaacacaacacctagccctgtaaagcccacagagcacggcgagaagaccacattggctaacgagaagatcaccctcagccccgagggccccaccgagcatggggcaaagactaccagtgctaatgagaaaattaccccgtccctggcaaaaccaaccgagcacggagaacgaacaacctcccccaacgacaagataacctcttctgccgccgagtcaactgagcatcgggacagggctactagcgctaatgtaataacacccgctcccgccgagccaatcaaacatgccaaaagaaccactctggctcacgaaaagatgacacaggtcaccgaaaaaagcactgaacaccccgagaaaacaaccagtactaccgaaaagacaacacggacacccgagaaacccaccctctactcggagaagacaatctgtacaaaagggaagaatacccccgtgcccgagaaacccacggagaacctgggaaacacaactctgactaccgagacaatcaaggcaccggtgaaatcgacagagaaccccgaaaaaaccgctgccgttaccaagacaatcaaaccatcggttaaagtcaccggggataaaagcctcacgaccacaagtagccatttgaacaaaacggaagtgacccaccaggtgcccaccggaagcttcacgctgattaccagccgaacaaagttgtccagcatcacgagcgaagcgactgggaacgaatcacatccatacctcaataaggacggttcacagaagggcatccatgccgggcagatgggagaaaacgactcctttcccgcatgggccatcgtgattgtcgtgctggtggcagttatcctgttactggtttttctgggactgattttcctggtatcctacatgatgagaactcgccgtaccctgactcaaaacacacagtataatgatgccgaggacgaaggtgggcctaattcatacccggtgtatctcatggaacaacagaacctcggcatgggacagatcccttctccccgctag

SEQ ID NO: 185346 - DNA, 1554 bp, synthetic construct
  misc_feature 1..1554: note = Description of Artificial Sequence: Synthetic coding sequence
  source 1..1554: mol_type = other DNA
atggcccagcccgtgcacagcctgtgcagcgccttcggcctgcagtgttgcctcctattcctcttggcaagctggggagctggggcaactacattccaggagtatcagaagaccggggagctctcaacctcagaccatattttcccgctgactcccggcctcgtgtattctattccgttcgaccatattgtccttcatagtggccaaaggcctccagaactgcctaaatccaccgagatacacgaacagaagcgccattgcaacaccaccaggcactccaaacctacagataaacccacaggaaattctaagaccatcgatcacaaatcctcaaccgataatcacgaagcaccccctaccagcgaagaaaactcttcaaaccagggcaaggatccaatgatcagaaatcaacgctctgtggatcccgccgactctacaaccacccacaaggaatcagctggcaagaaacatataacaccggctccgaaatccaagatcaattgccggaagtcaaccacagggaaatcgaccgttactagaaaatccgacaaaacggggcggcccctcgagaaaagcatgtcaaccttggacaagactagcacctcctcccataagactacaaccagttttcacaattctggaaacagtcagactaaacaaaaatcaacttcattccccgagaagatcacagccgccagtaagactacttacaaaaccacgggcacacccgaagagtctgaaaagacagaggatagcagaacaacagtggctagcgacaagctgctgactaagaccacaaaaaatatacaggaaacaatttctgccaacgagctgacccagagtctggccgaaccaaccgaacatgggggccggactgctaatgaaaataacacaccctccccagcagagcccaccgaaaatcgagagcgcacagccaacgagaataaaaaaaccatatgcaccaagggaaaaaacaccccagtgcccgaaaagccaacagagaacttaggtaacactaccctgacaaccgagaccataaaggcaccagtgaaaagtaccgagaaccctgagaagacggccgcagtcaccaagacaataaaacccagtgtgaaggtgacgggggataaatctctgacaacaacaagctcccacctgaacaagacagaggtgactcaccaggtccctaccggcagtttcacactgatcactagccggaccaaactctcctctatcaccagcgaggctacaggcaacgagtcccacccatacctgaataaggacgggagccagaagggtatccatgccggacagatgggagaaaatgattcattccctgcgtgggcaattgtgatcgtggtcctggtggccgtaatcttactgctggttttccttgggcttattttcctggtgtcatatatgatgaggacaagacgcaccctgacccagaacactcagtacaatgacgcagaagacgaaggaggaccaaacagttaccctgtgtatctgatggagcagcaaaatctcggaatgggccaaataccatcacctcgctag

SEQ ID NO: 185347 - DNA, 1554 bp, synthetic construct
  misc_feature 1..1554: note = Description of Artificial Sequence: Synthetic coding sequence
  source 1..1554: mol_type = other DNA
atggcccagcccgtgcacagcctgtgcagcgccttcggcctgcagtgctgcctcctgtttcttctagcctcatggggcgccggagccacaaccttccaagagtaccagaagaccggggagcttagcactagtgaccacatatttccgttgaccccaggactcgtctacagcatcccatttgatcatatcgttctccacagcggtcagaggcctcccgagctacccaaatccactgagattcacgaacagaagcggcactgcaatactacacgtcatagcaagcctacggataagcccactgggaactctaaaacgattgatcacaaatcttcaaccgacaaccacgaggcccctcctacgtctgaagagaattcttctaatcagggtaaagatcccatgatccgcaatcaaaggagcgtggaccctgccgattctaccactactcataaagaatccgcaggcaagaagcatattacacctgcgcccaaaagcaagattaactgtaggaagagcaccactgggaaatcaactgtcacgcggaaatcagacaaaactgggcggccactggagaaatcaatgagcaccttagataagacatctacatctagccataagacaacgacgagcttccacaattctggcaacagccagaccaaacagaagagcacctcgtttcctgagaaaatcaccgcggcgagcaaaacgacatataagaccaccggtaccccggaggagtcagagaaaaccgaggatagcaggaccaccgtcgcaagtgacaagctgttaacaaagacaacaaaaaacatccaagagactatatctgcgaacgaactgacccagtccctggccgaaccaaccgagcatggaggacggaccgcgaatgagaacaacacgccctcacccgccgaacctacagaaaaccgggaacgtaccgcgaacgaaaacaaaaagacaatttgtacaaaggggaagaacactcctgtacctgagaaaccaacagagaatcttggaaacacaactctgactactgaaacaatcaaagccccggtgaagagtacagaaaatccagagaagacggctgccgttactaagactattaagcccagtgtgaaggttacaggcgacaaatcactgacaacaaccagcagtcacctgaacaagacagaggtgacacaccaggtccccacggggagtttcaccctcatcacttctcgaacgaagctgtccagcattacttccgaggcaacgggcaatgagtcacacccatatctcaacaaggatggctctcagaaggggatccatgctggtcaaatgggggaaaacgacagcttcccagcttgggctatcgtgatcgtggtgttagttgcagtcattctcttgctggtctttctgggccttattttccttgtttcttacatgatgagaacccgacggacccttactcaaaatacccaatataatgacgccgaggatgaaggaggaccaaattcatacccagtgtacttgatggaacagcagaacttgggcatggggcagatccctagccctagatag

SEQ ID NO: 185348 - DNA, 1554 bp, synthetic construct
  misc_feature 1..1554: note = Description of Artificial Sequence: Synthetic coding sequence
  source 1..1554: mol_type = other DNA
atggcccagcccgtgcacagcctgtgcagcgccttcggcctgcagtgctgcttactcttcctgctggcgtcttggggagcaggagcgacaacctttcaggagtatcagaaaacaggggaactttctactagcgatcacatttttccgctcaccccaggcctggtgtacagcatcccgttcgatcatattgtgctgcattccgggcagcgtccacccgagttacccaagtcgaccgagatccacgagcagaagagacactgtaacacaactcggcacagtaagcccacagataagcctaccggcaactcaaaaacgatcgaccacaaaagcagcactgacaatcacgaggctccgcctacctctgaagagaatagcagtaaccagggcaaggatcctatgatccggaaccagcggagcgttgacccggccgactcaaccaccacacataaggagtctgctggcaagaagcatatcacccctgcccccaaatcgaagatcaattgcagaaagtctactaccggcaaatcgacagtgacgaggaagtcggacaaaactggacggcctctagagaaaagcatgtccacgctcgacaaaaccagtacttcttcacacaagacgacaacaagctttcacaattcaggaaattctcaaactaaacaaaagagcacgagtttccctgagaagatcacagctgcatccaaaaccacgtacaagacaacaggcacaccagaagagtccgaaaagaccgaggactctcggacaactgttgccagcgacaagctcctaacaaagacaactaagaatattcaggaaaccatcagtgcgaatgaactcacacagtctctagccgaacctacagagcacggaggccgaacagctaacgaaaataatacacccagtccagccgagcccactgagaatcgggagaggaccgctaatgaaaataagaaaacaatttgtaccaagggtaagaataccccagtgcccgagaaaccgactgagaatctgggtaacactactttaaccacagagaccatcaaagccccagtgaaatctacagaaaaccccgaaaaaacagccgcagtgacaaagacaatcaaaccctccgttaaagtcactggcgataagagcttgaccacaaccagctctcatctcaataagacagaggtcactcaccaggtccccaccggctccttcaccctgatcaccagtcggactaagctctccagcattacctccgaagcaacaggaaatgagagccacccttatcttaacaaggatgggtctcagaagggcattcacgccgggcagatgggcgagaacgatagtttccctgcatgggccatcgtcatcgtagtccttgtggccgtaattttgctgttagtgttcttgggactgatttttttggtatcttacatgatgcgtacccggcggactctgacccagaacactcaatataacgacgctgaagacgaggggggccctaatagctatccagtttaccttatggagcaacagaacctgggaatgggccagataccaagcccgagatag

SEQ ID NO: 185349 - DNA, 4182 bp, synthetic construct
  misc_feature 1..4182: note = Description of Artificial Sequence: Synthetic coding sequence
  source 1..4182: mol_type = other DNA
atggcccagcccgtgcacagcctgtgcagcgccttcggcctgcagtgctgcttgctgttcctgttagctagctggggggcaggagccactacctttcaggaataccagaaaacaggtgagctctccaccagcgaccacatcttcccactgaccccagggctcgtgtactctattccatttgaccatattgttctccactctggccaaaggcccccagagctaccaaagagcaccgagattcatgaacaaaagagacattgtaataccacacggcactccaaacctaccgataagcccaccggaaattctaaaactatcgaccacaaatccagcacagataatcacgaggccccccccaccagtgaggagaactctagcaaccaaggaaaggatcctatgattcgcaaccagcggagcgttgaccccgctgactctaccaccactcataaggagagcgcggggaaaaaacacattaccccagcccccaagtctaaaattaattgtaggaaatccaccactggaaaatctaccgtgacgagaaaatccgacaaaaccggacgtcccctcgaaaagtccatgagcactctggataaaaccagcacctcatctcacaagacaacaacttcgtttcacaactcaggaaattcccagactaagcagaaatcgacctctttcccggagaagatcacggcggcgtctaaaactacctacaagaccaccggcacgcccgaagaatctgagaagaccgaggactctaggacaaccgtagcttccgataagctccttacaaaaactaccaagaatatccaggagaccatatcagccaacgagctgacacagtcgctggcggagcccaccgaacacgggggtcgtacagccaacgaaaataatacacctagccctgctgaacccacagaaaacagagagcggactgcgaacgaaaacacaacattgtctccagccgaaccaaccgagaaccgcgaaaggacggccaatgagaataccgcccctttccctgctggccccacggaaaatagagagatgacagctaacgagaacaccactttatttcccgcagaacctacagaacacggagaacgaactgcaaacgagaatactacacctagtcctgctgagcccaccgaacatggagagaggaccgcgaacgagaacaccacaccctcacctgcggagccaactgagcatggggagagaacaccctttgcgaacgacaagactacgagctctagcgctgaatctacggaacacggcgagaggaccccactagcgaatgagaacaccacgccgtcccccgccgaacccactgagaacagagagaggactgctaacgagaatactacaccctctcccgctggacctactgaaaaccgggagacaactgcgaatgagaagacaaccctgagtcccgtcgagcctacagagaatcgggagaccactgccaacgagaagaccacacccagccctgctgaacccacagagaacggccagcggacccctttcgccaacgagaaaaccaccagttcatccgctgagccaactgagcatggagagagaactcccctcgcaaacgagaataccaccccttccccggctgagccaacagagaacagagaacgtacagccaatgagaaaactacaccctcaccagcagaaccgacagagaatggggaccgaactccactggcgaacgaaaagactactccctcattggccgaacctactgagaatggacagaggactcccttcgctaacgagaagaccactagttccagcgctgaaccaacggagcatgaggagagaactccgctcgcaaacgagaacaccaccccctccccagctgagccaactgaaaacagagaaaggacagctaacgagaatacaaccccaagtcctgcaggccctaccgagaaccgggagatgactgctaacgaaaaaaccacattgtttcctgccgaaccgactgagaacagggaaaggactgccaatgaaaagaccacctcttctccagccgagcccaccgagaacggtcagaggacgccgtttgccaacgaaaagacgacgtctagttctgccgaaccaaccgagcacggagagcgcacacctctggccaatgagaacactactttgtcccctgctgagcctaccgagaaccgggaacgcacagcaaatgaaaaaactacaccattccctgcggaacctaccgagaaccgcgaacgcacagccaatgaaaataccaccccttctccggctcagccaaccgagaacggggatcggacccccttggcaaacgagaagacaactcccagcctggccgagcctactgaaaacggaaaaagaactccattcgcaaacgagaaaaccacaagcagttcagctgagcccactgagcatgccgagcggacaccacttgctaatgagaatactacgagcagtcctgccgaacccacggaaaacagggagcgcacggccaacgagaagactacacagttcccagccgaacctacagagaatcgagaatcaaccgctaacgaaaagacaacccccttccccgcggaacccacggaaaatcgggaatggacagccaatgagaacactactctgtcaccagcagagccaactgagcacgaagagatgacccctttagcaaatgagaagaccactctgtctcctgctgagcctaccgagaacggtgagcggacaccttttaccaatgaaaaaacaaccccctcaagcgctgaaccaacagagcacggcgaaaggacccccctagccaacgagattacgaccccaagcagagccgaaccaaccgaacacggcgagagaatagccaacgagaaggcaactccatcgcctgccaaacccacagagcatggggaaacgactgtcaatgaggatacaactccttccagtgcagagccaaccgagaacggcgaacgcacacctctcgcaaatgaaaacaccaccacttctcccacggaaagcacagagcacggcgagagaacagccaacgaaaagactaccccatcaccagcagaacccacggagcatggagaaagaaccccatccgccaacgaaaagactataccaagccccgctaagccaacggagcacgaggagatgactccgtccgccaacgagaacacaacaccttcccctgtcaagcctaccgagcacggagaaaagacgacattggctaatgagaaaatcacactgagtcccgaaggacccacggaacacggtgctaagaccacctctgcgaatgagaagattaccccgagcctggcaaagcccacagaacacggcgagaggacaacatcaccgaacgacaagattacatctagcgctgccgagagtactgagcatagagatcgggctacgtcagccaacgtgataactcccgcccccgcggaaccaatcaaacacgctaaacgcacaactctagctcacgagaaaatgacccaggtgacagaaaaatctactgagcacccagagaagacaacatccaccacagagaagactacaagaacgccagaaaagcccacactctacagtgagaagacaatctgcacaaaaggcaaaaatacgcctgttcctgaaaagcctaccgagaatcttggcaacaccaccctgacgactgagaccattaaggccccagtgaaaagtaccgagaatcccgagaagaccgctgctgtgactaaaaccattaaaccctcagtaaaagttaccggcgacaagtccctaacaacgacaagctctcacctcaataagacggaagtcactcaccaggtgcccactggcagctttaccttaattacttctcgtacaaagctttcttcaatcaccagcgaggctactggcaacgagagccatccctacctaaataaggacgggtcacagaaaggcatccatgcgggacagatgggcgagaatgactcattccctgcctgggccatcgtgattgtcgtgctagtcgctgttatacttctgcttgtgtttctcggtttgattttcttggtatcctatatgatgcgcaccagacggaccctaacacagaatacacagtataatgacgcagaggacgaggggggacctaattcttaccctgtttacctgatggaacagcagaaccttggtatggggcagatcccttcccctagatag

SEQ ID NO: 185350 - DNA, 2670 bp, synthetic construct
  misc_feature 1..2670: note = Description of Artificial Sequence: Synthetic coding sequence
  source 1..2670: mol_type = other DNA
atggcccagcccgtgcacagcctgtgcagcgccttcggcctgcagtgttgcctcttgttcttgctcgcttcatggggtgcgggcgccactacgttccaggagtatcagaagactggcgaacttagtactagtgaccacatttttcccctcacacccggcctcgtttattccattccttttgatcatattgtcttgcattctggccaacgcccgcccgaattgcccaagagcaccgagattcatgagcagaagaggcactgtaacacaactaggcattcaaagcctactgataagcctacaggcaacagcaagactatcgatcacaagtccagtacagacaatcacgaggcccctccaaccagtgaagagaattcttctaatcagggtaaggatcccatgattagaaaccagaggagcgtggaccctgctgactccacaactacccacaaggaaagcgctggtaaaaagcacattacaccggcccctaagtcaaagatcaattgccgtaagtccaccacaggaaaatcgaccgtaaccaggaaatcagataagaccggacgaccgcttgaaaagtctatgtccaccctggacaagacatcaacctcttcgcacaaaaccacgacctcgttccacaacagcggcaactcacaaaccaagcagaaatctacctcctttcctgagaagatcactgccgcctctaagacaacatataaaactactgggactccggaggaaagcgaaaagaccgaagactctcggacaactgtggccagtgacaagcttcttaccaagactacaaaaaacatccaggagaccatcagcgcaaacgaattgacacagagtctcgccgagcccacggaacatgggggaagaacagcaaatgagaataataccccctctccagctgagccaactgagaaccgtgagcgcaccgccaatgagaacacaacactctcacccgccgagccgactgagaatagggagcgtaccgcaaacgaaaatacggcacccttccctgccggtcctactgaaaaccgggagatgaccgccaatgagaataccacgctgtttcctgcagagcccacagaacacggtgaacggactgccaacgaaaatactaccccgagccccgccgagcctactgaacatggtgaacggaccgccaatgaaaacacgactccatcccccgccgaaccaaccgagcatggagagaggacgccattcgccaatgacaaaaccacctctagctctgcagagtccacagaacatggggaacggacccccctagccaacgaaaataccaccccttcccctgcagaacctaccgaaaatcgggaaaggacagctaatgaaaataccactccaagcccagcgggtcctacagagaacagggagacgacggctaacgaaaagacaacactgtcccctgtcgagccgaccgaaaatcgtgaaacgacggctaatgagaagactaccccatcccccgctgagcctaccgaaaacggacagaggaccccatttgcaaacgagaaaacaaccagtagctccgctgagccaaccgaacacggggaacgaactcccctagctaacgagaacacgacaccatctcctgcagaacccaccgagaatagagagagaaccgcaaatgaaaagaccaccccctcccccgccgagcccaccgaaaatggtgaccggaccccacttgccaatgaaaagaccacacccagcctagccgagccaaccgaaaacggccaacgcacgccatttgctaatgaaaaaacaacttcgagttccgcagaacccaccgaacatgaggaaaggactcctcttgccaatgaaaacacgacacctagtcctgccgaacctacagagaaccgagagcggacagctaacgagaatactaccccatcaccagccggtcctacggagaatcgggagatgactgccaacgagaagacaacactgtttcctgctgagccaaccgaaaaccgagagagaaccgcaaatgagaagacgacatctagtcctgccgaacctactgaaaacggacagcgaacgcccttcgccaatgaaaagaccacttctagttcagccgagccaacagaacatggggagcgcactcctctggcgaatgagaacacgactctatccccagctggtcccacagagaacagagagagaaccgcgaacgagaaaactacccctttcccggcggaacctaccgagaacagagagaggactgccaacgagaacaccacaccttctcccgcccagcccaccgagaacggagatcggacaccactggccaacgagaagactactcccagtctggccgaacctaccgagaatggtaagcgaacgcccttcgccaacgagaagaccaccagcagtagcgctgagccgactgagcatgccgaaagaacgcccttagcaaacgagaatactacaagcagtccagctgaacccaccgagaatagggaaagaaccgccaatgaaaaaacaacacagtttccggcggaacctaccgaaaacagagagtctacggcaaatgagaaaaccacaccattccctgctgagcccaccgagaacagggagtggacagcaaacgaaaatactaccttgtcacctgctgagcccaccgaacacgaggagatgacgccactggcctag

SEQ ID NO: 185351 - DNA, 1653 bp, synthetic construct
  misc_feature 1..1653: note = Description of Artificial Sequence: Synthetic coding sequence
  source 1..1653: mol_type = other DNA
atggtgcccaaggccgacagcggcgccttcctgctgctgttcctgcttgtgttaaccgtgaccgagccgttaagacctgagcttagatgcaacccagggcagttcgcctgcagatccggcaccatccagtgcatacctctgccttggcagtgcgacggctgggctacctgtgaagatgagagcgatgaagccaactgcccagaggtaacgggagaagtgagaccccaccatggcaaagaagccgtagatcctcggcagggaagggcaagaggcggcgatccatcgcactttcacgccgtgaacgtggctcaacctgtgagatttagctcttttctgggaaagtgcccaaccggctggcaccactatgaaggtactgcttcgtgctatagagtgtatctctcaggggagaactactgggatgcagctcagacttgccaacgcttaaacggatccctcgccacattttcaaccgatcaagaactaaggttcgttttggcccaggaatgggatcagcctgagagaagttttggatggaaggaccagagaaaactctgggttggatatcagtacgttataaccggacgaaataggtctctggagggacgatgggaggtcgctttcaaaggaagttctgaggtttttttgcccccagatccgatctttgcttccgccatgtcagagaacgataatgtgttttgtgctcagcttcaatgcttccacttccctaccctgagacatcacgatcttcactcttggcacgctgaatcctgttatgaaaagagcagcttcctgtgtaagcgatctcaaacctgtgtggatataaaggacaacgtagtagatgaagggttctactttacccctaagggagatgacccttgcctttcttgtacatgccatggaggggaaccggaaatgtgcgtggctgccttatgtgagcgaccccagggatgccaacagtacagaaaggatccgaaggaatgctgtaaattcatgtgtttagatcccgacgggaatagccttttcgattccatggcctctgggatgaggctggtggttagttgcatctcctcattcctcatacttagtctgctcttgtttatggtgcacaggcttcgccaacgccgccgtgagaggatcgaatctctcataggagctaatctccaccatttcaacctgggccggcggattcccggattcgactacggccccgatggcttcggcacaggcttaacccctctgcacctgagcgacgacggagagggaggtactttccattttcacgatccccctcctccttacaccgcctataagtacccggacatcgggcagcctgacgatccaccacctccgtatgaagcctccatccacccggattcggtattttatgacccagctgatgatgacgccttcgaacccgtcgaagtgtccttacccgctcctggagacggagggagtgaaggagctttactgagaagattggagcagccccttccaactgcgggtgcatcactggccgatctggaagacagcgccgattcctccagcgctctgctcgtacctcccgaccctgcgcagtccggatctacccctgctgccgaagcactcccgggcgggggcagacatagccgctctagtctcaataccgtggtctag

SEQ ID NO: 185352 - DNA, 984 bp, synthetic construct
  misc_feature 1..984: note = Description of Artificial Sequence: Synthetic coding sequence
  source 1..984: mol_type = other DNA
atggtgcccaaggccgacagcggcgccttcctgctgctgttcctgctggtactaaccgtgacagaacctcttcgccctgagctgcggtgcaatcctggccagttcgcttgccggtcaggtactattcaatgtattccccttccctggcaatgcgacgggtgggccacatgcgaggacgagtccgacgaggcgaattgtcccgaagtcactggcgaagtacggcctcatcacggtaaggaagcggtggacccacggcaaggcagggccagaggcggagatccatcacattttcacgcagtgaatgtcgcccaacctgtccgcttcagtagtttcctgggcaagtgtccaaccggctggcaccactacgaggggaccgcatcctgttatagagtgtatcttagcggtgaaaactactgggatgcagcacagacatgccagcgtctgaatggatccctggcgacgtttagcaccgatcaagagttgagatttgtacttgcccaagagtgggaccagccagagcggtcattcggatggaaagatcagcggaagctgtgggtgggttatcagtacgttatcaccggacgcaaccggagcctggaggggaggtgggaagtggcctttaagggaagcagcgaagtttttcttccaccagacccaatcttcgcttctgcgatgtcagagaatgacaacgttttttgcgcacaattgcagtgctttcatttcccaacacttaggcaccatgacttacactcttggcatgcagaaagctgctatgagaagtcttcgttcctttgcaagagatcccagacatgtgtggacataaaagacaacgtagtggatgaggggttctacttcacccccaaaggagacgacccttgcctgtcctgcacatgtcatggaggcgaacccgagatgtgtgtggcggccctatgcgagcggcctcaaggttgttctccactcagctgcaccgcgagggcgacttag

SEQ ID NO: 185353 - DNA, 1530 bp, synthetic construct
  misc_feature 1..1530: note = Description of Artificial Sequence: Synthetic coding sequence
  source 1..1530: mol_type = other DNA
atggtgcccaaggccgacagcggcgccttcctgctgctgttcctgctggtcctgaccgttacagagcctttacggcctgaggttactggcgaagtaaggccacaccatgggaaagaggctgtggacccccgccagggtcgtgcccggggcggcgatccttcacacttccatgccgtcaatgtcgcccagcctgtgcgattcagcagcttcctgggaaaatgtccaactggctggcaccactatgaaggcacagcaagctgctaccgcgtttatctgagcggtgaaaattattgggatgctgcccagacatgccagcgtctgaacggatcactcgctacgtttagcacagatcaagagttgcggtttgtgttagctcaggaatgggatcaaccggaacgatcctttggctggaaggaccagcggaaactgtgggtcggctatcaatatgtgataaccggccggaaccgctcgctggaggggagatgggaagtggcattcaagggcagtagtgaggttttccttcctccagatccaatttttgccagcgcaatgtccgagaacgataacgtgttctgtgctcagctacagtgttttcattttcctaccctaaggcaccacgatctgcactcctggcatgccgagtcttgctatgaaaaatccagtttcctgtgtaaacgctctcaaacttgtgttgacatcaaagataatgtggttgacgaaggcttctatttcaccccaaagggggatgatccgtgtctgtcttgcacctgccatggcggggagcctgagatgtgtgtggccgctctctgcgagcggccccaggggtgccagcaataccggaaggaccctaaagaatgctgtaagtttatgtgcctggatcctgacggtaacagcctgttcgatagcatggccagcgggatgcgcctggtcgtcagttgtatttcatcttttctcattctcagtctcctgcttttcatggtacacaggctgcggcaaaggcgccgtgagcgcattgaaagcttgatcggggccaacctgcaccacttcaacctcgggcgccggatccccggctttgattacggccccgatggttttggcactggactgaccccgcttcacctttcagacgacggtgagggtggcactttccactttcacgatcctcccccgccctataccgcctataagtacccggatattgggcaacccgatgacccccctcctccatacgaggcttcaatacatcccgacagcgtgttttacgatcccgcagacgacgacgcctttgaacccgtcgaggtgtcattgcccgcccccggcgacggtgggtccgagggggctctgctgaggagactggaacagccactgcccaccgccggagcctctctggccgacctcgaggattcggctgactccagttcagccctcctggtcccacctgatcccgcacaaagcggcagcacaccagcggcggaagccctgcctggaggtggacggcattctcgatcctccctgaatactgtggtgtag

SEQ ID NO: 185354 - DNA, 810 bp, synthetic construct
  misc_feature 1..810: note = Description of Artificial Sequence: Synthetic coding sequence
  source 1..810: mol_type = other DNA
atggtgcccaaggccgacagcggcgccttcctgctgctgttcctgttggtgttgacggtgaccgagccgctcaggccagagttgaggtgtaatcccggccagttcgcctgccggtccggtacaatccagtgtatcccccttccctggcaatgtgacgggtgggcaacctgcgaggacgaaagcgacgaggctaactgtcccgaagtcactggagaggtgaggcctcaccacgggaaagaggccgtggatcccagacagggacgggcccgagggggtgatccttctcacttccacgctgttaatgttgcacagccggtaagattcagcaggaaatgccctacaggatggcatcactatgaaggaaccgctagttgttatagggtctatctttctggcgagaattactgggacgcagctcagacatgtcagaggctgaatggttccctggcaacatttagtacagatcaggagctccggtttgttctggcacaggaatgggaccaacctgagaggtcttttgggtggaaggaccaacgcaaactgtgggtgggttatcaatacgttatcactggccggaacaggagtcttgagggaagatgggaggtcgctttcaaagattggggggtcagcgacacaatggtacatcggcgcttgctgtgtccctgcgtgggaaccctacacacacacctgaagttgggcgccagattcagaagggtccctgtgcgcctcggcggggcactaagtcggcgtagtccaagacccaccccagcctgcgagccaaggctgggcgcgaagaccttacaggtttag

SEQ ID NO: 185355 - DNA, 663 bp, synthetic construct
  misc_feature 1..663: note = Description of Artificial Sequence: Synthetic coding sequence
  source 1..663: mol_type = other DNA
atggagcggtacgccggcgccctggaggaggtggccgacggcgcccggcagcaggagcggcattatcaacttctgtccgccttgcagagtttggtgaaggaactgccatcttctttccaacagaggctgtcatacactacacttagcgacctggctctggccttgctcgatggcactgtgtttgaaatcgtccagggcctgctcgaaattcagcacttaactgagaaaagtctgtataaccaacggctacggttgcagaatgaacacagggtactgagacaggctctgcgtcagaaacatcaagaagctcagcaggcctgtcggccacacaatctgcccgtgttacaggctgcacagcaacgcgagctggaagcagtcgaacaccgcataagggaggagcaaagggccatggaccaaaagattgtgctagagctggacaggaaagtggcggatcagcaatctactttagaaaaggccggtgttgccgggttctacgtgacgactaatccacaggaacttatgcttcaaatgaatctcctcgaattaatcagaaaactccagcagcgaggttgttgggccggaaaagccgctctcgggctgggggggccatggcagctgccagccgctcagtgcgatcagaagggtagccccgtccctccttag

SEQ ID NO: 185356 - DNA, 663 bp, synthetic construct
  misc_feature 1..663: note = Description of Artificial Sequence: Synthetic coding sequence
  source 1..663: mol_type = other DNA
atggagcggtacgccgccgccctggaggaggtggccgacggcgccagacagcaggagcgtcactaccagttgctcagcgccctgcagtcgctggtgaaggagctaccatcctcattccagcagaggttaagctatacgacattgagcgacctcgcactggcactcttagacggtacagtgttcgaaattgtacaaggtctgctggagatccagcatctgacggaaaagtcgttgtataatcagcgcctgagacttcagaacgagcatcgggtgttgagacaggctcttcgtcagaaacatcaggaggcacaacaggcttgtagaccacacaacttgccggtggtgcaagccgcacaacaaagggagcttgaagccgttgagcataggatccgggaggaacaaagagccatggatcagaaaattattctcgagttggatcgaaaggtggctgaccagcagtccaccctggagaaagccggcgtagcgggattttatgtcacaactaacccccaggaactcatgttgcagatgaacctgctagaattgattagaaagctgcagcagagaggatgcagagcaggaaacgctgccctcggcctgggggggccgtggcagtcaccggcagcacaatgcgatcaaaagggcagtcctgtgcccccttag

SEQ ID NO: 185357 - DNA, 2322 bp, synthetic construct
  misc_feature 1..2322: note = Description of Artificial Sequence: Synthetic coding sequence
  source 1..2322: mol_type = other DNA
atggagaccgacgagagccccagccccctgccctgcggccccgccggcgaggctgttatggagtcacgcgcccgacctttccaagcgttaccgcgcgagcagtcccctccgcccccactacaaacgagctctggcgccgaggtgatggacgtgggctctggaggagacggccagtccgagctgcctgccgaagatccttttaatttctacggcgcttctctcctgtcgaaggggtccttcagcaaaggccgtctactgatagaccccaattgtagcggccattccccaagaacagcccgccatgcccctgctgttcgcaaattctcgccagaccttaagctgcttaaggatgtaaaaatctcagtgagtttcacggaaagctgccgaagcaaagacagaaaggttctgtatacgggcgccgaaagggacgttcgcgctgagtgcggactccttctgagtccggtgtctggtgacgtgcacgcatgcccgttcgggggctcagttggcgatggtgtgggaatcggcggagagagcgccgacaagaaagacgaggaaaacgagctcgaccaagagaaaagggtggagtatgcagtgttggacgaactcgaggatttcacggacaacttagagttagatgaagaaggcgcgggagggttcacggctaaggccatagtgcagagagaccgggtggacgaggaagccttgaattttccctatgaagacgatttcgataacgacgttgacgctctgctggaagagggcttgtgtgcaccaaagaaacgccgcacggaagagaagtacggcggggattccgatcacccaagcgacggggaaactagcgtccagcctatgatgactaaaatcaaaactgttctgaagtcgaggggaagacccccaaccgagccccttcccgacggttggataatgacattccataactctggggttcctgtgtacctgcatagagagagccgcgtggtgacatggagcagaccttacttcttgggaactggctcgataagaaagcatgatccccctctcagctccataccgtgcctacactacaagaaaatgaaggacaatgaagagcgagaacaatctagtgacctcacgccatccggcgatgtctctcctgtgaagcctctgagcaggtccgctgaacttgagtttcctctcgacgagccggacagtatgggggcagaccccgggcctccggacgaaaaagatcctctcggcgcagaagcggctcctggtgcactgggtcaagtcaaggcaaaggtcgaggtgtgtaaagatgaatctgtggaccttgaggaatttaggagttatctcgagaaacgttttgacttcgagcaagtgactgtgaagaaattcaggacatgggctgagagacgccagttcaacagagaaatgaagagaaagcaagcagaaagcgagcggcctatccttcctgcaaaccagaagctaatcaccctttcagtccaagacgcccccaccaaaaaagagtttgtcattaatcctaacggaaaatccgaagtgtgcattctgcacgagtatatgcagcgggtgctcaaagtgcgcccagtgtacaatttcttcgagtgtgagaacccctcagagccgtttggggcgtcagttaccatcgacggagtcacctatgggagcggcaccgcaagttctaagaaacttgcaaagaacaaggccgccagagctactctggaaattttgattcccgattttgtgaagcagaccagcgaggagaagcccaaggattccgaagaattggagtacttcaaccacatcagcatcgaggatagtagggtttacgagttgacaagcaaagcagggctccttagcccgtaccagatcctccacgaatgcttaaaaaggaaccacgggatgggggataccagcatcaaatttgaggtggttcccgggaagaaccagaagagtgaatacgtgatggcttgtggcaaacatactgtgagaggttggtgcaaaaataagagggtcggaaaacagctagccagccagaaaatcctccaattgttgcatccccatgtgaagaattggggctctctccttagaatgtacggtcgggagtcctcaaagatggtgaagcaagagaccagtgacaagtcagtcattgagctacagcagtacgcaaaaaagaataaacccaacttgcacatactctccaaactccaggaggaaatgaaaaggctcgctgaggagagagaagagacgcgaaagaagcctaaaatgtccatcgttgcttctgcacagccaggcggggagccactctgcaccgtggacgtatag

SEQ ID NO: 185358 - DNA, 2223 bp, synthetic construct
  misc_feature 1..2223: note = Description of Artificial Sequence: Synthetic coding sequence
  source 1..2223: mol_type = other DNA
atggagaccgacgagagccccagccccctgccctgcggccccgccggggaagctgtgatggagagccgagctcgtccattccaggctctcccgagagagcagtcccctcccccaccgcttcagacctcaagcggtgctgaggtgatggatgtaggctctggcggagacgggcagtctgagctgcccgctgaagatcccttcaatttttacggcgcctctttgctgtctaaagggtcctttagcaaggggagacttctaatagacccgaattgctccgggcatagcccgaggacagctcggcacgctcccgcggtgcgaaagttcagcccagaccttaaactgcttaaagacgtgaaaataagcgtgtcattcacggaatcatgccgatctaaggacagaaaagttctgtatactggcgctgaacgagacgtgagggcggagtgcggactcctgcttagccctgtttctggcgatgtgcacgcatgtccctttggcgggagtgtgggagacggcgttgggatcggtggagaatctgccgataaaaaagacgaagagaacgaactggatcaggagaaaagagtggagtacgcagtgctggatgagctggaggactttacagacaatctagagctcgatgaggaaggtgctggaggattcaccgcaaaggccatagtgcagcgcgatcgcgtcgatgaggaagccctgaacttcccatacgaagacgacttcgacaatgacgtggacgccctcctggaggagggactgtgtgcgcctaaaaaacggagaactgaggagaagtatgggggggacagcgatcatccaagcgacggggaaacatctgtccagcccatgatgacaaagatcaaaacagtgttgaagtccaggggcagaccccctacagaacccttacccgatgggtggatcatgacctttcataattccggcgtccctgtctacctccaccgcgaatcccgagttgttacatggtcacggccttacttcctgggcacaggatctataagaaagcacgacccacccttgagcagcattccctgtctccactacaagaaaatgaaagacaatgaagagcgagagcagagcagcgatcttacaccctcaggcgacgtgtcccctgtgaaacccttatctcggtcggccgaactggagttcccactggatgagcccgattccatgggagccgatccgggtcccccagatgagaaggatcctctgggagctgaagcggccccgggcgcactcggccaggtgaaagccaaagtggaggtctgtaaagacgaatctgttgacctcgaggagttccggagctatctggagaagcggtttgacttcgaacaagtcacagtgaagaagtttaggacttgggcggaacgtcggcagtttaacagagagatgaagcggaagcaggcggagagcgagcgtcctatcctgcctgctaatcaaaagttaatcaccctgagcgttcaggatgccccaacaaagaaggaattcgtgattaaccccaatggaaaatccgaagtgtgtatcttacatgaatacatgcaaagggtgctgaaagtaaggcccgtgtataatttcttcgaatgtgccagggccactctggaaattctgatacctgactttgtcaaacaaacgagtgaagaaaaaccaaaagatagcgaggagctcgagtacttcaaccatatcagtattgaggattcacgtgtgtacgaactgacctctaaggccggcctactgtcaccatatcagattttacatgaatgcctgaagaggaaccacggcatgggcgacacgagcattaaatttgaagtggtgcccggaaagaaccagaaaagtgagtatgttatggcttgcggcaaacacacagtaagaggctggtgcaagaacaaaagagtggggaagcagttggcctctcagaagattctgcagctgttacacccacacgtcaagaattggggcagtttactgagaatgtatggccgagaatcctcaaagatggtaaagcaggaaacctcagacaagagcgtgatagagctgcagcagtacgccaagaaaaacaaaccgaacctgcatattctgtctaagctacaggaagagatgaagagactcgctgaagaaagagaggagacaaggaagaagcctaaaatgagcatcgtcgcaagcgcgcagcctggaggtgaacctctctgcaccgtcgacgtgtag

SEQ ID NO: 185359 - DNA, 2223 bp, synthetic construct
  misc_feature 1..2223: note = Description of Artificial Sequence: Synthetic coding sequence
  source 1..2223: mol_type = other DNA
atggagaccgacgagagccccagccccctgccctgcggccccgccggagaggctgtaatggagagcagagcccggccatttcaagctctgcctcgggaacaaagtccacccccccctctgcagacctcatctggagctgaggtgatggacgtgggatccgggggcgatggccagtctgaattgcctgcagaggatcctttcaatttttacggcgcgtcgctcctgagcaagggttcattttcgaagggaagactcttaattgaccctaactgctccggccactccccgcgtacagctcgacacgccccagccgtaagaaagttctctcccgacctgaagctgttgaaggatgtgaagattagcgtgtccttcactgaatcctgtaggtccaaggaccggaaggtcttgtacacgggggccgagcgtgatgtgcgggctgagtgcggtctgcttctgagtcctgtcagtggcgatgtacatgcatgcccttttggcgggtcagtcggggacggggtggggattgggggagaatcagccgataagaaggatgaagagaacgaactggatcaagaaaagagggttgagtatgcggtcttagacgaactcgaggacttcaccgacaatctggagcttgacgaggaaggcgccggcggattcacggccaaggcaattgttcagcgtgaccgggttgacgaggaggcgctcaacttcccctacgaggatgacttcgataacgacgtggacgctctgttggaggagggcctatgcgcccctaaaaaaaggcgcaccgaggagaagtatggcggtgattcggatcatcccagcgacggtgagaccagcgtgcaaccaatgatgacaaaaatcaagacagttttaaaaagtaggggccgcccaccaacagaacccctgccggacggctggattatgacattccacaactcaggagtgcccgtctacctgcatagggaaagcagagttgtgacctggtcccggccctactttcttggcaccggctcaattcggaagcacgatcctccactcagctccattccgtgcttgcattacaagaagatgaaagacaatgaggaaagggagcagagcagtgacctgacgccaagcggggatgtgtcccccgtcaaaccacttagtagatctgctgaacttgagttcccgctcgacgaaccagatagtatgggtgctgacccggggcctccagatgagaaagacccgctcggggccgaggccgcccccggggctctgggccaagttaaggcaaaagttgaagtttgtaaagatgaaagtgtggatctggaggagttccggagttatctggagaaaaggtttgactttgagcaggtgacagtgaaaaagttccgcacctgggccgagcggagacagtttaaccgtgaaatgaagcgaaaacaggcggaatcagaaagaccaatcctcccagccaatcagaaactaattaccttgagtgtacaggatgctccaacaaagaaagaattcgtgatcaacccgaatggcaaatctgaagtgtgcattttgcatgaatacatgcagcgggtcttgaaagtacggcctgtgtacaacttcttcgagtgtgcaagggcaacactggaaattctaataccagacttcgtgaagcagacaagcgaagagaagcccaaggactcagaagagttggagtattttaaccatataagcatcgaagactctagggtgtacgagttaacatccaaagcaggcctactgagtccataccagattcttcatgaatgcctgaaacgaaatcacggcatgggcgacacaagcataaagtttgaggtcgttcccggcaagaaccagaagagcgaatacgtgatggcttgcggaaagcatactgtgcgcggttggtgcaaaaacaagcgcgtgggtaagcaattggcatcgcagaaaatcctgcagttgttgcaccctcatgtcaaaaactggggctcactgctacgcatgtacgggagagaatcttccaagatggtcaaacaggagacgagcgataagagcgtaatcgagctgcagcaatacgctaaaaagaataaaccaaacttacacatcctctctaaactgcaagaggaaatgaagagactcgccgaggaacgtgaagagacccggaaaaagcccaagatgagcatcgtcgccagcgcccagccagggggcgagcccctgtgtaccgttgacgtttag

SEQ ID NO: 185360 - DNA, 378 bp, synthetic construct
  misc_feature 1..378: note = Description of Artificial Sequence: Synthetic coding sequence
  source 1..378: mol_type = other DNA
atggagaccgacgagagccccagccccctgccctgcggccccgccggcgaggccgtcatggaatcacgcgcgcgaccatttcaggcgttgcctagagaacagtcccccccacctcctctccaaacatcatccggagctgaggtgatggatgtggggtcgggcggtgacggacaatctgaattgcctgctgaggatccgttcaacttctacggagcctctctgctgtctaaaggcagcttctctaagggacgcctcctgattgaccctaattgttctgggcattccccaaggaccgcccgtcacgcccccgccgtgcggaagttttcaccggatctgaaacttcttaaggacgttaagataagcgtgtcctttacctag

SEQ ID NO: 185361 - DNA, 564 bp, synthetic construct
  misc_feature 1..564: note = Description of Artificial Sequence: Synthetic coding sequence
  source 1..564: mol_type = other DNA
atggtgggcagcctgaactgcatcgtggccgtgagccagaacatgggaatcggcaagaatggagacctgccatggcccccactgcgcaatgagtttcgctactttcagcgtatgactaccacaagctcagtcgagggaaagcaaaaccttgtcattatgggcaagaaaacttggttctccatccccgaaaagaacaggcctctcaaggggaggattaatctggtgcttagccgagaactgaaagagccaccccagggagcccacttcttgagcaggtctctggatgacgcccttaaactcaccgagcagcccgagctcgccaacaaggtggatatggtgtggattgttggcggcagcagtgtttataaggaggctatgaaccacccaggacatcttaagctgttcgttacccgaataatgcaagatttcgagtctgataccttctttccggagattgacctcgaaaagtacaagctgttacccgaatacccgggcgtattgtcagatgtgcaggaagaaaagggtatcaagtataagtttgaggtgtatgagaagaatgactag

SEQ ID NO: 185362 - DNA, 564 bp, synthetic construct
  misc_feature 1..564: note = Description of Artificial Sequence: Synthetic coding sequence
  source 1..564: mol_type = other DNA
atggtgggcagcctgaactgcatcgtggccgtgagccagaacatgggaatcggaaaaaacggggacctgccgtggccccccctcaggaacgaattccgctatttccagagaatgacaacaactagtagcgtcgagggcaaacagaatttagtgatcatgggtaagaaaacctggttctccatcccagaaaagaacagaccgctgaagggccgtatcaacttggtgctctcacgagagctcaaagagccgccccagggcgctcatttcctgtcacgaagcttggacgacgccctcaagcttaccgaacagcctgagctggctaataaggtcgatatggtgtggatagtgggaggctctagcgtctacaaggaggctatgaatcacccgggccatctgaagctattcgtgacaagaattatgcaggacttcgagagcgacaccttctttcctgagatagacctggagaagtacaagctcttaccagagtacccaggtgtgctgagtgacgtgcaggaggagaagggaatcaagtacaaatttgaggtgtacgaaaagaatgattag

SEQ ID NO: 185363 - DNA, 963 bp, synthetic construct
  misc_feature 1..963: note = Description of Artificial Sequence: Synthetic coding sequence
  source 1..963: mol_type = other DNA
atggccgccgtgcggatgctgcggacctggagccggaacgccggcaagctgatttgcgtcagatatttccaaacttgcgggaacgttcatgtgctcaagccaaactatgtttgctttttcggatatccatcgttcaagtactcccacccccaccactttctgaagaccactgctgctcttcggggccaggtcgtgcagttcaagttaagtgacatcggcgaaggcattagagaggtgacagttaaggagtggtacgtgaaggagggtgataccgtcagccaattcgactcaatttgcgaggtgcagtccgacaaggccagcgtgaccatcacctcacgatatgacggtgtcattaaaaagctgtactataacctcgatgacattgcttatgtcgggaaaccccttgtggacatcgagactgaagcactgaaagatagtgaagaggacgtcgtagagacaccagccgtgagccatgacgaacacacacaccaggagatcaagggccgcaagacattggctactcccgccgtccgtcgattggccatggagaacaacatcaagcttagcgaagtcgtgggtagcgggaaggatgggagaattctcaaagaggacatcctaaactatttggaaaaacaaaccggggcgattctgcctcccagtccgaaagtggaaataatgcctcctcctcctaagcctaaggacatgacggtccccatcttggtgtctaagccacccgtgttcactggcaaggacaaaacagagcctatcaaaggtttccagaaggccatggtgaaaactatgagcgctgcccttaaaatcccccatttcggatattgcgacgagatcgacctgaccgagctcgtgaaactgcgggaggagctcaagcccatcgccttcgctcgcggcataaaactctctttcatgccttttttcctgaagtactatttcagttggaaatcctag

SEQ ID NO: 185364 - DNA, 1449 bp, synthetic construct
  misc_feature 1..1449: note = Description of Artificial Sequence: Synthetic coding sequence
  source 1..1449: mol_type = other DNA
atggccgccgtgcggatgctgcggacctggagccggaacgccggcaagctgatctgcgtaagatattttcagacatgtggaaacgtgcatgtcttgaagcccaactatgtgtgctttttcggatatccgagctttaaatattctcaccctcaccactttctgaagaccacagctgcccttagaggtcaggttgttcagtttaagctttctgacatcggggaaggaattagggaagtgacagtgaaagaatggtacgtgaaggaaggagatacagtcagccagtttgatagcatctgtgaggttcagagtgacaaagcctctgtgaccattacatccaggtatgacggtgtcatcaaaaaattgtattacaacttggacgatatcgcatacgtcggcaagccgttggtggacatagagactgaagccctgaaagatagcgaagaggacgtcgttgaaactcccgccgtgtcacacgatgagcacacacatcaggaaatcaaagggcggaagaccctggcaacacctgcagtgcgcagactggccatggaaaacaacatcaagctgtccgaggtggttggctctgggaaggacggtagaattctcaaggaggacatccttaactaccttgaaaagcagacgggtgctattttaccaccatcgcccaaagtcgagatcatgcccccaccccccaagccgaaagatatgacagtacctattctcgtctccaagcctcccgtgtttaccggcaaagacaagacagaaccaattaaaggattccagaaagctatggttaaaacgatgagcgctgctttaaagattccacatttcggctattgcgacgagattgacctgacggaactggttaagctgcgagaagaattgaaacccatcgcttttgccagaggcattaaactgtccttcatgccttttttccttaaagcagctagcctgggactactccaatttccgatactaaacgcgagtgtcgatgagaattgccaaaatattacctacaaggcatctcacaatatcggcattgcgatggatactgagcaagggttaatcgtgccgaatgtcaaaaatgtgcagatctgttctatcttcgacattgcaaccgagctgaaccggctgcagaagctgggctctgtaagtcagctgagtacaactgatctcacgggcggcacatttaccctgtcaaatatcggtagcatcggcggaaccttcgccaagcctgttatcatgccacccgaggtcgccatcggcgcacttgggagcatcaaggccattcccaggttcaaccagaagggcgaggtgtataaagcccagattatgaacgtctcatggtcagctgaccacagagtgatcgacggcgcaaccatgtcacggttcagcaacctttggaagagttacctcgaaaacccagcttttatgctgttagatctgaagtag

SEQ ID NO: 185365 - DNA, 906 bp, synthetic construct
  misc_feature 1..906: note = Description of Artificial Sequence: Synthetic coding sequence
  source 1..906: mol_type = other DNA
atggagaacaacatcaagctgagcgaggtggtgggcagcggcaaggacggaaggatcctcaaggaagacattctgaattacctggagaagcagacaggggccatcctcccaccatctcctaaagttgagattatgccccccccccccaagcccaaggatatgaccgtgccaattctcgtgagcaagcccccagtcttcaccgggaaggacaagaccgagccaattaagggctttcagaaggccatggtcaaaacaatgagtgccgctcttaagattccccattttggatattgcgacgagatcgacctgactgagttagtgaagctgcgtgaagaattgaaacctatcgcgtttgctaggggtatcaaactcagcttcatgccctttttcctgaaggctgccagtctgggccttctccagtttcctatacttaacgcctctgtggacgagaattgtcagaacatcacctacaaggcgtcacacaatatagggatcgcgatggataccgaacagggcctcattgtgcccaacgttaagaatgttcagatatgttcaatcttcgacattgcaaccgaactgaaccggcttcagaaattggggagcgtctctcagcttagcactaccgatctgacgggtggtactttcaccctgtccaacatagggtcaatagggggaacgtttgccaagccagtgatcatgcctcccgaggtggcaattggagcccttggttcaattaaggctattcctcgattcaaccaaaagggggaagtgtacaaggctcagattatgaacgtctcttggagtgcagatcatcgggtgattgacggagccactatgagccgcttctccaacctgtggaagtcttacctggaaaaccctgcttttatgctcttagacctcaagtag

SEQ ID NO: 185366 - DNA, 5286 bp, synthetic construct
  misc_feature 1..5286: note = Description of Artificial Sequence: Synthetic coding sequence
  source 1..5286: mol_type = other DNA
atgcagttccagctgaccctgttcctgcacctgggctggctgagctactctaaggcacaagatgattgtaaccgtggcgcctgtcaccccactacaggagacttactggtggggcgcaacacccagttaatggcttcatcaacatgtggcttaagtcgggcgcagaagtactgtattttgtcctaccttgagggtgagcagaagtgctttatctgcgattcccggtttccttatgacccctatgatcagcctaatagtcatactatagaaaatgtgatcgtatctttcgaacctgaccgggagaagaagtggtggcagtcagagaatggcctcgaccacgtcagcatacgactcgatctcgaggcactctttcgcttctcccatctgatcctgacctttaagactttcagaccagcagccatgctcgtggagaggtcaacagactacggacacaattggaaagtttttaaatattttgctaaggattgcgctacaagttttcctaacataactagcgggcaggctcagggagtgggggatattgtgtgtgattcgaagtactcagacattgagcccagcaccggaggagaggttgtgcttaaggtcttggatcctagctttgagatcgagaatccatactccccttacatccaagatcttgttacactcaccaatttacggataaacttcaccaagctgcacaccctgggcgacgccctgttaggccggaggcagaacgactccctggataagtattactacgccctatacgagatgatcgttcggggttcatgcttctgcaacgggcatgctagcgagtgtcggcctatgcagaagatgcggggggacgtcttcagtccccccgggatggttcacggacaatgcgtctgccaacataatacggatgggcccaactgcgagcggtgtaaggatttctttcaggatgccccctggaggcccgccgccgacctgcaagataatgcgtgtagaagttgttcctgcaattctcatagtagtagatgtcactttgacatgactacgtacctcgcctccggggggctgtcaggcggcgtatgcgaagactgccagcacaatacagagggccaacattgcgaccgctgcagaccactgttttaccgggacccgctgaaaactatctccgacccctacgcctgtatcccttgtgaatgcgatcccgatgggacaattagtggcggcatatgcgttagccatagtgatccagcgctaggcagcgtggcaggacagtgcttgtgtaaagaaaacgttgaaggggcgaagtgcgaccagtgtaaacccaaccattatggactgtccgcgaccgatccccttggctgtcaaccttgcgattgcaatcccctcggaagcctgccattcctcacctgcgatgtggacacggggcagtgcctttgtcttagttatgtgactggagcccactgtgaggagtgtacagtaggctattgggggctgggcaatcatctgcacggatgctctccatgcgattgtgatataggtggcgcctacagcaacgtctgctcccctaaaaacgggcagtgtgaatgccggccgcacgtgactggcaggtcatgttctgaacctgctccaggatacttttttgctccgttgaatttttatttgtatgaggccgaggaggccacaacccttcaagggctggcacccttgggatccgaaacttttggtcagtccccagccgtgcatgtggtgctgggcgaaccagtgcccggtaacccagtcacctggaccggacctggcttcgcaagagtgctcccaggagctggtctgcggttcgctgtgaacaatattcccttccctgtcgattttaccattgctattcattacgaaacacagagtgccgccgactggactgtccagatcgtggtgaaccccccaggcggcagtgaacactgcattccgaagactctccagtccaagccccagtctttcgccctgccagcagctacacggataatgctactgccaactccaatctgtttagagcctgatgtgcagtacagcattgatgtctatttctcccagcctctgcaaggggaatcccacgcccatagccacgtgctggtggatagcctgggactcattcctcagattaattcccttgagaacttctgttcaaaacaggatcttgatgagtaccaactgcataattgtgtggagatagccagcgctatgggccctcaggtgctgcccggagcctgtgaacggctcattatctccatgtccgcaaaactgcacgatggcgcagtagcctgcaaatgccatcctcaaggtagcgtgggcagctcatgtagccggttgggcggacagtgccaatgcaagcctctggtagtgggccgttgttgtgacagatgctcaacaggctcatacgacctgggccaccatggatgccatccttgccattgccacccccagggcagcaaggacaccgtctgtgaccaggttacagggcagtgcccttgccacggggaggtgtctggccgcagatgcgaccggtgccttgctggctacttcggtttcccatcttgtcacccttgcccttgcaataggtttgccgaactgtgcgatcctgagactggctcctgcttcaactgcggagggttcacaacaggcaggaactgtgagcgctgtatcgatgggtactacggcaaccctagcagcggccagccctgccgaccgtgcctgtgtccagatgatccaagctcgaatcagtacttcgctcacagctgttatcagaacttatggagctcagatgtgatctgcaattgccttcaaggctacacagggacacaatgcggggagtgttccactggattctatggcaacccacgcatatccggcgcgccctgtcagccatgtgcctgcaacaataatatcgacgtcaccgatcctgagtcatgcagccgggtgactggtgaatgtcttcggtgtctacataacactcaaggggctaattgtcagctttgtaagcccgggcactatggcagcgccttgaaccagacatgtcggcggtgctcttgccacgctagcggggtctccccaatggaatgtccaccgggagggggggcctgcctgtgcgaccccgtgacaggcgcctgtccctgcctacccaacgtcaccggattggcttgcgaccgttgtgcagacggttactggaacctggtgcccggccgtggttgccagtcgtgtgactgcgatccccggacctctcagagcagtcattgtgatcaattgacgggccagtgtccatgcaagctcggctatggggggaaaaggtgcagcgaatgtcaagagaattactatggggatccccccggccggtgcatcccttgcgattgtaacagagccggaacccagaagccaatctgcgaccctgacactgggatgtgccgttgtcgagagggagtgagtggccaacggtgtgatcggtgtgcccgggggcactcccaggagttccccacctgtttgcaatgccacctgtgctttgatcaatgggatcatacgatctcgtcgctgtccaaagcagtgcagggactgatgcgactcgcggccaacatggaagataaacgagagaccttgcctgtttgtgaggcggatttcaaggaccttagaggtaatgtttccgagatcgagaggatcctcaaacatcccgtatttccctctgggaagtttctgaaggtgaaggactaccacgatagtgtccgccgtcagattatgcagctgaacgaacagctgaaggctgtatatgagttccaagacttaaaggatacaatcgagagagccaagaatgaagccgatctgctcctcgaagatctccaggaggagatcgatttacaaagtagtgtgctgaacgcttccatcgcggacagttccgagaatatcaaaaaatactatcatatctccagctcagctgagaagaagatcaatgagactagctctacaatcaatacgagcgctaacactcggaatgacctgttgaccattctggatacactgaccagtaaaggtaatctctctctagaacggctcaaacagatcaaaatacccgacattcagattttaaatgagaaggtttgcggcgatcccgggaacgtcccttgtgttcctctgccgtgcgggggagccttatgcacaggtcggaaaggtcatagaaaatgtaggggaccgggatgccacgggtctctcacactttctactaacgccctccagaaagcccaggaagctaaaagcattattaggaacctggacaagcaggtcaggggactgaagaaccaaatcgagtccatttcggagcaggccgaagtctcaaagaataatgctctgcagctgagagaaaagttaggcaacatccgtaatcagtctgactccgaggaagagaacatcaacctcttcatcaaaaaagtgaagaattttttgctagaagaaaatgtgcctccagaggacattgaaaaggtggctaacggcgtcttggacatacacctccccatccctagtcagaatcttactgatgagctggtcaagattcagaaacacatgcagctttgtgaggactatcggactgatgagaaccgcctgaacgaggaagccgatggggcccaaaagctgctcgttaaggcaaaagccgcagagaaagcagcgaatatcctcctcaacttagacaagacacttaatcagcttcaacaggcccagattacccaaggccgcgctaactctacaatcacacaattaaccgcaaacatcacaaaaattaagaagaacgtgctacaggctgagaaccagactagggagatgaagtctgaactggagctcgccaagcagcggtcaggcttagaagacggactatcactattacaaaccaagcttcagagacatcaagaccacgccgtgaatgctaaggttcaggccgaatctgcccaacatcaggcggggagcctggagaaggagttcgtggaactcaaaaagcagtatgctatccttcaacgaaagactagcactactgggctgacgaaggagactcttggcaaagtgaagcagctgaaggacgcggcagagaaactggcaggggataccgaggcgaagatacgcaggattaccgaccttgagaggaaaatccaggacttgaacctttcacgccaggcgaaggcagaccagcttagaattctcgaagaccaggtggtagcaattaaaaacgagattgtggaacaggaaaaaaaatatgcgaggtgctattcatag

SEQ ID NO: 185367 - DNA, 1530 bp, synthetic construct
  misc_feature 1..1530: note = Description of Artificial Sequence: Synthetic coding sequence
  source 1..1530: mol_type = other DNA
atgcagagctggagccgggtgtactgcagcctggccaagcggggccacttcaatcggatctcacacggactccagggcctaagcgcggtgccattacgaacttatgccgaccagcctattgacgccgacgtgacagtcattggctccggacctggggggtacgtggccgccattaaagccgctcagctcggattcaaaaccgtgtgtatcgagaaaaatgagacgctaggtggtacctgcctgaacgtcggatgcattccctccaaggctctgctgaacaactcccactactaccatatggcacatggcaaggacttcgcttccagaggtatcgaaatgtccgaagtaaggttgaatctagataaaatgatggagcagaagtctactgccgtgaaagcactgactgggggtatagctcacttgtttaaacagaataaggtggtgcacgtgaatgggtacgggaagatcacggggaagaaccaggttactgccaccaaagccgatggagggacacaggtgatagacaccaaaaatatcctcattgccacagggtccgaagttaccccttttccaggcatcacaattgacgaagataccattgtgagcagtaccggcgctctctccctgaaaaaggtgcctgagaaaatggttgtgattggagctggggttataggcgtggagctgggaagcgtatggcagcggctgggtgccgatgtaacagctgtcgagtttctcggacatgtaggcggcgtaggcatcgacatggagatctcaaagaatttccagcggattctccagaagcaggggtttaaattcaagttgaacacaaaggtcacaggagcaaccaaaaagagtgacggcaagattgacgtgagtattgaggctgcatccggggggaaggctgaggtgatcacatgcgacgtcctgctggtgtgtatcggcagaaggccctttacgaagaatctcggcctagaggaattaggtatcgaactcgatccccgagggaggatacctgtgaacactaggttccagactaaaattcctaacatttatgccatcggagacgtggtcgccggtcctatgctggctcacaaggcagaagacgagggtatcatttgtgttgagggtatggccgggggagcggtgcacattgactacaactgtgtaccatccgtgatctacacacacccggaggtggcttgggttgggaagtccgaagaacaactaaaagaggaaggcattgagtacaaagttggaaaatttccattcgctgcaaacagccgggcgaaaacaaacgccgacactgatggaatggtgaagatccttggtcagaagtctaccgacagagtgctaggggcccatatcctgggccccggtgcgggggagatggtcaatgaggcagcacttgctttggagtacggcgcttcatgcgaggatattgcacgcgtttgccatgcgcatcctacgttaagtgaagcgtttagagaagccaacttagctgcatcatttggcaagtctataaatttctag

SEQ ID NO: 185368 - DNA, 1386 bp, synthetic construct
  misc_feature 1..1386: note = Description of Artificial Sequence: Synthetic coding sequence
  source 1..1386: mol_type = other DNA
atgcagagctggagccgggtgtactgcagcctggccaagcggggccacttcaaccgtatctcacacggattgcagggcctcagcgccgttccacttcggacctatgccgatcagcccattgacgcggacgtgaccgtgatcggcagcggacccgggggatacgtggccgcaataaaggcagctcagctaggattcaagacagtgtgcattgaaaaaaacgaaactctggggggcacttgtctgaacgtgggctgtattccttctaaagccctcctcaacaacagccattactaccacatggcacacggcaaagattttgcttcccggggcatcgagatgtcagaagtaagactgaatctcgataagatgatggagcaaaaatctacagccgtgaaagcactgactggggggatcgcacatctcttcaaacagaataagatagacgaggatacaatcgtcagttcaaccggggcactttccctcaaaaaggtcccggagaagatggtggtgatcggtgccggcgtaatcggcgtggaactcgggtcagtctggcagcgcctgggagcagacgtgacggcggtggagtttctcggccacgtcggcggggtcggcatcgatatggagatctcaaaaaactttcagagaatcctccagaaacagggtttcaaattcaagctcaacaccaaggtgaccggggctactaaaaagtccgacggtaaaatagatgtgtcaatcgaggccgcgtccggtgggaaagccgaagtaatcacatgcgacgttctgctggtgtgtatcggccgtcggccatttaccaaaaacctgggcctcgaggagctgggcatagagctcgatccaaggggccggatacctgttaatactaggttccaaactaagattcccaacatctatgcaataggagatgtagtggcaggccccatgctggctcacaaagctgaggacgaagggatcatctgtgttgagggaatggcaggaggggctgtacacattgattacaattgtgtcccaagtgttatatatactcatccagaagtcgcctgggttggcaagagcgaagaacaactgaaggaggaaggaattgaatacaaggtgggtaagttcccatttgcagccaatagccgagcgaagaccaatgccgatactgacggcatggtgaaaatcctcggccagaagagtacggaccgggtgctcggtgcacatattctgggacctggcgccggggaaatggtgaacgaagctgccctggccctggagtatggcgcctcgtgtgaagacattgcgcgggtgtgtcacgcgcatcccacgctgtcagaggccttccgcgaggctaacctggctgcctcatttgggaaaagcattaatttttag

SEQ ID NO: 185369 - DNA, 1461 bp, synthetic construct
  misc_feature 1..1461: note = Description of Artificial Sequence: Synthetic coding sequence
  source 1..1461: mol_type = other DNA
atgcagagctggagccgggtgtactgcagcctggccaagcggggccactttaacagaatcagccacggtctgcagggactgtccgctgtcccactccggacatacgccgaccagccaatcgatgctgatgttaccgtgatcggatcaggacccggaggttacgtcgcagccatcaaggctgcccagctggggttcaaggctctgctcaacaattctcactactaccatatggctcacggtaaagactttgcatcgcgaggcattgaaatgtccgaagtccgactcaatttagacaaaatgatggagcagaaaagtaccgctgttaaagccctcacaggcggaatcgctcacctgtttaaacaaaacaaagtcgtgcacgtgaatggctatgggaaaattacgggtaagaatcaggtgactgcaaccaaggcagacggcgggacccaggtgatcgataccaagaatatattaatcgcaactggttctgaagtcacccccttccccggaattaccatcgatgaggacactattgtctcttcaacaggcgccctgagtctgaagaaagtcccagaaaaaatggttgtgatcggggctggcgtgatcggagtcgagctgggctccgtctggcagcgactgggtgccgacgtaacagcagtggaattcctcggccacgtgggaggagtcgggatcgacatggagatatctaagaattttcagcgcatcctacagaagcagggtttcaagtttaagttaaacacgaaagtcaccggtgccacaaaaaagtccgatggcaagatcgatgtttcaatcgaggctgcctcaggtggaaaagcagaagtgatcacttgtgatgtgctgttggtctgtatcgggcggcgtcctttcactaagaacttaggccttgaggaactgggcattgagctcgacccacgcggacgcattcccgtgaacacccgctttcagaccaagatcccaaacatttatgccataggagacgtagtcgcgggcccaatgcttgcccacaaagcagaagacgagggaatcatatgtgtcgaaggaatggcaggcggcgccgtgcacattgattacaactgtgttccctcagtcatttatacacacccggaggtggcctgggtagggaaatcagaggaacaactcaaagaggaaggtatagaatacaaagtaggaaaattcccattcgctgctaattctagagctaagaccaacgccgacactgacggtatggtgaagattttgggtcagaagtcaacggatcgggtcctgggcgcccatatcctcgggcccggcgctggggaaatggtaaacgaagcagctctcgccttggaatacggcgccagttgtgaggatattgcccgggtctgccatgcacacccaacgttatcggaagcctttcgggaagcaaacctggctgcaagtttcgggaagagtatcaatttctag

SEQ ID NO: 185370 - DNA, 1233 bp, synthetic construct
  misc_feature 1..1233: note = Description of Artificial Sequence: Synthetic coding sequence
  source 1..1233: mol_type = other DNA
atggcccacggcaaggacttcgccagccggggcatcgagatgagcgaggtaaggctcaatttggacaagatgatggaacagaaaagcactgccgttaaggccctcacaggcggaatagcccacctgtttaagcagaataaggtagtgcacgttaacggctacgggaaaattaccgggaagaaccaggtcaccgcaaccaaggcagatgggggcacgcaggttatcgacactaaaaatatcctcatcgccacaggctccgaggttacacccttccccggcatcaccatcgatgaggataccatcgtctcctcaaccggcgcgctgtcactcaagaaagtccccgagaaaatggtggtgatcggtgcaggcgtcatcggcgtggagttgggttcagtgtggcaaagattgggggctgacgtcacagccgtcgaatttctaggccacgtgggtggcgtgggtatcgacatggaaatatccaagaatttccagcgtatcctccagaaacagggctttaaatttaagttgaatacaaaagtgactggcgcaactaaaaagtcggatggaaagattgatgtatcgatagaggccgcttcaggaggcaaagccgaagtcatcacctgcgacgtgcttctcgtctgtatcggacggagacctttcacaaaaaatctcggcctggaagagttgggtatcgagctggaccctcgcgggagaatcccggtgaacacccgcttccagaccaaaatccccaatatttacgcaataggggatgtggtcgctggtcccatgctggcccataaagccgaagatgagggtattatctgcgttgaggggatggccggtggcgccgttcatatagattacaattgtgtcccatccgtcatctatactcaccctgaggtcgcatgggttgggaaatcagaagaacagctaaaggaggaaggtattgagtacaaggtgggcaaatttccctttgccgctaacagcagggctaagacaaacgccgatactgacggcatggtgaaaattttaggacaaaagtcaaccgatcgagtgcttggagctcacatcctcgggcccggggccggggagatggtcaatgaggctgcattggctctggagtacggggctagctgcgaggatatcgccagagtttgccacgcccaccctactctctccgaggcttttcgggaagcaaatctggccgcatcattcggcaaaagcatcaatttctag

SEQ ID NO: 185371 - DNA, 1380 bp, synthetic construct
  misc_feature 1..1380: note = Description of Artificial Sequence: Synthetic coding sequence
  source 1..1380: mol_type = other DNA
atgctgatctacgtggccgccatcaaggccgcccagctgggcttcaagacagtttgcattgagaagaacgagaccctcggcgggacctgtctcaatgtcggctgcattccatccaaggctctgctgaataacagccattactatcatatggctcacggcaaagatttcgcatccagaggaattgagatgtcagaggtgcggttaaacctggataagatgatggagcaaaagtccactgccgtgaaagctctaacaggcggcatcgcccacttattcaaacagaacaaagtggtacacgtgaatggttacggtaagatcactggaaaaaaccaggttactgcaactaaagccgatgggggtacgcaggtcattgacactaagaacatccttatcgctactggctccgaggttaccccctttcctggcattactatcgatgaagacaccatcgtctcctcgactggcgctctatccttgaagaaagtgccagagaagatggtggtgattggggcaggagtgataggagttgagctgggctcagtgtggcagcggctaggtgcagatgtcacagcagttgagttcctcggacacgtaggcggcgtcggcatagacatggagatttccaagaactttcagcggattctgcagaaacagggctttaagttcaaactaaatacgaaggtgactggagccaccaagaaaagcgacgggaagattgacgtttctatagaggcagctagcggtggcaaggctgaagtcataacctgcgacgtgttgctggtgtgcatcggtagaaggccattcaccaaaaatcttgggttggaggagcttggcatcgaactagaccccaggggacgcatccccgtgaatacgcggtttcagacgaagatccctaacatttacgccattggggacgttgtcgccggcccgatgttagcacacaaggccgaagacgaaggaatcatatgtgtggaaggtatggctggaggggccgttcacattgactataactgtgtgcccagcgtgatatacacgcatcctgaggtcgcctgggtcggaaaatccgaagagcaactcaaggaagagggaattgaatataaggttggcaaattcccatttgcggccaacagtagagcgaaaaccaatgctgatactgacggtatggtaaagattctggggcagaagtctacggatagggtccttggggcgcacattctgggtcctggggccggagagatggttaatgaagccgcgctggcacttgagtatggggcgtcatgtgaggacatcgctcgggtgtgccatgcgcatccaactctcagcgaggctttccgagaagccaatctggccgcaagcttcggcaaatccatcaatttttag

SEQ ID NO: 185372 - DNA, 1944 bp, synthetic construct
  misc_feature 1..1944: note = Description of Artificial Sequence: Synthetic coding sequence
  source 1..1944: mol_type = other DNA
atgtggcgggtgtgcgcccggcgggcccagaacgtggccccctgggccgggctggaggcgcgctggactgccctgcaggaggtgcccggtaccccccgggtgacttcccgttccggtcccgccccggccaggcggaactcagtgaccacaggatacgggggcgtgcgcgctctgtgcggctggacacccagcagtggggctaccccccgcaataggctcctgctccaactgctaggctcacctggaaggaggtattattcgctgcccccccaccagaaagtcccgctgccaagcctgagtccaaccatgcaggctggaactattgcacggtgggaaaagaaggagggagacaagataaatgaaggagatttaatcgctgaagtggaaaccgacaaggctactgtaggattcgagtcacttgaggaatgctatatggcgaagatcctcgtagcagaaggaaccagagacgtgcctattggtgccataatctgcataacggtcggaaaacctgaggatatcgaggccttcaagaactataccttggatagtagtgccgcacctacaccacaggcagcgcctgctcctacccccgccgctaccgcttctccaccaaccccgagcgcccaggcaccagggagttcataccctccgcatatgcaggttctgctgcccgcgctgtcacctacaatgacaatgggaactgtgcaaaggtgggaaaaaaaggttggggagaagctctctgagggagacctgctcgccgagatcgagaccgacaaggctacgatcggtttcgaggtgcaggaagaaggctatctagccaaaattttggtgcctgaggggaccagagacgttcctttaggcactcctctgtgtatcatcgtcgagaaagaggcagatatttctgccttcgcggattatcgcccaacggaagttactgacctgaaaccccaggtccccccgcccacgccccccccggttgccgcagtcccaccaacccctcagccactggcacccacccccagcgccccctgtcccgctacgcctgcggggcctaagggccgggtatttgtctcccccctcgctaagaaactggctgttgagaaagggatagatttgacccaggtcaaaggaacaggtcctgacggtcgcatcaccaaaaaggatattgattcgtttgttccatctaaggtcgcaccagccccagccgccgtcgtgcctccaaccgggcccgggatggctcctgtccctacaggagttttcactgacatcccaatcagcaatatcaggcgcgtcatagcgcaacggctgatgcaatccaaacaaaccattccccactactacctatccattgacgtcaatatgggagaagtgttattggtcaggaaggagcttaataagatcttggaaggcagatctaaaatatcagtcaacgacttcattatcaaggcatcagctctggcctgcttgaaggtccccgaggctaactccagttggatggatacagttatccgtcagaatcacgtggtcgacgtgtcggtggccgtctcaacacccgcaggcctcataacccctatagtcttcaacgcacatattaaaggggtggagactattgcgaacgacgtggtgtcactggcgaccaaagctagggaaggcaaactccagccgcatgagttccaaggcggaacattcactatttccaatctcggtatgttcggcatcaagaatttctcagcaatcatcaacccaccacaggcttgtattctggcgataggcgcatccgaggacaaactggtgcccgctgataacgagaagggttttgatgtcgccagcatgatgagtgtgactctcagttgtgatcaccgggtggttgacggggctgtgggagcccagtggctcgccgagttccgcaagtatcttgagaaaccgatcactatgcttctctag

SEQ ID NO: 185373 - DNA, 678 bp, synthetic construct
  misc_feature 1..678: note = Description of Artificial Sequence: Synthetic coding sequence
  source 1..678: mol_type = other DNA
atgtggcgggtgtgcgcccggcgggcccagaacgtggccccctgggctggtctggaggcaaggtggacggcacttcaggaagtccctggcaccccccgtgtgactagccgctcaggcccagcacccgcacggagaaattcagtgactactggttatggcggggtgagggccctctgcgggtggacccccagcagcggagctacacctcgcaaccgtctgctcctccagctgctgggatcccctggtcgtagatactattcactgcccccccaccaaaaggtcccgttgcccagtctcagcccaactatgcaggctggtaccatcgctaggtgggaaaaaaaggagggcgacaaaataaacgaaggcgatttgattgccgaggtggagacagacaaagccacagtcggaaagccggaagatattgaagcatttaagaattataccctggacagttccgctgctccaaccccccaggccgctccagcaccaactccagctgccacagcttcgcctccaacgccctctgcgcaagcccccgggtctagttaccctccacatatgcaggttcttcttcctgcactcagcccgactatgaccatgggtacggtccagcgttgggaaaagaaagtcggggaaaagcttagtgaaggagacttactcgcggagatgagcttatag

SEQ ID NO: 185374 - DNA, 1257 bp, synthetic construct
  misc_feature 1..1257: note = Description of Artificial Sequence: Synthetic coding sequence
  source 1..1257: mol_type = other DNA
atgcaggccggcaccatcgcccggtgggagaagaaggagggcgacaagataaatgagggcgatcttctggcagaaatcgagacagataaagcaacgatcggctttgaggtgcaagaggaaggatatctggccaaaatcctggtgccagagggtacacgagatgtccctttggggactccactttgcattatagtcgaaaaggaggctgatatttcggcctttgcggattacaggcccaccgaagtcactgaccttaaaccacaagtcccacctcccacacctccacccgtggccgcggtgcctcccacaccgcagccccttgcccccacaccatctgcaccctgccccgctacaccagcaggacccaaaggcagagtgttcgtgagccctttggcaaagaagcttgccgttgaaaaaggcattgatctcactcaggtcaagggcacaggtcccgacggtagaataacaaaaaaggacattgattcttttgtgcccagcaaggttgctcccgcaccagccgccgtagtcccaccaacagggcctggtatggctcctgtccccactggtgtgttcactgacatccctatcagtaatatacggagagtcatagcacagagactgatgcaatccaagcagactattcctcactactatctctcaattgatgtaaatatgggcgaggttctattagtgcgtaaagaactgaataaaatacttgagggacggtccaagatctccgtgaacgattttatcatcaaagcctctgccctggcctgccttaaggtcccagaagctaacagttcttggatggatactgtaatcagacagaaccacgtggtggatgtgtccgtcgcagtgtcaacccctgccggcctcattacgcctatcgtcttcaacgcccacattaagggggtcgagactatcgcaaacgatgtggtgtccctcgctacaaaagcacgtgaggggaagcttcagcctcatgagtttcaaggcggcaccttcacaatctcaaaccttgggatgttcggtattaaaaatttcagtgctatcataaacccaccccaagcttgcattctggcgattggggcgagcgaagataaactggttccagccgataacgaaaagggattcgacgtcgccagcatgatgtcagtgaccctgtcttgtgaccatcgggtcgtggacggcgcagtaggcgctcagtggttagccgaattccgtaagtatctagagaaacctatcacaatgcttctctag

SEQ ID NO: 185375 - DNA, 1104 bp, synthetic construct
  misc_feature 1..1104: note = Description of Artificial Sequence: Synthetic coding sequence
  source 1..1104: mol_type = other DNA
atgacctggctgcagagcaagccccagcggctgcagaacctgagccaacgcgagatgagcgggggcagaaagactagcgtgcaagtgccttctcccgccaacggcgtgatcgaagccttgttggtgcctgacggtggcaaagtggagggaggcactcctctgtttacattgcgtaagactggggctgccccggcaaaagctaagcccgcggaggcgccagctgccgcagcccccaaggccgagccgacagcagctgctgtgccccccccagctgcccccattcccacccagatgcccccagtgccttccccgtcgcaacccccctcggggaagccagttagcgccgtaaagccaaccgtggcgccccccctcgcagagccaggagccggaaagggcctccgaagtgaacacagggaaaaaatgaaccggatgcgtcagcgcatcgcccagcgcctgaaggaggcacagaatacttgtgcaatgctgacaacattcaatgagattgacatgtctaatattcaggagatgcgggcacgacacaaagaggcttttttgaaaaagcacaatttgaagctgggatttatgtcagcgtttgtaaaagccagcgcctttgcccttcaagagcagcctgtggtgaatgcagtgattgacgatacaaccaaagaggtagtttacagagactatattgacattagtgttgccgttgcgaccccaagagggctggttgttccagtcatccgcaacgttgaggccatgaatttcgccgatatcgagcgcaccatcacagaactgggcgagaaggctaggaagaacgagctcgccatagaagacatggatggcgggacatttaccatttccaacgggggcgtctttggatcactgtttggcacccccataatcaatcctccgcagtccgccatcctggggatgcatgggattttcgaccggcctgtggccataggaggaaaagtggaagtcagacccatgatgtacgtagcgttaacatatgaccatagactcattgacgggagggaggctgtgaccttcctgaggaagataaaggccgctgtggaggacccgagggtgctgcttctggatctctag

SEQ ID NO: 185376 - DNA, 1362 bp, synthetic construct
  misc_feature 1..1362: note = Description of Artificial Sequence: Synthetic coding sequence
  source 1..1362: mol_type = other DNA
atgctgagccggagccggtgcgtgagccgggccttcagccggagcctctccgcattccagaagggcaattgccccctggggcgaaggagcctgccaggggtgtccctctgccagggccccgggtacccaaatagccgcaaagtggtaattaacaattcagtgttttccgttcgtttcttccggacaaccgctgtgtgtaaggatgatcttgtgactgtcaaaacgcccgccttcgccgaatctgtgaccgagggagatgtccgatgggagaaggccgtgggagatactgtcgctgaggacgaagtcgtttgtgagatcgaaacagataagacctcagttcaggtgcccagccccgccaacggggtaatcgaagcactactggtacctgatggcggaaaagtcgagggaggaactccgctttttactctaaggaagactggtgcggcgccagccaaggccaagccagcggaggcacccgcagctgccgctccgaaagctgagcctaccgccgctgccgttccaccacccgcagcccccattccaacccagatgcctcccgttccatccccatcccagccaccttccggaaaacctgtgtctgccgtgaaacctaccgtggcacctccactggccgaacccggggccggtaaaggtctacgcagcgaacatcgagagaagatgaatcgaatgaggcagcgtatagcacagcgattgaaggaagctcaaaatacttgtgcaatgctgacaacattcaatgaaatagacatgtccaacattcaagaaatgagggcccgtcacaaggaggcatttctaaagaagcataacctgaaactcggcttcatgtcggcttttgtgaaggctagcgccttcgcgctgcaggagcagccagtggtgaacgcggttatcgacgacactaccaaagaagtggtctatagagattacattgatatatcggtagccgtggctaccccaaggggactcgtggtgccagtcatcagaaacgttgaggctatgaactttgcggatatcgagaggaccatcactgaactgggagaaaaagcgaggaaaaatgagctggcaatcgaggacatggacgggggtactttcacaatatccaacgggggcgtctttggaagcctcttcggtacccccataataaaccccccccagtctgccattcttggtatgcacggcatattcgaccgcccagtcgctattggaggaaaggtggaggtccgaccaatgatgtacgtggccttgacttatgaccaccgtctgatcgatggacgagaagccgtgacatttttgagaaaaatcaaggccgccgtggaagacccacgcgtactacttttagacctgtag

SEQ ID NO: 185377 - DNA, 282 bp, synthetic construct
  misc_feature 1..282: note = Description of Artificial Sequence: Synthetic coding sequence
  source 1..282: mol_type = other DNA
atggaccggctgcagaccgccctgctggtggtgctggtgctgctggccgtggctctacaagccacagaggcaggaccgtatggggcaaatatggaagactcagtttgttgtcgggactatgttagatataggctgcccctgcgcgtcgttaagcatttttattggacaagtgactcatgtccccggcccggagtcgtcctgctgacattcagggacaaagaaatttgcgcggatccacgcgtaccttgggtcaagatgatactgaataaactgtcccagtag

SEQ ID NO: 185378 - DNA, 1560 bp, synthetic construct
  misc_feature 1..1560: note = Description of Artificial Sequence: Synthetic coding sequence
  source 1..1560: mol_type = other DNA
atggccgcccccagccggctgctgatccggggcggccgggtggtgaatgacgactttagtgaagtggcagacgtgctggtggaggacggagttgttcgagctctggggcacgacttgctcccgcctggcggagcacctgccggactgagagtgctagatgctgccggaaaactcgttctccccgggggcatcgatacgcacacccatatgcagttcccgtttatgggttcacgcagtatcgatgacttccatcaggggaccaaggcagccctgtccggcggtacaactatgattattgattttgccatcccccagaagggcggctccctgattgaggcttttgaaacctggagaagctgggcggatccaaaagtttgttgtgattactcactgcacgtggctgtgacatggtggagcgatcaggtgaaggaagagatgaaaatcctggtgcaagacaagggggttaattctttcaaaatgttcatggcatataaggacctgtatatggtgacggatctagagttgtacgaggccttttccagatgcaaggaaattggagcaatcgctcaggttcacgcagaaaatggcgacctgatcgctgaaggggccaagaagatgcttgctcttggcattacaggccccgaaggccatgagctgtgcagacctgaggctgtggaagcagaggctactctgagggccatcacgattgcctctgctgtcaactgcccactatacatcgtgcatgtcatgagtaaatcagcggccaaagtgattgccgatgccaggcgagacgggaaggtggtgtacggggagcctatcgccgcttcactggggacagacggcactcattattggaataaggaatggcaccacgcggctcaccatgtgatgggacctccccttcgccctgacccttctacaccggattttttgatgaacttactcgcaaacgacgacctgaccaccacgggcaccgataactgcacttttaacacatgtcagaaagctttaggaaaagatgatttcacgaagataccaaacggggtgaacggggtagaagatagaatgagcgtgatttgggagaagggggtgcactccgggaaaatggatgagaaccggtttgtcgccgtgacttctactaatgccgcaaagatcttcaacctttatcccaggaaaggcagaattgcagtgggcagtgatgcagatatagttatttgggaccctaagggcacacgcactataagtgccaagactcaccaccaggcagtgaattttaatatatttgaaggaatggtctgccacggagtgcctctagtcacaatctcacggggcaaggtggtatatgaggccggagtgttcagcgtgactgccggtgatggaaagtttataccaaggaagccctttgcagagtacatttacaagcgtatcaagcagagggaccgaacctgcacacccactcctgtggaaagagccccctataagggcgaggtggcgaccctgaagtcccgtgttactaaagaagatgcaacagcagggacaagaaaacaagctcatccctag

SEQ ID NO: 185379 - DNA, 1719 bp, synthetic construct
  misc_feature 1..1719: note = Description of Artificial Sequence: Synthetic coding sequence
  source 1..1719: mol_type = other DNA
atgagctaccagggcaagaagaacatcccccggatcaccagcgaccgtctgctgatcaaagggggcaagatcgtgaacgacgaccagtctttttacgccgatatctacatggaggacggactgataaagcagataggggaaaatctgatcgtgccagggggtgtgaagacaattgaggcgcattccaggatggtcatcccagggggtatagacgtgcacactcgcttccagatgccagaccaagggatgacctctgctgacgactttttccagggcacaaaagctgccctggccggcggaaccacaatgataattgaccacgtagtaccagaaccaggtacatcactgttagctgccttcgatcagtggcgtgagtgggccgatagtaaaagttgttgcgattactctctgcatgttgacatttctgaatggcacaaggggatccaagaggagatggaagcattggtgaaagatcatggggtcaatagttttctggtgtatatggcctttaaagacaggtttcagctcaccgactgccagatctatgaagttctatccgtcatccgagacatcggcgccatagctcaagtgcacgccgaaaacggggatatcatcgcagaggagcagcagcgcattctcgatttaggaattaccggaccggagggacatgtcctctcaaggccagaggaagtggaagccgaggccgttaatagagccatcacaattgcaaaccagaccaactgtcctttgtatatcactaaggttatgtccaaatcctctgcggaggtgattgcacaggccagaaaaaaaggaaccgtggtgtacggggaacccatcacagcatctctcggcactgacgggtctcattactggtcgaagaactgggcgaaagcagcggcattcgtgacatctccacccttatccccagacccgaccacccccgattttttgaacagcctcctcagttgtggcgacctgcaggtgacaggaagtgcccactgcacattcaacacggcacagaaggcagttggtaaggataactttactttaatccccgagggaactaacggcaccgaagagcgtatgagcgtgatttgggataaagccgtcgttactgggaagatggacgaaaaccaattcgttgccgtcacctccaccaacgccgcgaaggtgtttaacctgtatcctcggaaaggaaggatagctgtgggatctgacgctgatctcgtgatctgggaccctgattctgtgaaaacaatttccgcaaagacacataattcttccctcgaatacaatatatttgagggtatggaatgccggggcagcccccttgtggtgattagtcagggcaaaattgttttggaggatggaactctgcacgtcacagagggaagtggaaggtatattccgcgaaaacccttccctgatttcgtgtataagaggatcaaggccaggagccgcctagctgaacttagaggcgtgcccagaggtctttatgatggccctgtatgcgaggtgtcggttaccccaaaaacggtgacccctgcgagtagcgcaaagacttccccagccaaacagcaggcccctcccgtcaggaatctgcaccaaagcggcttcagtttgtctggcgcgcaaatagatgacaatatccctagaagaactacccagcggatcgtcgccccccccggcgggcgcgcaaatatcacctctctggggtag

SEQ ID NO: 185380 - DNA, 1611 bp, synthetic construct
  misc_feature 1..1611: note = Description of Artificial Sequence: Synthetic coding sequence
  source 1..1611: mol_type = other DNA
atggaggacggcctgatcaagcagatcggcgagaacctgatcgtgcctggcggggtgaaaaccattgaagctcattcgagaatggtgatcccagggggtattgacgtgcataccagattccagatgcccgatcaggggatgacttctgcggacgattttttccagggcaccaaggcagctctggcaggcggaaccactatgatcatcgaccatgtggtacctgagcccggcaccagtctcctggccgcattcgaccagtggagggaatgggcagactctaagtcctgttgtgactattctctgcatgtagacatctccgaatggcataaggggattcaggaagagatggaagccctggtgaaggaccatggcgtcaactcatttcttgtatacatggctttcaaggacagattccagttaaccgattgccagatttatgaggtgttgtcagtgattagagacatcggcgccatcgcacaggtgcatgccgagaatggagacataatcgccgaggaacagcagcggatcctcgatttgggcatcactggacctgagggacacgtgttgagtaggcccgaggaagtggaggctgaggctgtcaaccgtgctatcactattgccaatcaaaccaactgccctctctacatcacaaaggtgatgtccaaatcaagcgctgaagtgatagcccaggcgcgtaagaagggtaccgtagtgtacggcgagccaataactgcctcccttgggaccgacggctcccactactggtcgaaaaactgggccaaggctgccgcttttgtcaccagcccacctctgtcacccgaccccaccactcctgatttcctgaattccctgctctcttgcggcgacctgcaagtaaccggctccgcccattgcactttcaataccgcccagaaggcagtgggcaaagataattttaccctgatcccagagggtacgaacggcacagaggagcgcatgagcgttatctgggacaaggcggtcgtcaccggtaaaatggacgaaaaccagtttgtcgctgtgacctcaaccaacgcggccaaggtttttaatctgtacccaaggaagggcaggatcgctgtcggcagtgatgcagatctcgttatttgggatcctgacagcgtgaagactatatcagctaagactcataatagctctttggaatataacattttcgaagggatggagtgtcgaggctctcccctcgtagtgatttcccaggggaagatcgtgctggaggacggaacattgcacgtgaccgaaggatctggcaggtacatacctcgcaagccgttccctgatttcgtgtataaacggatcaaggcgcggtctcggctcgctgagttacggggcgtcccccggggcctctacgacgggcctgtctgtgaggtcagcgtgacgccaaagaccgtcacccccgcctcatcagccaagaccagtccggccaagcagcaggccccccctgtaaggaatttacaccaaagcgggttcagcttgagcggggcccagattgacgacaacatccctaggcgaacgacccaaaggattgtggccccgcctggtgggagggccaacatcaccagcctgggttag

SEQ ID NO: 185381 - DNA, 1719 bp, synthetic construct
  misc_feature 1..1719: note = Description of Artificial Sequence: Synthetic coding sequence
  source 1..1719: mol_type = other DNA
atgagctaccagggcaagaagaacatcccccggatcaccagcgacaggctcctgattaaaggcggcaaaatagttaacgacgatcagtccttctacgctgacatttacatggaggatggtttgattaagcagataggcgagaatctcatcgtaccaggtggagtaaaaactatagaggcgcatagccgaatggtcatcccaggggggattgatgtccatacaaggttccagatgcctgatcaggggatgaccagtgccgacgacttcttccaggggaccaaggcagcgttggccgggggaactaccatgatcattgaccacgttgtaccagaaccggggacttctcttttagctgcttttgatcagtggcgggaatgggcagatagcaaaagttgctgcgattattctttgcatgtagatattagcgaatggcacaagggaattcaggaggaaatggaggctctggtcaaagaccatggtgtcaattcattcctggtgtacatggcgttcaaggaccggtttcagctaacagactgccagatttacgaggtgcttagcgttatcagagacattggggctattgcccaggtgcacgcggagaatggtgatattatagccgaagagcaacagagaatccttgatctcggcataactggcccggaaggccatgtattatctcgtcccgaggaggtggaggcggaagctgtgaatcgggctatcaccatagcaaatcagacaaattgccctctgtatattactaaagtgatgtcaaagagttcagctgaggtgatcgcccaagctcggaaaaagggtaccgtggtgtacggggagcccattacagcctccctgggaaccgatggttcccactactggagcaaaaattgggctaaagcggccgcgttcgtaacaagtccccctctgtcccccgaccccacgacaccggactttctaaactctctcctctcctgtggcgacctccaggtcacgggtagtgcgcactgcacctttaacactgcacaaaaggctgtgggtaaagacaacttcacattaattcccgaagggacaaatggcaccgaggagcgtatgtccgttatatgggacaaggccgttgtcaccggcaaaatggatgaaaaccagttcgtggcagtgacctccactaacgctgcgaaagtgtttaacttatatccaaggaaaggaaggattgccgtgggttcggatgcagatctggtaatctgggatcccgatagtgtcaagacaatcagtgctaagacgcacaacagttccctggaatacaatatttttgaagggatggaatgtcgggggagcccgctggtggtcattagtcagggtaagatcgtcctcgaggacggtacgctccacgtcactgagggcagcggcagatatataccccgtaaacccttccccgacttcgtctataaaaggatcaaagccaggagccgattggccgagcttcggggggtcccccgaggactgtacgatggaccggtctgtgaggtaagtgtgacccccaagaccgtgacccctgcttctagcgccaagacatcgcctgcaaaacagcaggccccacccgtgcgtaacctgcaccagtcaggctttagcttatccggggcccagatcgatgacaatatcccaagacgtacaacacagcgaattgttgcaccacccggggggagggctaatattacaagcctgggatag

SEQ ID NO: 185382 - DNA, 1611 bp, synthetic construct
  misc_feature 1..1611: note = Description of Artificial Sequence: Synthetic coding sequence
  source 1..1611: mol_type = other DNA
atggaggacggcctgatcaagcagatcggcgagaacctgatcgtgccaggcggcgtcaagacaatcgaagcgcacagcaggatggtgatcccaggcggcatagacgttcacacccggtttcaaatgccagaccaggggatgaccagcgccgatgatttcttccagggcacaaaggccgccctcgccgggggaaccaccatgatcattgaccatgtggtgcctgagccaggaacgagtctcctggctgcttttgaccagtggcgagaatgggctgattctaagagctgttgtgactactccttacatgttgacatatctgaatggcacaagggcatacaggaggagatggaggctctggtcaaggaccacggggtgaattctttcctggtctacatggctttcaaagacaggtttcagctgaccgattgccagatctacgaagtgctgagcgtgatccgagacatcggtgcaatagcccaagtccacgctgagaatggcgacattattgcagaggagcagcaacgaattcttgatctcggcatcaccgggccagaaggccatgtgttgtctcggccagaggaggtcgaggcagaggctgtgaaccgcgccatcactatcgcaaaccaaaccaactgcccgttgtacatcacaaaggtcatgtctaagagcagtgctgaagttattgcccaagcgcggaaaaaaggtacagttgtctacggagagcctattactgctagcctgggtaccgacgggagccactactggtccaaaaactgggccaaagccgccgcgtttgttacttcaccaccgctatctccagatcccaccacaccagactttctgaattccctgctgtcatgcggggatctgcaagtcacagggtccgcccactgcacatttaataccgcccagaaggcggtcggcaaggataactttacccttataccagaggggactaacggtaccgaggaaaggatgagtgtcatctgggataaagctgttgtcacggggaagatggatgaaaaccaattcgtggcggttacatctactaatgccgccaaagtgtttaatctgtatcctcgcaaggggcggatcgcagtcggctcggacgccgacctggtaatttgggacccagacagtgtaaagaccatttcagcaaaaacacacaacagctcactcgaatataacattttcgaggggatggagtgtagggggtccccactggtcgtaatctcccagggaaaaatcgtgttagaagacggcaccttacatgtaaccgaggggtcaggaaggtacatccccaggaaacccttcccggatttcgtgtacaaaagaataaaggcgcgctctcggcttgctgagttgcgaggggtgccacgcggtctgtatgacggtccagtgtgcgaggtcagcgtcacaccgaaaaccgtgacacccgcatctagcgctaaaactagtccagccaagcagcaggctccacccgtgaggaatctgcatcagagcggatttagtctcagcggggcgcagattgacgataatatcccaagaagaaccactcaacgaatcgtcgccccgcccggaggcagagcaaatattacaagcttagggtag

SEQ ID NO: 185383 - DNA, 597 bp, synthetic construct
  misc_feature 1..597: note = Description of Artificial Sequence: Synthetic coding sequence
  source 1..597: mol_type = other DNA
atgagcgtgatctgggacaaggccgtggtgaccggcaagatggacgaaaatcagttcgtggccgtgaccagcaccaacgcggctaaagtatttaacctgtaccctagaaaaggcagaatcgccgtaggctcggacgccgacctggtgatatgggatccggacagtgttaagacaatctttgagggcatggagtgtcggggctcacccttggtggtgatcagccaagggaagatcgtcctagaggacggcactctgcatgtgactgaggggtccggccggtacatcccgcgaaagcctttcccagacttcgtttataaacgcatcaaagcgcgttccagactagccgaactgcgcggcgtaccacggggcttgtatgacggacccgtctgcgaagtgagcgttacgccaaaaaccgtcacccctgcatcttctgctaaaacctcacccgcgaaacagcaggccccccctgtgagaaacctccaccaatccggcttttcgctgagcggagcccagattgatgacaatattcccaggaggacgacccagagaattgtggcccctccaggtggcagggctaacattaccagccttgggtag

SEQ ID NO: 185384 - DNA, 2055 bp, synthetic construct
  misc_feature 1..2055: note = Description of Artificial Sequence: Synthetic coding sequence
  source 1..2055: mol_type = other DNA
atggccagcggccggcggggctgggacagcagccacgaggacgacctgcccgtttaccttgcccggccaggaactaccgatcaagtgcccaggcagaagtacggcggcatgttttgcaatgttgagggcgcttttgaatcaaagacactggattttgatgcgctatccgtcggtcagagaggagccaaaaccccaagaagtgggcagggaagcgatcggggcagcggatctcgcccaggaatcgaaggagacaccccaaggagaggtcaagggcgcgaggagtcacgggagccggcacccgcatcccctgctccagccggagttgaaattcggagcgcgactgggaaggaggtgcttcagaacttaggaccgaaggataagagcgatagactgctgatcaaaggcggtcgtatcgttaatgacgatcagagcttctatgctgacatttatatggaggatgggctcatcaaacagattggagacaacctgattgtgcctgggggcgtcaaaaccattgaggcgaacggaaagatggtcatccccggagggatagatgtccatactcatttccagatgccctataaaggtatgacaactgtggatgactttttccagggaaccaaagctgccctggctggggggactacaatgatcattgaccatgtggtgcccgagcctgagagtagcctcactgaggcttacgaaaaatggagagagtgggctgacggaaaaagctgttgcgactacgcgctccacgtggatattacacactggaatgattcagtcaagcaggaagtgcagaatctaattaaggacaagggcgtgaattcttttatggtgtacatggcctataaggatctgtatcaggtgtctaatacggaattatacgagatatttacctgcctgggcgagctcggagccatcgcgcaggttcacgcggagaatggggacattatcgctcaggagcaaacacggatgctggagatggggatcaccgggcctgagggccacgtgctgagccggccggaggaactcgaggcggaagctgtctttcgcgccattactatagccagtcagactaactgccctctttatgtgacgaaagttatgtctaaaagcgcagctgacttaatctcacaggccagaaagaagggtaatgtagttttcggcgaaccaatcacagcgagcctgggcatcgacggtacccattattggagcaagaactgggcaaaagcagctgccttcgtgaccagcccccctctcagtcctgacccaactactcctgattatatcaactccctcctggcctcgggagacctgcagctatcgggcagcgcccattgtacattttctacagcgcagaaggccataggtaaagacaattttactgcaataccagagggaaccaatggcgtagaggaacggatgagcgtcatatgggataaggctgttgccacaggtaagatggatgagaatcagttcgtagcagtcactagcaccaacgctgcgaagatctttaatctttaccccaggaaagggcggatctctgtgggatccgattcggacctcgtgatctgggaccctgatgccgtcaaaatcgtgtccgcgaaaaatcatcagtccgccgccgagtataatatcttcgaagggatggaactgcgaggagcaccactcgttgtcatctgtcaaggcaaaataatgttagaagacggaaatctgcacgttacccaaggcgcggggcggttcatcccctgttccccgttcagtgattatgtgtacaaaaggattaaggcgcggcgcaagatggcggatttacatgccgtcccaagaggaatgtatgacggccccgtgttcgacttaaccactacacctaagggtggaacccctgccgggtctgccagaggaagcccaaccaggccaaaccctcccgttaggaacctgcaccagagtggcttttcgttatctggcactcaagtggacgagggcgtccgctccgcctccaaacggatcgtggccccacccggaggacgcagtaatatcacatcccttagttag

SEQ ID NO: 185385 - DNA, 1713 bp, synthetic construct
  misc_feature 1..1713: note = Description of Artificial Sequence: Synthetic coding sequence
  source 1..1713: mol_type = other DNA
atgagctaccagggcaagaagaacatcccccggatcaccagcgaccgcctgcttataaaggggggtcgtattgtgaacgacgatcagagcttctatgctgacatatacatggaggacggcctgatcaagcagatcggcgacaacctaattgtgccaggcggtgtgaaaacaattgaagccaatggaaagatggtgattcctggcgggatagacgtacacacccactttcagatgccgtacaagggcatgactacagtggatgatttttttcaggggaccaaggctgcccttgccggcggcaccacgatgattattgatcacgtcgtgcctgaacccgagtcctccctgaccgaggcttacgagaaatggcgggaatgggcagacggcaagtcttgctgtgactatgccttacatgttgacataacgcattggaatgactccgtgaaacaggaagtccaaaacctgattaaggataagggcgttaactcctttatggtatatatggcctacaaagacctgtaccaggtttcaaataccgagctttacgagatcttcacatgtcttggggagctgggcgcaatcgctcaggtgcacgctgagaatggcgacataatcgcacaggaacagacgcggatgctggaaatgggaataacgggacccgaaggacacgttctctcccggcccgaggagcttgaagccgaagcggtgttccgagctatcacaatcgccagtcaaacaaactgccctctgtacgttacaaaagttatgtccaaaagcgctgccgacctcatttcccaggctcgaaagaaaggcaacgtcgtctttggtgaaccaatcactgcttcgttggggatcgacggaacacactattggtctaaaaactgggctaaggcagctgctttcgtcacaagtccgcccctatctcccgaccccacgactcctgactacatcaacagcttacttgcatcaggggacctgcagttaagtggttccgcccattgtacgttctctacagcccaaaaggctattggcaaggacaacttcacggccatccccgagggtacgaacggcgtagaggaaagaatgagcgtgatttgggataaagccgttgctaccggaaagatggacgagaaccaattcgtggccgtgacatccacaaatgctgcaaaaatatttaacttgtaccctcgaaaggggaggatctcggtgggcagcgacagtgatcttgttatttgggaccccgatgccgtgaagattgtgagcgccaagaatcaccagagtgcagccgaatacaatattttcgaaggcatggaacttagaggcgctcccttagtggttatttgtcagggcaaaattatgcttgaggatgggaaccttcacgtgactcaaggcgccgggaggtttattccatgctctccattcagcgactacgtgtacaaaagaatcaaggcgagacgcaagatggccgacctccatgctgtcccccgcggaatgtacgatggaccagtattcgacctcacgaccacccccaaaggcgggactcccgcaggttctgccagaggatccccgaccagaccaaatccgcccgtccgaaacctgcaccagtccgggtttagcctgtcaggaacgcaagttgacgagggggtacgctccgcaagtaagcggatcgtagctccccccggggggcgcagcaatattacgtccttgagttag

SEQ ID NO: 185386 - DNA, 279 bp, synthetic construct
  misc_feature 1..279: note = Description of Artificial Sequence: Synthetic coding sequence
  source 1..279: mol_type = other DNA
atgagctaccagggcaagaagaacatcccccggatcaccagcgaccggctcctcattaagggtggaagaatcgtgaatgatgatcagagcttttacgctgacatctacatggaagatggattgatcaagcagatcggcgacaacctaatcgtgccaggcggcgttaagacgatcgaagctaatggaaagatggttattccaggcggaattgacgtacacacacacttccaaatgccctataagggcatgaccactgtcgacgacttcttccaggggtag

SEQ ID NO: 185387 - DNA, 591 bp, synthetic construct
  misc_feature 1..591: note = Description of Artificial Sequence: Synthetic coding sequence
  source 1..591: mol_type = other DNA
atggacgagaaccagttcgtggccgtgaccagcaccaacgccgccaaaatctttaatctgtacccccgcaaggggaggatcagtgttggaagcgactcagacctggtcatatgggatcccgacgctgtgaaaattgtctccgcaaagaatcaccagtctgccgccgagtacaatatatttgaaggtatggaactgcggggcgcacccctggtagtcatttgtcagggtaaaatcatgctggaagatggcaatctgcatgtcacccagggtgcaggacgctttattccatgtagcccgttttctgattacgtctacaagcgaatcaaggccagaagaaaaatggccgacctccatgctgtcccgcgcggaatgtatgatgggcccgtgtttgacctgacgacgacgcctaagggaggaacccctgctggaagcgcacgaggctcgccaacgagacctaaccctcccgtacgcaacttgcatcaatctgggttttcgctgtctgggacacaggtggacgagggtgtgcgcagcgcgagcaagagaatagtagcgcctccgggtggccggtcgaatataaccagcctttcctag

SEQ ID NO: 185388 - DNA, 1719 bp, synthetic construct
  misc_feature 1..1719: note = Description of Artificial Sequence: Synthetic coding sequence
  source 1..1719: mol_type = other DNA
atgagcttccagggcaagaagagcatcccccggatcaccagcgacagacttctaatccggggcggcagaattgtcaatgacgaccagagcttttatgccgacgttcatgtggaggacgggcttatcaagcagattggcgagaatctgattgtccctggcgggatcaagacgattgacgcacacggcctgatggttttaccgggcggcgtggacgtgcatacccggctgcagatgccggtcctcggaatgacaccagcggacgatttctgccagggtacaaaggccgcacttgcggggggcaccacaatgattctagatcacgtgttccctgatacaggagtgtctctgctggccgcctacgaacagtggcgcgaacgtgccgatagcgccgcctgttgcgactatagcttgcatgttgacattactaggtggcacgagagtataaaggaggagctcgaagctctagtaaaggagaagggggtgaatagtttcctggtctttatggcatataaggaccggtgccagtgttccgactcccagatgtatgagatcttctccataattagggatctcggggctctcgcccaggtccatgctgagaatggggatattgtagaggaggagcagaagaggttgctggaactcggtattaccgggccagaagggcacgtactgagccatccagaagaggtcgaagccgaagccgtttaccgggccgttaccatagcaaagcaagcaaattgtccgttgtatgtgacaaaagtgatgtctaagggcgcagccgacgctatcgcccaggcaaagcgtaggggcgtcgttgtgtttggcgaacctattacggcaagtctagggaccgacggatctcattattggagcaagaactgggccaaggctgcggcgtttgtcacgagccccccggtcaacccggatccgaccactgccgatcacttgacttgtctgctaagcagcggggatctccaggtcactggttctgcccattgcacatttacaaccgctcaaaaggccgtcggtaaggacaatttcgcactaattcccgaaggcactaacggcatcgaagaaaggatgagcatggtctgggaaaagtgcgttgccagtggcaagatggacgaaaacgaatttgtggctgtgacctcaaccaacgctgcaaagatttttaatttttaccctaggaaggggcgggttgccgtggggagcgatgctgatttggtgatctggaaccccaaggcaactaagatcatttcagccaaaactcacaacttaaatgtcgaatataacatcttcgagggagttgagtgtcggggcgcgccagctgtggtgatctcccagggtcgcgtggcactggaagacggcaaaatgtttgtgactccgggggcgggacgattcgtaccccggaaaacgtttcccgattttgtgtacaaacgcattaaagcccgcaatcggttggccgagatccacggcgttcccagaggtctctacgacggtcctgtgcatgaagtaatggtcccagccaagcctgggtccggagcccccgcgcgtgccagctgccccgggaagatcagtgtgccaccagtccggaatctgcaccagtcgggattttctctcagcggaagccaggctgatgaccatattgctcgacgaaccgctcagaaaatcatggcccccccgggtggccgctcaaatataacaagtcttagttag

SEQ ID NO: 185389 - DNA, 1239 bp, synthetic construct
  misc_feature 1..1239: note = Description of Artificial Sequence: Synthetic coding sequence
  source 1..1239: mol_type = other DNA
atgcccgtgctgggcatgacccccgccgacgacttctgccagggcaccaaagccgctctcgctggaggcacaactatgatcctggaccacgtattccctgataccggagtctctctcttagccgcctacgaacagtggagggaacgagctgactcggccgcttgttgcgattacagtctgcatgtggacattacgcggtggcatgaatctatcaaggaggaacttgaagccttagtgaaggagaagggtgtgaattcattcctggtgttcatggcctataaggacaggtgtcaatgctcagactcgcagatgtacgagattttctcgatcatccgagacctcggcgctctagcacaagtacatgccgagaacggcgatattgtcgaggaagtcgaggccgaagcagtgtacagggctgtcacgatcgccaaacaggccaactgtcctctgtacgtgaccaaggtgatgtcgaagggcgccgctgatgccatcgcccaggcgaagcgtcggggcgtggtggtgttcggcgaaccaattactgccagcctcggaacggacggctcacactattggagcaagaactgggccaaggcggccgccttcgttacttctcccccggtcaatcccgatccgaccacagccgatcacctcacatgcctcctgtctagtggcgatttacaggtgaccggatcggcacattgtaccttcaccacagctcaaaaagccgtgggaaaggacaattttgcattaatcccagagggaaccaatggtatcgaagaacggatgtccatggtgtgggaaaaatgtgtggcttccggcaagatggacgaaaatgagttcgtagccgtgacatctaccaatgcagccaagatctttaatttctatccaagaaagggtcgggtggccgtcggctctgatgctgatctggtgatctggaacccaaaagcgaccaagataatctctgctaaaacacacaatctgcttgcggagattcacggagtgccgcgaggactatacgacggacccgtgcatgaggtgatggtgcccgcaaaacccggatctggcgctccagcaagggcgtcttgccctggcaaaatctccgtaccaccggtgaggaatctgcaccaatcaggattttccctctccggaagtcaggccgacgaccacattgctcggagaacagcgcagaaaattatggccccacctggaggacgaagcaacatcaccagcctgtcttag

SEQ ID NO: 185390 - DNA, 1239 bp, synthetic construct
  misc_feature 1..1239: note = Description of Artificial Sequence: Synthetic coding sequence
  source 1..1239: mol_type = other DNA
atgcccgtgctgggcatgacccccgccgacgacttctgccagggcactaaggcagcactcgctggaggaactactatgatcttagaccacgtgttccccgatacgggggtgtcactactggccgcctacgagcagtggcgagagagagcagatagcgctgcctgctgtgattatagtttgcatgtggacatcacccggtggcacgaatccataaaggaagaactggaagctctcgtgaaagagaaaggtgtgaacagcttcctggtcttcatggcatacaaagatcggtgccagtgttccgatagccagatgtatgagatcttttctattatcagagacttgggcgccctggcccaggtccatgctgagaacggtgacatcgtagaggaggtggaggcagaggccgtttaccgggccgtcacgattgctaagcaggccaactgccccctgtacgtgacaaaagtcatgtccaagggtgccgctgatgccatagcccaagccaagcgtaggggtgtcgtggtgttcggtgagccaattactgccagtttagggaccgatggttcccattactggagtaagaactgggccaaggccgcagcttttgtcacctctccccccgtcaacccggatcccaccacagccgatcatcttacatgcctcctgagttccggggatctgcaggtcacaggtagtgcccactgcaccttcaccaccgcacagaaagcggtgggcaaggacaactttgccctgattcctgaagggacaaatggaattgaggaacgaatgtctatggtgtgggaaaagtgcgtagcctctggaaaaatggacgagaacgaattcgtagctgttacctccacgaacgcggctaaaatttttaatttctaccccaggaaaggcagagtagccgtgggctccgatgccgacctggtgatctggaatccaaaagctaccaagatcatctcagcaaaaacccacaatctgcttgctgagatccacggggtgccccggggtctgtacgatggtcctgtgcatgaagtgatggttccagcaaagcctggatcgggtgctccagcaagagcttcatgcccagggaagatcagtgtgccgcctgttcggaaccttcaccagtctgggttctcactgtccggaagtcaggccgacgaccacatcgctaggcggactgcacagaaaattatggctccaccagggggcaggagcaacataacttcattaagctag

SEQ ID NO: 185391 - DNA, 1695 bp, synthetic construct
  misc_feature 1..1695: note = Description of Artificial Sequence: Synthetic coding sequence
  source 1..1695: mol_type = other DNA
atgctggccaacagcgccagcgtgcggatcctgatcaagggcggcaaggtggtcaatgacgattgtacccacgaggccgatgtctacatcgaaaacggcatcattcagcaggtgggacgggaactgatgattccagggggcgccaaggtaatcgatgctacgggtaaattggtgattccaggcggcatcgatacctcaacgcatttccatcagacattcatgaacgccacatgcgtggatgatttttaccacggcactaaggctgctctggtgggggggaccaccatgataattggacatgttttaccggataaggagacatctttggtggatgcctacgaaaaatgtaggggtctggctgatcctaaggtttgctgcgattacgccctgcacgtgggaattacctggtgggctccaaaagtgaaggccgaaatggaaaccctcgtgagggagaagggggtgaacagttttcagatgtttatgacttacaaggatctctacatgcttcgcgattcagagttataccaggtactccacgcctgcaaggacatcggggcaatcgccagggtgcatgccgaaaacggcgaactggtcgccgagggagctaaggaggctctagatctgggaattacggggccagagggcatcgagatatcccgacctgaagagctcgaagctgaagccacacatcgggtaatcaccatcgctaaccgcacccactgcccaatatacctggtaaacgttagttccatcagtgctggcgatgtgattgcagccgcgaagatgcaaggcaaagtcgtgctggccgagaccaccactgctcacgccacgctcactgggctacactactaccaccaggactggtcccacgcagcagcctatgtgaccgtgcctccccttagactagacactaatacttcaacctatctgatgtccctcctcgccaacgataccctgaacatcgtggcttctgaccacaggccctttacaacgaagcagaaggcaatgggcaaagaggacttcacaaaaatcccgcatggcgtgtccggtgtccaggaccggatgagcgtcatttgggaacgaggagtggtggggggaaaaatggacgaaaacagattcgtcgccgtcacaagctccaacgctgctaagttactcaacctgtaccccaggaaaggcagaattattccaggagccgacgccgacgtcgtggtttgggatcccgaagccacaaaaactatcagcgcttccacccaggttcagggtggggatttcaatctgtatgaaaacatgcgatgtcacggggtaccactggttaccatctcaaggggcagagtcgtgtatgagaacggcgtattcatgtgcgctgaagggacaggcaaattttgccctttgagatcgttccctgatacggtttacaagaagctggtacagcgggagaagactctcaaagtgcgcggggtggaccgcacaccttatctgggcgatgtggccgtcgtcgtgcatccaggaaaaaaggagatgggaacaccactggctgatacccccacccgacctgttactcggcacggcggtatgagagacctgcatgagtcaagtttctccctgtctgggtcacagatagatgatcatgtgcctaagcgcgccagtgcccggatcttggctccccccggcggccgctcctctggaatctggtag

SEQ ID NO: 185392 - DNA, 1695 bp, synthetic construct
  misc_feature 1..1695: note = Description of Artificial Sequence: Synthetic coding sequence
  source 1..1695: mol_type = other DNA
atgctggccaacagcgccagcgtgcggatcctgatcaagggcggcaaagtggttaatgacgattgcactcacgaagctgacgtgtacatcgaaaatggcatcatccagcaggtgggcagagaactgatgatccccggcggggccaaagtcattgacgcaactggtaagctggttatcccggggggtatcgacacctccacacactttcaccaaaccttcatgaacgcaacttgcgttgacgacttctaccacggtacgaaggccgccttggtggggggcacaacgatgattataggccatgtcctccctgacaaggaaacttcattagtggacgcatacgaaaagtgcagaggcctggccgacccaaaggtgtgttgtgactacgctctccatgtcggaattacctggtgggcaccaaaagtcaaggctgagatggagactctcgtgcgagagaagggggtgaacagctttcagatgttcatgacctacaaggatctatatatgctacgcgacagtgagctataccaggttttacatgcctgtaaagacatcggggcaatcgcaagagttcacgctgagaatggggaattggtggccgagggtgcgaaagaggcactggatctcggaattacagggccagaggggatagaaatcagccggcccgaggaactggaggctgaagcaacccacagggtcatcaccattgccaaccgcactcactgccccatctatctggtcaacgtctcttccatcagtgcaggggacgtgattgcagcagccaagatgcagggaaaggtggtgctggccgagaccacaacggcccacgccacactcacaggactgcactactaccaccaggactggtcccatgcggctgcttatgtgactgtacctcccctgagactcgacacaaatacctctacatacctcatgtcactgctggccaacgacacattaaacattgtggcaagtgaccaccgaccattcactacaaaacagaaggctatgggtaaagaggacttcaccaagatcccccatggcgtgagcggtgtgcaggaccgcatgtccgtgatttgggaacgaggcgtagtgggaggaaagatggatgagaaccggtttgtggctgtgacaagttctaacgccgcaaaacttctgaatctctatcccaggaaaggcaggataattccgggggcggacgccgacgtggtggtgtgggatcctgaagctactaagacgatctccgcctcaacacaggtccagggtggcgatttcaatctgtacgaaaatatgcgctgtcatggggttccacttgttacaatttcgagagggagggttgtgtatgagaatggcgttttcatgtgcgcggagggaactggtaagttttgtccgctgaggagcttccccgatactgtttacaagaaactggtacagcgggagaagaccctaaaggtgaggggggtcgaccgcacgccctatttgggtgatgtcgcggttgtggtccaccccggcaagaaagaaatggggacacccctggctgatacaccgactcggccagtgacgcgacatggtggaatgagggacctgcacgagtcaagcttttctttgtctggatcacagatcgatgaccacgtccctaaaagagccagtgcgcgtattctcgccccaccggggggtaggtccagtggcatctggtag

SEQ ID NO: 185393 - DNA, 573 bp, synthetic construct
  misc_feature 1..573: note = Description of Artificial Sequence: Synthetic coding sequence
  source 1..573: mol_type = other DNA
atgctggccaacagcgccagcgtgcggatcctgatcaagggcggcaaggtggttaatgatgactgcacacacgaagcagacgtgtacatcgagaatggaatcatccagcaggtagggagagagctaatgatcccaggaggtgcaaaggttattgatgcaacaggcaaactggttattcccggaggtattgatacaagtacacattttcatcaaaccttcatgaacgccacatgcgttgacgatttctaccatggcaccaaggcggctctagtcggcggcaccaccatgatcatcgggcatgtcctgccggataaggagacaagccttgtggatgcctatgagaagtgtagaggccttgccgatccaaaggtttgctgtgattatgcattacatgtcggtattacttggtgggctcccaaggtgaaagccgagatggaaaccttggttcgtgagaagggggtcaactcattccagatgttcatgacatataaggacctgtatatgctgcgggattccgagttataccaagtgcttcatgcttgtaaggatattggagcaatcgcgcgggtttag

SEQ ID NO: 185394 - DNA, 525 bp, synthetic construct
  misc_feature 1..525: note = Description of Artificial Sequence: Synthetic coding sequence
  source 1..525: mol_type = other DNA
atgctggccaacagcgccagcgtgcggatcctgatcaagggcggcaaggttgtgaatgatgattgtacccatgaggccgatgtgtacatcgaaaacggaattattcagcaggtaggacgagaactgatgatccccggcggtgccaaagttatcgacgctaccggcaagttggttatccccggaggcattgatacctctacccattttcaccagacgtttatgaacgcgacttgcgttgacgatttttatcacggcacaaaagcagcccttgttgggggcacaaccatgataatcgggcatgtgcttccagacaaggaaacttcattagtcgacgcttatgagaagtgcaggggcctcgcagaccctaaggtctgctgcgactatgccttgcatgtgggtatcacctggtgggccccaaaagtcaaagctgaaatggagacactcgtgagggagaaaggagtgaattccttccagatgttcatgacatacaaggacctctacatgctgcgagacagcgaactgtag

SEQ ID NO: 185395 - DNA, 498 bp, synthetic construct
  misc_feature 1..498: note = Description of Artificial Sequence: Synthetic coding sequence
  source 1..498: mol_type = other DNA
atgctggccaacagcgccagcgtgcggatcctgatcaagggcggcaaagtggtcaatgacgactgtacccatgaggcagatgtgtatattgagaacggaatcattcagcaagtgggtagggagctgatgatcccgggaggcgctaaagttatcgatgcaactgggaaattagtgattccgggcggtatcgatacaagcacacacttccatcagacattcatgaatgccacatgcgtggacgatttctaccacgggactaaagcagccttggtcggtggaaccactatgatcataggtcatgtgctacccgataaagaaactagtctggtcgatgcctacgagaagtgtcgtggcctggcagatccaaaagtttgctgcgactacgccctccatgtcggcattacttggtgggccccaaaagttaaggccgagatggagacgcttgtcagagagaagggagttaattcgttccagatgttcatgacttataaagactag

SEQ ID NO: 185396 - DNA, 522 bp, synthetic construct
  misc_feature 1..522: note = Description of Artificial Sequence: Synthetic coding sequence
  source 1..522: mol_type = other DNA
atggcccccgtgctgagcaaggacagcgccgacatcgagagcatccttgcattaaacccaaggacacaaactcacgccacactcaggagtacctctgcgaaaaagctggacaaaaagcactggaagaggaatccagacaaaaactgtttcaactgcgaaaaattggaaaataattttgatgacattaagcataccacactaggtgagagaggagcgctccgagaggctatgagatgcttgaagtgcgccgatgcaccatgccaaaagtcctgcccaacaaatcttgacattaagtcgtttataacaagtatcgccaacaaaaactactacggggccgctaagatgatctttagcgataatccactgggactgacctgtggaatggtgtgccccacctccgacttgtgtgtgggcggctgtaatctgtatgcaaccgaagaaggcccaattaatatcggagggttacagcaatttgctactgagactctgatcctggccttctctctgatgaaccacctgtag

SEQ ID NO: 185397 - DNA, 3078 bp, synthetic construct
  misc_feature 1..3078: note = Description of Artificial Sequence: Synthetic coding sequence
  source 1..3078: mol_type = other DNA
atggcccccgtgctgagcaaggacagcgccgacatcgagagcatcctggccctgaaccctcgcactcaaacccacgccacgttgagatccacatccgctaaaaaactcgacaagaaacactggaaacgaaatcctgacaagaattgcttcaactgcgagaagttggaaaataatttcgatgatatcaaacacacgacgttaggcgagaggggggcattacgagaggccatgcggtgcctgaaatgtgccgatgcgccttgtcagaaatcctgccctacaaacttggacatcaaatcatttattacttccatcgccaacaagaattactatggggccgcgaaaatgatctttagcgacaaccctctgggcctgacctgcggcatggtgtgtccaaccagcgacctgtgcgttggcgggtgtaacctgtacgctactgaagaagggcccattaacatcggaggactccagcagttcgcaacggaggtatttaaagccatgtctataccccagatcaggaacccaagcctccccccaccagaaaagatgagtgaagcctatagcgccaagatcgccctgttcggggcaggcccagcatctatcagttgcgcttcatttctggcacgtctgggctattcagatatcacaattttcgagaagcaggagtacgttggtggactcagtactagcgaaattccacagtttcgcctgccatacgacgtcgtgaactttgagatcgaactgatgaaggatctgggggtgaagatcatttgtggcaaatcgctctcagtgaacgaaatgaccctgagtacgcttaaagagaaaggctacaaggccgcattcattggcataggccttccagaacctaacaaggatgctatcttccaagggctgacccaggaccagggattctacaccagcaaggatttcttgccgcttgtcgctaaaggatccaaagcggggatgtgtgcctgtcattctccactcccatcaattcggggcgtcgtgatcgtgctgggtgcaggcgacacagcattcgattgtgccacatcagccctccgctgtggcgcgcggcgcgtgtttattgtgtttcgcaaaggattcgtgaacataagagcagtgcccgaggaaatggagctcgctaaggaagagaagtgtgaattcctgccgttcctcagcccccgaaaggtaattgttaaaggagggcgaatcgttgcgatgcaattcgtgcggacagaacaggacgaaactggtaaatggaacgaagacgaagaccagatggtgcacctgaaggcagacgtggtgatctctgcttttggctctgtgctttccgatccaaaagtgaaagaggccttgagtcctattaaattcaatcgctggggactccccgaagttgatcccgagaccatgcagaccagcgaggcttgggtctttgcaggcggagacgtggtagggctagccaatacgaccgtagaatcagttaacgatgggaagcaggcaagttggtacattcacaagtacgtgcagagccaatatggagccagcgtgtccgctaagccggagctgcccctgttttatacaccaattgatctagtggatatttccgtggaaatggcgggcttgaaatttatcaatcccttcggccttgcgtctgcaacccccgccactagcacgagcatgatcagaagggccttcgaagccggctgggggtttgctcttactaaaacattcagcctggacaaggacatcgtgacaaatgtgtctccccggataatcagaggaactaccagtggacctatgtatggtcctgggcaatcctcgtttctcaacattgagctgatttccgagaagacagctgcctattggtgccaatcagtgacagaactcaaggctgatttcccggataatattgtgatagcctccattatgtgctcttataacaagaatgattggactgaactggccaaaaagagcgaagattcgggcgctgatgccctggagctaaatctgagctgcccacatggcatgggggagcggggtatggggctcgcatgcgggcaggaccctgaactcgtgagaaacatctgcaggtgggtgagacaggcagtgcagattccattctttgcgaaactcacgcctaatgtgacggacattgtaagtatagcaagggcagccaaggaaggaggggccaatggcgtcaccgcaaccaataccgtgagtggactcatgggactaaagtccgatggcacaccctggccagcagtagggattgcgaagcgcaccacctatggtggggtgtcgggaacggctatccgcccgatagccctgcgtgccgtaacctccatcgcgcgggcgctgccaggattcccgatactcgccaccggcggcatcgacagtgcggaaagcggcctccagttcctgcactccggcgctagtgtcttgcaggtttgcagcgcaattcagaatcaggattttacagtaattgaagactactgtacaggcttaaaggccctcctctatctcaagagcatcgaagagctccaggattgggacggccagagccctgccacggtctcccatcagaagggcaagcctgtgccacggatcgccgaacttatggataaaaagttgccttctttcgggccttatcttgaacaacggaagaagatcattgctgaaaacaaaatccgtctcaaagagcaaaacgttgcattcagcccccttaaacggaactgtttcatccctaaacgcccgattcccaccattaaagatgtgattgggaaagctctgcagtacctgggcacctttggcgagctgagcaatgtcgagcaggtagtcgctatgattgatgaggaaatgtgtattaactgtggaaagtgctacatgacatgcaatgacagcggataccaggcaatccaattcgaccccgagacacatctcccaacgataacagatacatgtacaggctgtacgctgtgcctgtcagtgtgtccaatcgtggattgcattaaaatggtgtcacgcacaaccccatacgagcccaaacgcggcgttcccctaagcgtgaacccagtgtgttag

SEQ ID NO: 185398 - DNA, 471 bp, synthetic construct
  misc_feature 1..471: note = Description of Artificial Sequence: Synthetic coding sequence
  source 1..471: mol_type = other DNA
atggcccccgtgctgagcaaggacagcgccgacatcgagaactgcgagaagcttgaaaacaatttcgacgacattaaacatactacactgggagagcgaggagctttaagagaggccatgcgctgccttaagtgtgccgacgctccgtgccagaagtcatgccctacaaacctggacataaagtccttcataacgtccatcgccaacaagaattactatggcgcagccaaaatgatcttcagcgataacccactgggtctcacttgcggcatggtttgccccacaagcgatctgtgcgtggggggctgtaacctatatgccacagaggagggaccaataaacattggcggcttgcagcaattcgcaaccgaagtgaatgggttgctccactttcaaaattccgtctccctgtggttccagaaaactgccaatatttccttcttgtcttgtgggagcctgcaagacgcctag

SEQ ID NO: 185399 - DNA, 1482 bp, synthetic construct
  misc_feature 1..1482: note = Description of Artificial Sequence: Synthetic coding sequence
  source 1..1482: mol_type = other DNA
atgatcctgaacagcctgagcctgtgctaccacaacaagctgatcttggcccccatggttcgggtggggacccttccgatgcgactgctggcactggattacggggccgatattgtatattgcgaggagctgattgaccttaagatgatccagtgtaagagagttgttaacgaagttctgagcactgttgattttgtggcgcccgatgacagagtggtgttccgaacgtgcgaacgcgaacagaacagggtagtgttccagatgggaaccagtgacgctgagcgagcactcgccgtcgcccggctcgtcgagaacgacgttgctggtattgatgtgaatatggggtgccccaaacaatatagtactaaaggtggcatgggcgcagcactgctttctgatcccgacaagatcgagaaaattctgtccactttggtgaagggaactcggagacccgtgacatgcaagattagaatacttccttctctggaggacacactgagccttgttaagcggatagagaggaccggaatagctgctatagcagttcatggtagaaagcgggaggagcgaccccagcatccagtatcttgtgaagtaatcaaggccatcgctgacactctgtccatcccagtgatcgccaacggaggcagccatgatcatattcaacagtactccgatattgaagacttcagacaagcaaccgcggcttccagtgtgatggttgcccgagcagcgatgtggaacccaagcattttcttaaaagaagggctaagacccctggaggaggtgatgcagaaatacatccggtatgccgtacaatatgacaatcactataccaatacaaaatactgcctatgtcagatgttacgagagcagttggagtctcctcagggccgtctgctccatgccgcacaatcctcccgagaaatctgtgaagctttcggtcttggggcgttctacgaggagaccacccaagaactagacgcccagcaggcacgcttgagcgcaaagaccagcgagcaaaccggcgagcccgcagaagacacaagcggcgtaattaagatggccgttaaattcgacaggcgagcttaccccgctcagatcactccaaaaatgtgcctgcttgaatggtgtagacgcgagaagcttgcccagcctgtgtatgaaaccgtacagaggcctttagataggctcttctcttccatcgtcacggtggctgagcagaagtatcaaagcacgctgtgggacaagagcaagaagctcgcagagcaggcagcagcaattgtgtgcctgcgttcacagggcttgccagagggccgactgggagaagagagcccgagcctccataagcgcaagagagaagctccggaccaggatccaggcggacctagagcccaagaactcgctcagcctggcgatttatgtaagaaaccttttgtcgcactgggcagcggggaggagagccccctcgaaggatggtag

SEQ ID NO: 185400 - DNA, 1482 bp, synthetic construct
  misc_feature 1..1482: note = Description of Artificial Sequence: Synthetic coding sequence
  source 1..1482: mol_type = other DNA
atgatcctgaacagcctgagcctgtgctaccacaacaagctgatcctggctcctatggtgagggttggcaccctgcctatgcgactgttggctttagactacggagcggacattgtttactgtgaggagctcatagatctgaagatgatccagtgtaaaagagttgtaaacgaggtgctgagtaccgtggatttcgtggctccagatgaccgagtcgtatttagaacctgcgaaagggagcagaatcgagttgtctttcagatgggaacatcagatgccgagcgtgctctggccgtggcgagactcgttgaaaacgatgtagctgggatcgatgtcaatatgggctgccccaagcaatactccaccaaaggcggtatgggagctgcactgctctctgatcctgacaaaattgaaaaaattctctctacactggttaaggggacccgcagaccagtgacatgtaagattcgtattcttccgagcctcgaagacactctgagcctagtgaaacgcatagagcggacaggcattgctgcaatcgcggtgcacggtcggaagagggaggagaggccccagcacccggtttcttgcgaggtgatcaaggcgattgccgacacgctgtctatccccgtgattgccaacggcggctcacacgaccacattcagcaatacagcgacatcgaggacttccggcaggctacagccgcctcgtcggtcatggttgctagggccgccatgtggaacccttcaatttttctaaaagagggcctgcgccccctggaggaagtaatgcagaagtacatccggtacgcagtacagtacgataaccattataccaacacaaaatattgtctgtgtcaaatgcttcgggagcaattagagtcgcctcagggaagactgctacacgcagcacaaagcagcagggaaatctgcgaagcatttggcctgggagctttctatgaggaaactacacaggagttagatgctcagcaggcccgactgtccgccaaaacttcagaacagaccggcgaacctgccgaagatacctccggcgtgatcaaaatggccgtgaagttcgatagaagggcctaccccgcccagatcacacccaagatgtgcttgttggagtggtgccggcgcgaaaagctggcacagcccgtgtacgagaccgtacagcggccactcgatcgcctgttctctagcatcgtgactgtggctgagcagaaataccaatctacattgtgggataagtccaaaaagttagccgagcaagcggccgccatcgtttgtctcagatcccaaggactccccgagggacgcctcggcgaggagtctccatccctgcacaaacggaagcgcgaagctcccgaccaagatcctgggggaccaagagcacaggaactcgcccagcccggcgacttgtgcaagaaaccattcgtggccctgggttctggagaggagagcccactggaagggtggtag

SEQ ID NO: 185401 - DNA, 1377 bp, synthetic construct
  misc_feature 1..1377: note = Description of Artificial Sequence: Synthetic coding sequence
  source 1..1377: mol_type = other DNA
atgatcctgaacagcctgagcctgtgctaccacaacaagctgatcctcgcccccatggtgcgcgtgggcacactgccaatgcgcctgctggcactggattatggggccgacattgtgtattgcgaggagctgatcgacctgaagatgatacagtgcaaaagagttgtaaatgaagtgttaagcaccgtagacttcgtggcgccggacgatcgagttgtcttccgcacgtgcgaaagggagcagaacagggtggtatttcaaatgggtgggatgggcgccgccctactcagcgatccagataagatcgagaaaattctgagtaccctggtcaagggcacaaggagaccagtaacatgcaaaattcgcattttacccagccttgaagataccctctctctcgtgaagcgcatcgagcggaccggcatcgcagccatcgctgtgcacggtcgcaagagagaggagcggccccaacacccagtttcctgtgaggtgatcaaagcaatcgcagacaccctctcaatcccagtgattgccaatggtggtagtcatgatcatatccaacagtacagtgatattgaagacttccggcaggctactgccgcttcctctgttatggttgcgcgggctgcaatgtggaacccctccatctttctcaaagagggactcagacccctcgaggaagttatgcagaagtacattcgatatgctgtccaatatgacaatcattacaccaacactaaatactgtctgtgtcaaatgctcagagaacagctggaatcgccccagggcaggctgctacatgccgcgcagagtagccgggagatctgcgaagctttcggccttggcgccttttatgaggagacgacgcaagagctggacgcacagcaggccaggctctctgctaagacttctgaacagaccggtgagccagctgaagatacctcgggtgtgatcaagatggcagtaaagttcgaccgcagggcgtatccagctcaaatcacacctaagatgtgcctactggagtggtgtagacgcgaaaagttggctcagcccgtgtacgagacagtccagcgcccccttgatcgactgttcagtagtatcgtgactgttgccgaacagaaatatcaaagcactctgtgggacaagtccaaaaagctggccgagcaggccgcagccattgtctgtctgagaagccaaggactgcccgaaggccgtctgggtgaagaatccccttctctgcataagcgaaagagggaagctccggatcaggatcccggtgggccacgcgcccaggagcttgcgcaacccggtgatttgtgcaaaaaacctttcgtggccctcgggagcggcgaggagagcccgcttgagggatggtag

SEQ ID NO: 185402 - DNA, 858 bp, synthetic construct
  misc_feature 1..858: note = Description of Artificial Sequence: Synthetic coding sequence
  source 1..858: mol_type = other DNA
atggccggcctgggccaccccgccgccttcggccgggccacccacgccgtggtgagggcactaccggaatccttaggccaacatgcacttagatccgcaaaaggagaagaggtggatgtcgcacgtgcagagaggcagcatcagctctacgtgggagtgctcggtagtaagctaggcctgcaggtagtggaactacccgccgatgagtctttgcctgattgcgtgtttgtggaagatgtggctgtagtgtgcgaagaaacggccctcatcactagaccaggggcgccgtctcggaggaaagaggtggatatgatgaaggaagctttggagaaactgcagcttaatatcgtggagatgaaggacgagaacgccacgttggacggcggcgacgttctttttacaggaagggaattttttgttggcttgtcgaaacgaaccaaccagcgtggtgcagagattctggccgatacctttaaggactacgccgtgtcaaccgtgcccgtggccgacgggctccacctaaagagcttctgctccatggccggtcccaatcttatcgccatcgggtctagcgagtcagcgcagaaagccttaaagattatgcaacagatgtccgaccaccggtatgacaaactgacggtgccagacgacatcgccgcaaactgtatttatttaaacattccaaacaaggggcacgtgctgctgcacaggacacctgaggaatatccggagagcgccaaggtatatgaaaagttgaaagaccacatgcttatcccggttagcatgtccgaactggagaaagtcgacggcctcctgacgtgttgtagtgtgctcatcaataaaaaagttgattcatag

SEQ ID NO: 185403 - DNA, 579 bp, synthetic construct
  misc_feature 1..579: note = Description of Artificial Sequence: Synthetic coding sequence
  source 1..579: mol_type = other DNA
atgtggctgtacggcctgggccaggtggacatgatgaaggaggcccttgaaaaactgcagctgaacattgttgaaatgaaagacgagaacgcgaccctcgatggaggagacgtgctgtttaccggtagggagtttttcgttgggttgagcaagcgaacaaaccagcggggcgccgaaatcctcgctgatactttcaaggactatgctgtctcgactgtgcctgttgccgatggtctgcatctgaagagcttttgctcaatggcaggcccgaatttgatcgctatcggttcaagcgaatcagcacagaaggccctcaaaattatgcagcagatgagcgatcatcgctatgacaagctgaccgtccctgacgacattgcagcgaattgcatttatctgaatatccccaataaggggcatgtcttgctgcatcgcacaccagaggaatatcccgagtccgcaaaagtgtatgagaaactgaaggatcatatgctgatccccgtatccatgagcgagttagagaaagtggatggcctgcttacttgctgcagcgttctcatcaataagaaagtggactcttag

SEQ ID NO: 185404 - DNA, 549 bp, synthetic construct
  misc_feature 1..549: note = Description of Artificial Sequence: Synthetic coding sequence
  source 1..549: mol_type = other DNA
atgatgaaggaggccctggagaagctgcagctgaacatcgtggagatgaaagatgagaacgccaccctcgatggaggagatgtcctttttacggggcgagagttctttgtggggctcagtaagaggacaaaccagagaggcgccgagatcctagcagacacgtttaaggattacgctgtctctacggtcccagttgcagatggactccacctgaagtccttttgctcaatggcaggacccaacctgatcgccattggctcttctgagtccgcgcagaaagctctcaagataatgcagcagatgtcagatcacaggtacgacaaactcacagtgcccgacgacatcgcagcaaactgcatttatctcaatatcccaaataagggccatgtgctgctccatagaacccccgaagaatatccagagagtgcaaaggtgtatgaaaagttaaaagaccacatgttgatccctgtgagcatgagcgagttggagaaggtagatggcttgctgacttgttgctctgtgctgatcaacaaaaaggtagattcctag

SEQ ID NO: 185405 - DNA, 858 bp, synthetic construct
  misc_feature 1..858: note = Description of Artificial Sequence: Synthetic coding sequence
  source 1..858: mol_type = other DNA
atggccggcctgggccaccccgccgccttcggccgggccacccacgctgtggtgcgagctctgccggaatctctgggccagcatgcgctacgctctgctaagggggaagaagtggacgtcgctcgtgctgagaggcagcatcagctttatgtgggcgtgcttggaagcaaactgggtctgcaagtggtggaactgcccgccgacgagtcactgccagactgtgtctttgttgaagatgtcgcagtggtctgcgaagagacggcactgatcacccggcccggcgcacctagtcggaggaaagaggttgatatgatgaaagaggcattggagaagctgcaacttaatattgtggagatgaaggacgaaaatgccacactggatgggggggacgtgttattcaccggtcgagaattctttgtgggcctatcaaagaggacaaatcaaaggggagcggagatccttgctgacacgttcaaggattacgcagtgtctactgttccagtagccgacggtctgcatctcaaatcattctgttccatggccggtcctaatctgatcgctattgggagctccgagtcggcacagaaggccctgaagattatgcagcagatgtctgatcacagatatgacaaactgactgtcccagatgacattgccgctaattgtatctacctgaacatcccaaataagggtcatgtgcttctgcaccgaaccccagaggagtacccagaatcagccaaggtctacgaaaaattaaaggatcacatgctcattccagtttcaatgtccgaactagagaaggtggacgggttgctgacttgctgcagcgtcttaattaacaaaaaggtcgactcctag

SEQ ID NO: 185406 - DNA, 558 bp, synthetic construct
  misc_feature 1..558: note = Description of Artificial Sequence: Synthetic coding sequence
  source 1..558: mol_type = other DNA
atggtggacatgatgaaggaggccctggagaagctgcagctgaacattgtggagatgaaagatgagaacgctaccttggacgggggtgacgtgctgttcaccggacgggagttctttgtcgggctgtcgaagcgaaccaaccagaggggagctgagattctggcggataccttcaaggactatgcagttagcaccgtgcctgtggccgacggactacacctcaaaagcttctgtagtatggctggccctaatctgatcgccattggttcctcggaaagtgcacagaaggcattaaagattatgcagcaaatgtctgatcatagatatgacaagctgacggtgcctgatgacattgcagctaactgcatttatcttaacattcccaacaaaggacatgttctgctgcacagaacacccgaggagtatccagagtcagcaaaagtttatgaaaaactcaaagaccacatgttgatcccagtgtctatgagcgaattggagaaagtcgatggtttgcttacctgctgctcagtcctcatcaacaagaaggtcgattcttag

SEQ ID NO: 185407 - DNA, 858 bp, synthetic construct
  misc_feature 1..858: note = Description of Artificial Sequence: Synthetic coding sequence
  source 1..858: mol_type = other DNA
atgggcacccccggcgagggcctgggccggtgcagccacgccctgattcgaggcgtccccgagagtttggccagtggagaaggggcaggggctggcctgccggccttggatcttgcgaaggctcagagggaacatggtgtacttggaggcaaattgaggcagaggcttgggttacagctcctcgaacttccacccgaagaatctctacccctgggcccactgctcggtgacaccgccgttattcagggggataccgctctgattacaaggccctggagccctgcaagaagacctgaagtggatggggttaggaaggccctgcaggacctgggcctgagaattgtggagatcggtgatgaaaatgccacattggacggtactgatgtgttgttcacagggcgcgagttcttcgtgggattaagtaagtggacgaaccatcgcggcgccgagattgtggccgatacgtttcgcgactttgccgttagcaccgtgcccgtgagcggacctagtcacttacggggcttgtgcggcatgggcggacctcgaactgtcgtggctggatcctctgatgccgcccagaaggcagtgcgggccatggccgtacttactgaccatccttatgcctccctgaccctgcccgacgatgccgcagctgactgtctcttcctgagacctggacttccgggcgtgcccccgtttcttctgcaccgaggagggggtgacttgccaaattcccaggaagccctccagaagctttccgacgtcacactggtgcccgtgtcctgctccgaactcgaaaaggccggcgcaggcctgtcgtcactttgcctcgttctgtccacacggcctcactcttag

SEQ ID NO: 185408 - DNA, 858 bp, synthetic construct
  misc_feature 1..858: note = Description of Artificial Sequence: Synthetic coding sequence
  source 1..858: mol_type = other DNA
atgggcacccccggcgagggcctgggccggtgcagccacgccctgatcaggggtgtccccgaatcactggctagcggcgaaggcgccggtgccggcctgccagctctggaccttgctaaagctcagcgagaacatggggtgttggggggaaaattgaggcagcgtctgggactgcaactcttagaactgccccctgaggagtcccttccactaggccccctgttaggggatactgccgtaatccagggcgacacagcacttataactaggccctggtccccagcacggagacccgaggttgacggcgtccggaaggcgttacaggacctgggcctaagaatcgtggagatcggcgacgagaacgccacattggacggtactgatgtattgtttacagggcgtgaattctttgtcgggctctctaagtggacaaatcaccgtggcgctgaaatcgttgccgacacgttccgtgatttcgccgtgagcacagtgcctgtgagcggcccttcccatctgcgtggcctttgtgggatgggtgggcctcgcactgtagtggccggctcatctgacgctgcccagaaggctgtgcgggcgatggcagtcctgaccgatcatccatacgcctcactgacattgccggacgatgccgcagccgattgcctgtttctgaggccagggcttcccggggtgcctcctttcctgctgcaccgcggtggaggagacctcccaaactcgcaggaggccctacagaaactctcggatgtgactcttgttccagtgagctgctcggaactggagaaggcaggggctggcctgtcctcgttatgcttggtgctgtcaacgcgaccccactcctag

SEQ ID NO: 185409 - DNA, 858 bp, synthetic construct
  misc_feature 1..858: note = Description of Artificial Sequence: Synthetic coding sequence
  source 1..858: mol_type = other DNA
atgggcacccccggcgagggcctgggccggtgcagccacgccctgattaggggggtccctgagtcgctggcttctggcgaaggggcaggagccggtctgccggctttagatctcgctaaggcacaacgggaacatggcgtgctgggaggaaagctgcgtcagcgcctgggactccagctgctggagttgcctcccgaggaatccctccctcttggaccactccttggcgacacagcagtgattcaaggcgataccgcattgattacccggccctggagcccagcaagaaggccagaggtagatggtgtcaggaaagcattacaggacctagggctgcgcatcgtggaaataggagatgagaatgccacactcgatggaacagatgtgctattcacaggcagggagttctttgttgggctctcaaagtggacaaaccaccggggcgccgagatcgtcgcggatacatttcgggatttcgcagttagtaccgttcctgtctccggtccatcacacctgcgcggtctctgcggcatgggcgggcctcgcactgtggtcgctggtagttccgacgccgcccagaaggcagtaagagccatggcggtactgacagaccatccttatgctagtctgacattgccagacgacgctgccgccgactgcttatttctgaggccagggcttccaggagtgcccccttttttacttcaccgaggaggaggagacctcccaaatagccaagaggctctgcagaagctatccgacgtcacactcgtgcccgtatcatgttctgagctggagaaggcaggggctggactgtcctcgctctgcctagttctttccacacgtccccatagctag

SEQ ID NO: 185410 - DNA, 858 bp, synthetic construct
  misc_feature 1..858: note = Description of Artificial Sequence: Synthetic coding sequence
  source 1..858: mol_type = other DNA
atgggcacccccggcgagggcctgggccggtgcagccacgccctgatccgcggcgtccccgaaagcctagcgtcaggagagggcgccggggctggactacctgcactggacctcgctaaagcacaacgagaacacggagttctgggcggtaagttgaggcaacgtctgggactgcagttattagagctgcccccggaggagtcactgcccctcggccccctgctcggggacacagctgtcatccagggcgataccgccttgatcaccagaccatggtctccagcccgacgccctgaagtagacggtgtgaggaaagccctgcaggaccttggcctgcgcatcgttgaaatcggtgatgaaaacgcaacgctggatggaactgacgtgctgttcacgggtcgcgagttcttcgtgggtttatcaaaatggacgaaccataggggggctgagattgttgccgacaccttcagggattttgccgtgagcactgtgccagtgagtggcccctcccacctgagaggcctgtgtggaatggggggtccaagaacagttgtcgcaggttcttccgatgctgctcagaaggctgtgcgtgccatggctgtgctgactgatcacccttatgcctcgcttacactgcccgacgacgccgctgccgactgcttgttcttgcgccccggccttcctggtgtgcctcccttccttcttcacaggggcggcggagacctgccaaacagccaggaagcactgcagaagttatcagatgtgacactcgttcccgtatcctgcagcgagctcgagaaggccggcgctggcctgtcatcattgtgtttggtcctcagtacaagacctcactcctag

SEQ ID NO: 185411 - DNA, 858 bp, synthetic construct
  misc_feature 1..858: note = Description of Artificial Sequence: Synthetic coding sequence
  source 1..858: mol_type = other DNA
atgggcacccccggcgagggcctgggccggtgcagccacgccctgattcggggcgtacccgagagcttagcctctggtgaaggcgcaggagctgggctgccagccttggatctcgcaaaggctcagagggaacatggagtgctgggaggtaaacttcgtcagaggctcggacttcagcttctcgaactgccccccgaagagagcctgcccctgggacctctgctgggcgataccgcagtgattcagggcgatactgccctcatcacccgcccatggagccccgccaggaggccagaagtggatggcgtcaggaaggctctccaagatctggggttgcggatcgttgagataggcgacgagaatgctaccctcgacggcactgatgtcttattcacaggtcgcgaattttttgtaggactgtccaagtggactaaccatagaggcgccgagatcgtggccgacactttccgggacttcgctgtgagcaccgttcctgtgagcggaccatcacacctgcgcggattgtgcggaatgggtggcccacggactgtcgtcgccggttcttccgacgccgctcagaaagccgtgcgcgcaatggcagtactcacagaccatccatatgcctctctcaccctgcccgatgatgctgccgcggattgtctgttcctccggccaggacttccgggtgtccccccattccttctgcacaggggaggaggcgacctgcctaatagccaggaggccctccagaagcttagcgatgtgaccttggttccggtgagctgtagcgagctcgaaaaggccggggcgggactttccagtctgtgcttagtgttgtcaacccggccccattcttag

SEQ ID NO: 185412 - DNA, 858 bp, synthetic construct
  misc_feature 1..858: note = Description of Artificial Sequence: Synthetic coding sequence
  source 1..858: mol_type = other DNA
atgggcacccccggcgagggcctgggccggtgcagccacgccctgataaggggggtgcctgagtccttggcatccggcgagggggcaggcgccgggttgccagctcttgatctggctaaggcccagcgtgagcacggcgttctcgggggcaagctccgccaacggctcggtctgcagttattggaattacccccagaggagtcactgcccttgggcccactgttaggggataccgccgtgattcagggtgatactgccctgattacccgcccatggagtccagcaagacgccccgaagtcgatggcgtgcgaaaagctcttcaagacctgggcctgcggattgttgagatcggtgacgagaatgccaccctagacggaacagatgtgctttttacaggaagagaatttttcgtgggactgtcaaagtggacaaatcatcgcggcgctgagatcgtggccgataccttcagagacttcgcggtatctaccgtgcctgtgtcgggtccgtcccatctccggggcttgtgcggcatgggcggcccgagaactgtggtagccggtagcagcgatgccgcccagaaggctgtgagagccatggctgtgcttaccgatcacccctatgcctcactgacccttccagacgacgctgctgctgactgcctgttcctaagaccgggcttgcctggggttccccctttcctactgcacagaggcggtggtgacctgcccaatagccaggaggccctccagaagctgtccgatgtgactctggtgcccgtctcgtgctccgagttagagaaggctggcgctggtctttcatcgctgtgtttggttctgagtacacgacctcattcgtag

SEQ ID NO: 185413 - DNA, 858 bp, synthetic construct
  misc_feature 1..858: note = Description of Artificial Sequence: Synthetic coding sequence
  source 1..858: mol_type = other DNA
atgggcacccccggcgagggcctgggccggtgcagccacgccctgatccgcggcgtgcccgagtcccttgctagtggtgagggcgccggagccggattacccgctcttgacctcgcaaaagcacagcgcgaacatggagtcctgggtgggaagctcagacagaggctaggactccaattactagagcttccccccgaggagtcactacccttgggccccctcttgggtgataccgccgtaatccagggggatactgcactcataactaggccctggagtccagccagacgtccagaggtcgatggcgtccggaaggcactgcaggatctcgggttacgcattgtagagatcggagatgaaaacgctactctcgatggtaccgacgtgttgttcaccggaagggagtttttcgtaggactttctaaatggaccaaccaccgcggtgccgagattgtggcggatacctttcgcgattttgcagtgtctactgtgcctgttagcggtcccagtcatctgcgtgggctctgcggaatgggcggacccaggaccgtcgtagcaggaagtagcgatgcagctcagaaagctgtgcgggccatggcggtactgacagaccacccttacgccagcctcaccttgcccgatgatgccgctgcagattgcctgttcttgagaccgggcctgcctggtgtcccacccttcctgctccatcggggcggcggcgacctacctaattctcaggaagctctgcagaagctaagcgacgtgaccttagtgcccgtttcctgctccgagttagagaaggccggggccggactgtcctccctttgtctggtgttgtcaacgcgtccccatagctag

SEQ ID NO: 185414 - DNA, 567 bp, synthetic construct
  misc_feature 1..567: note = Description of Artificial Sequence: Synthetic coding sequence
  source 1..567: mol_type = other DNA
tgacggcggcccgaggtggacggcgtgcggaaggccctgcaggacctgggacttcgtatcgtggaaattggagacgaaaatgcaacactcgacggcactgatgtcctgttcaccgggagggagttttttgtggggctttcaaaatggaccaaccacagaggcgcagagatcgtggcagatacatttagagattttgccgtctctaccgtacccgtgtcagggccctctcatctgcgtggcctctgcgggatgggaggacctcgcacagtggtcgccggctccagcgatgccgcacagaaagccgtccggatgacacagctgctgactgtctcatttttcgtcctgggctgcttggtgtgtcccctgagctcttgcaccgtagaggtcgggatatgtccaacggcgaggaggcattgcaggagctcactgatgtctccttggtacctctgtcccgcccagaactggaggcgcctggctcccggaagcgctccgtcggcctggtgcagcgctcacgcaccaacggctgagggcttagcactggggtattgctggcccggtgtaggttag

SEQ ID NO: 185415 - DNA, 567 bp, synthetic construct
  misc_feature 1..567: note = Description of Artificial Sequence: Synthetic coding sequence
  source 1..567: mol_type = other DNA
tgacggcggcccgaggtggacggcgtgcggaaggccctgcaggacttgggattgagaatagtagagatcggggatgaaaacgcgacactggacggaacagatgtcctgtttacagggcgggaattctttgtcgggcttagcaaatggacaaatcatcgaggcgccgaaatcgtcgcggacacattccgggattttgcagttagcactgtccccgtctctggaccctcccatctgcgcggcctttgcgggatgggtgggccaagaaccgtcgtcgcaggttcctccgacgccgcgcagaaggccgtcagaatgacacagttactgacagtttctttctttgtgctcgggtgcctagtttgtccattatccagctgtaccgtcgaagtgggaatctgcccgaccgcgaggcggcattgcagatcgtctcttatgagcccctggtacctgtgcccagcacagaactggagacgcctggctccaggctccgctccttccgcatggtgctccgcgcatgctcctaccgctgaggggttggctctaggctactgttggcccggagtcgggtag

SEQ ID NO: 185416 - DNA, 858 bp, synthetic construct
  misc_feature 1..858: note = Description of Artificial Sequence: Synthetic coding sequence
  source 1..858: mol_type = other DNA
atgggcacccccggcgagggcctgggccggtgcagccacgccctgattcgcggcgtcccggagagtcttgcatcaggcgaaggcgcaggagctggcctgcctgccctcgacttagctaaagctcaacgtgagcacggtgtacttggcggtaagctgcgtcagagactaggattacagctgttggaacttccccctgaagaatctttgcctttaggccccctattgggtgacaccgcagtgatccagggtgacacggcattaataactaggccgtggagccccgcccggcggcctgaggtggatggtgtgcgcaaggcactgcaagacctcgggctgcggatagtggaaattggtgatgagaatgccacactggacgggacagatgttcttttcaccggaagagaattcttcgtcggcttgagcaaatggactaaccacagaggggccgagatcgtagccgataccttccgcgattttgcagtctctacagtcccagtgagcggaccctcccaccttcgtggcctttgtggaatgggtggcccccgaactgtcgtagctggcagctctgacgccgcccagaaggctgtccgggcaatggccgtgctgacagaccacccctacgccagtctcacgcttcccgatgacgcggccgcagattgtttgtttctgcgtccggggttgcccggagtgcctccatttctcctccaccgaggggggggtgacttaccgaattcccaggaggcgctgcaaaagctctcagatgtgactctggtgcctgtgagctgcagtgagttggagaaggctggcgcagggttgagttccctgtgtttggttctgtcaaccagaccacactcatag

SEQ ID NO: 185417 - DNA, 858 bp, synthetic construct
  misc_feature 1..858: note = Description of Artificial Sequence: Synthetic coding sequence
  source 1..858: mol_type = other DNA
atgggcacccccggcgagggcctgggccggtgcagccacgccctgattagaggagtgccggagtcactagcttccggagagggtgcaggagcggggctccctgctttggatctggctaaagcacagcgggagcacggagtgctcggtggcaaactccgacaacgattgggtctacaactgctggagcttcccccagaagaatcgcttccactgggccctctgcttggggataccgccgttatccagggcgacacggccctgattacacggccctggtcccccgctaggcgccctgaggtggatggggttcgaaaagcactccaggaccttgggctcaggatcgtggagataggagacgaaaatgcaacattagacggtactgacgtcctgtttaccggccgagagttttttgtgggactgtccaagtggacaaaccaccggggcgcggaaatcgtggcagacacattccgagatttcgcagtctccactgtgcccgtgtcaggtccgtcccaccttcgaggtctgtgcggaatgggcggacctcgaacagtagtggcgggctcatccgacgccgcccaaaaagccgtcagagccatggccgtgctcaccgatcacccttacgcctcccttacgttgccagacgatgctgccgcagactgcctcttcttaagacccggactgcctggcgtgcctccgtttttgttgcacagaggtggaggtgatttacctaacagccaggaagcccttcagaagctgagtgacgtgacactcgtgccagtcagctgttctgagctggagaaggctggcgctgggctaagctcactctgcctggtgctgtcgacgcgccctcactcttag

SEQ ID NO: 185418 - DNA, 858 bp, synthetic construct
  misc_feature 1..858: note = Description of Artificial Sequence: Synthetic coding sequence
  source 1..858: mol_type = other DNA
atgggcacccccggcgagggcctgggccggtgcagccacgccctgattagaggtgtgcctgagagcctggccagcggagagggcgccggagcgggcctgcccgcattagatttagctaaggcccagcgagagcacggcgttctagggggcaagctgagacagcgcctcgggctgcagctgctcgagttgcccccggaagagtccctgcccttaggccccctcctgggggacacagccgtcatccagggggatacggcactcatcaccaggccttggtctccagctcgtagacctgaggtggatggagtacgtaaagcactgcaagatctggggctgagaattgtcgaaatcggcgacgaaaacgctactcttgatggcacagacgtacttttcaccgggcgcgagttttttgtgggtctgtccaaatggacaaatcaccggggtgccgagatcgttgccgatacatttcgggactttgccgtctctactgtaccggtctctggcccaagccacttgagaggactatgcggcatgggaggcccgcgcacggtggtggcgggctcctccgacgcggcacagaaggcggtacgagcaatggctgtgctgacagaccatccttatgcttctttgacactgcctgacgatgccgcagccgactgtttatttctgagaccagggctgcccggggtcccgccatttctgcttcaccgaggcggaggcgacttgccaaactctcaggaagctctccaaaagttgagcgatgtgaccctggtcccagtgagttgctccgagcttgaaaaagctggggccgggctttcttcattgtgtttggtcctctcaaccaggcctcactcttag

SEQ ID NO: 185419 - DNA, 711 bp, synthetic construct
  misc_feature 1..711: note = Description of Artificial Sequence: Synthetic coding sequence
  source 1..711: mol_type = other DNA
atgggcacccccggcgagggcctgggccggtgcagccacgccctgattaggggagtgccggagtccttggcttcaggggaaggtgccggcgctggcctacctgccttggacctggcaaaggcccagcgcgagcacggggtcctgggtggcaaactgagacagcggcttgggttacagctcttggaactccccccagaagaaagtctgccgttgggacccctgctgggtgacaccgccgtcatacagggtgacaccgccctgataacgagaccctggtcgcctgctaggagaccagaagttgacggggtccgtaaggctctgcaggatctcggcctgcgtattgtagagatcggagatgagaacgccaccctagatggcaccgatgtcctctttactggacgagaattcttcgtgggtctttctaagtggacaaatcatcgcggagcggagatcgtcgcggacacctttcgggacttcgccgtgtcgacagtacccgtgtccggcccaagtcatctacgcgggctctgtggaatgggaggtccaagaacagttgttgctggcagttcagatgccgcccagaaggctgttagggctatggctgtactgacagaccacccgtacgcttcacttacactcccggacgacgccgccgctgactgcttgttcctcagacccggactacctggggtgcctcccttccttctgcactag

SEQ ID NO: 185420 - DNA, 681 bp, synthetic construct
  misc_feature 1..681: note = Description of Artificial Sequence: Synthetic coding sequence
  source 1..681: mol_type = other DNA
atgggcacccccggcgagggcctgggccggtgcagccacgccctgattaggggtgtccccgaaagcttggcttcaggagagggggctggggcaggactcccagctctggacctcgccaaagcccagcgggagcacggagtcctgggtgggaagctgagacaacgtttgggacttcagttgttagagttgccccccgaagagagtttaccactggggcccctgttgggggacacagctgtcatccagggagataccgctctcatcactaggccttggtcccctgcaagacggcccgaggttgatggcgtgcgcaaggccctgcaagaccttggactcagaatcgtggagattggcgatgaaaacgccacactggacggtacagatgtgctctttactggccgggagttttttgttggactgagtaaatggaccaaccacagaggagccgaaatcgtggctgatactttcagggactttgctgtttccaccgtacccgtcagcggtccctcgcacctgcgggggctctgcggtatggggggacccaggactgtggtggcagggtcatcggacgcagctcagaaggcagtaagggctatggccgtcttaactgaccacccctatgccagtctcactctgccagacgatgccgccgccgattgtttgttcctaagacctggatag

SEQ ID NO: 185421 - DNA, 711 bp, synthetic construct
  misc_feature 1..711: note = Description of Artificial Sequence: Synthetic coding sequence
  source 1..711: mol_type = other DNA
atgggcacccccggcgagggcctgggccggtgcagccacgccctgatcaggggcgtgcctgagtctttggcgtccggggaaggagcaggggccgggctccctgctcttgatctcgccaaggctcagagagagcatggggttcttgggggaaagctaaggcagcgtctcgggctgcagctgctcgagttgccccctgaggaatctttacccctggggcctttgctgggagatacagcggtaatccagggagacactgcattaataactcgaccatggtcaccagcccgccgacctgaagtcgatggtgtgagaaaagccctgcaggatctggggctgaggattgtggaaatcggggacgagaatgctacactcgatggtacagacgtgctcttcaccgggcgcgagttcttcgtgggactgagcaaatggacaaatcaccgcggggcagagatcgtcgccgacaccttccgagacttcgctgtgtcaacagttccagtgagcggcccgtcccacctcaggggtctctgtggcatgggaggacccagaactgtcgtggccggaagcagcgacgccgcccagaaggcagtacgagcaatggctgtcttgaccgatcacccttatgcctctttaacattgccggatgacgccgccgccgattgtctctttctgaggccgggattgcctggtgtgcccccgttcctcctgcattag

SEQ ID NO: 185422 - DNA, 858 bp, synthetic construct
  misc_feature 1..858: note = Description of Artificial Sequence: Synthetic coding sequence
  source 1..858: mol_type = other DNA
atgggcacccccggcgagggcctgggccggtgcagccacgccctgatcagaggcgtccctgagagcctggctagcggtgaaggcgccggggccggcttgcccgccctggatctggctaaagctcagcgggagcacggcgttttgggtggtaagctgcggcagaggctgggactacagcttttggagctgcccccagaggaatctctgccactggggccactcctcggcgacacggccgtcatacaaggtgacacagccctgatcactcggccttggagccccgcccgcaggcctgaagtcgatggcgtacgaaaggccctccaggacctcggcttgcgcattgtcgagatcggtgacgaaaacgcaacccttgatggtacagacgtgctgttcaccggtagagaattctttgtgggcctttctaaatggaccaaccacagaggggctgaaatcgtggccgacaccttcagagatttcgccgtaagtacagtgcctgtgtccggcccaagtcacctgcgagggctgtgcggcatgggcgggcctagaacagtagtcgctggatccagtgacgcagcgcaaaaagccgttagagccatggcagtgcttactgaccacccctacgcctcactcacactgcctgatgacgctgccgcggactgcttgtttctccgaccaggcctcccaggggttcctccctttctgctccacaggggcggaggagatttgcccaattctcaggaagccctgcaaaagctgtcagacgtgactctggtgccggtttcttgctcagagctggagaaggcaggcgctggccttagctccctgtgcctggtcctgagcactcgaccacatagctag

SEQ ID NO: 185423 - DNA, 858 bp, synthetic construct
  misc_feature 1..858: note = Description of Artificial Sequence: Synthetic coding sequence
  source 1..858: mol_type = other DNA
atgggcacccccggcgagggcctgggccggtgcagccacgccctgattcgcggcgtgcctgagtctcttgcaagcggcgagggagcaggtgctggactccctgccctggacctcgctaaggcgcaacgagaacacggagtgcttggagggaaactccggcagcgcctgggactgcagctgctggaactacctcccgaggagtccctccctctgggtcctctccttggagacactgctgtgatacaaggtgataccgcacttattactagaccatggtcgccggctaggcgccctgaagtcgatggtgttcggaaagctctgcaagacttaggcctgcggattgtcgaaatcggcgatgaaaatgcaacgctggatggaaccgacgttttgttcacaggaagggagttctttgtgggactgagtaaatggaccaaccatcggggagcagaaatcgttgccgatacctttcgtgacttcgccgtgtctaccgttccagtgagtggacccagccacttgcgcggactttgcggcatgggggggcctaggaccgtggttgctgggtcatcagacgccgcacagaaggccgttcgcgcgatggccgtgctgactgaccacccctatgccagtctgaccctccccgacgacgctgccgctgactgcctgttcttaagacctggcttgccaggggtgccaccttttcttctccatcggggcggcggagacctgcccaattcacaggaagccttgcagaagctgtcggacgtgaccctcgtccctgtctcatgctctgagttagaaaaggccggagcggggctctcgagcctgtgtcttgtactgtccaccagaccacactcgtag

SEQ ID NO: 185424 - DNA, 858 bp, synthetic construct
  misc_feature 1..858: note = Description of Artificial Sequence: Synthetic coding sequence
  source 1..858: mol_type = other DNA
atgggcacccccggcgagggcctgggccggtgcagccacgccctgatacgtggggttcctgaaagtctggcttcgggggaaggcgcaggtgccggacttcccgcgctggatctggcaaaagcccagcgcgaacacggggtcttaggcggtaagctccgtcagaggctggggctacaacttctcgagctgcctccagaggaatcccttcctcttgggcccctgctgggcgatacggctgtgatccaaggtgatactgctttaattaccaggccttggtcgccagcccgtagaccagaagttgacggtgtgaggaaagccttgcaggacttgggactgagaatcgttgaaattggagatgagaatgcaacactcgatggcaccgacgtgctgttcacaggtcgcgagttcttcgtgggtttgtcgaaatggaccaaccacaggggcgcagaaattgtggccgacacctttagagattttgcagtgagtacagtacccgtatcaggaccttcccatttgaggggactgtgcggaatggggggaccgagaactgttgtggccggaagctcagacgccgcacagaaggctgttcgcgctatggctgtccttaccgatcatccttacgcatcactgactctaccggacgatgctgctgccgactgtctgtttttacgccccggtctgcctggcgtgccccccttcctgttacatcgaggcggaggtgacttacctaactcccaggaagccttgcagaaactctcagacgtcacactggtccctgtctcgtgctctgaactggagaaggctggggcaggactgagctcgttatgcttggtacttagtactagacctcactcatag

SEQ ID NO: 185425 - DNA, 681 bp, synthetic construct
  misc_feature 1..681: note = Description of Artificial Sequence: Synthetic coding sequence
  source 1..681: mol_type = other DNA
atgggcacccccggcgagggcctgggccggtgcagccacgccctgatccggggtgtcccagagtcattagcctcaggtgagggggccggcgcagggcttcctgccctggatcttgctaaggcccagcgggagcatggggtcctgggtggcaagctcaggcagcggctgggtctccagttgctggaactgccaccagaagaaagcctgccattagggcctctgctgggagacacggccgttattcagggagacactgcccttattaccagaccttggtcacccgcgagacgaccggaggtagatggagtgaggaaggctctgcaagatctgggcctgagaatcgtggaaattggtgatgaaaatgccaccctggatggtacggatgttcttttcaccggtagagagttttttgtcggtttgtcaaagtggaccaatcatagaggcgccgaaatcgttgctgacacctttcgtgatttcgcggtgagcaccgttcctgtcagtggaccctctcacctgcggggtctctgtgggatgggcgggcctcgcaccgtggtggccgggtcttctgacgccgcccaaaaagcggtcagggccatggccgttcttacagatcatccctacgcatcccttacattgcctgatgacgctgccgctgattgcctctttctccgaccagggtag

SEQ ID NO: 185426 - DNA, 858 bp, synthetic construct
  misc_feature 1..858: note = Description of Artificial Sequence: Synthetic coding sequence
  source 1..858: mol_type = other DNA
atgggcacccccggcgagggcctgggccggtgcagccacgccctgattaggggcgtgcccgaaagcctggcttcaggggaaggggcaggggccggccttcctgccctggatctagctaaggctcagcgggagcacggcgtgttaggagggaagctaaggcagagactgggactgcagctgctggaattacctcccgaagaaagtctgccacttggaccactcctgggagataccgccgtcattcaaggggacaccgcactaatcacccgcccctggtccccagctagaagaccagaagtcgacggcgtgagaaaggccctgcaggacctggggcttcggatagtggaaatcggcgacgagaacgccaccttggatggaacggacgtactgtttaccggaagggagtttttcgtgggcctaagtaaatggacaaatcacaggggcgctgagatcgttgcagatacattccgagattttgctgtgtccacagttcccgtgtccggccctagccatctgcggggcttgtgtgggatggggggtcctcgtaccgtggtcgcgggaagttctgacgcagctcagaaagccgtgagagcaatggccgtgctcaccgatcatccctacgcctcattgacattgcccgacgatgcggccgcggactgtctgttcctgcggccgggactgcctggtgtgccaccatttctcctacacaggggaggcggcgacctgccaaattcgcaggaagccctacagaaattgagcgacgttactttggtgcccgtgtcttgttccgagctggaaaaggccggcgccggattgtcctccctgtgcctggttcttagtaccaggcctcattcgtag

SEQ ID NO: 185427 - DNA, 681 bp, synthetic construct
  misc_feature 1..681: note = Description of Artificial Sequence: Synthetic coding sequence
  source 1..681: mol_type = other DNA
atgggcacccccggcgagggcctgggccggtgcagccacgccctgatccggggcgttcccgagagcttggcctcaggggagggagcaggggctggtctacccgctctggacctcgctaaagcacaaagggagcacggggtcctgggagggaagctgcggcaaagactcggattgcaacttttagaactgcctcctgaggaaagcctgccactgggacccctccttggtgacacagcggttatccagggcgacacggcgctcataacccgcccctggtccccagcgaggagacccgaagtagacggcgtccgaaaggcgctgcaggatttgggcctccggatcgttgaaattggagatgagaacgcgacgctagacggaaccgacgtcctcttcacaggtagagaattcttcgttgggttgtctaagtggaccaatcacagaggagcggagatagttgcggacacctttcgggattttgcggtctccactgtgcctgtcagtggccccagccatctgcgggggttatgtggcatgggaggccctagaaccgtcgtggcgggatcaagtgacgccgcacagaaagcggtgcgcgctatggcagttctgacagatcatccttatgcttccctgaccctccctgacgatgccgctgcggattgcctcttccttcgacccggctag

SEQ ID NO: 185428 - DNA, 681 bp, synthetic construct
  misc_feature 1..681: note = Description of Artificial Sequence: Synthetic coding sequence
  source 1..681: mol_type = other DNA
atgggcacccccggcgagggcctgggccggtgcagccacgccctgatcaggggtgttccggagtcactcgcctcaggtgaaggggccggagcagggctccccgcccttgacctggcaaaagcccagagggagcacggagtcctgggtgggaaactgcgacaacgcttaggattgcagctcttagaactccctccagaggaatccctcccgctgggccctctgctgggggacactgccgtgatccagggcgatactgccctgatcacaagaccttggtctcccgcccgacggccggaggtggacggcgttcgcaaggctctgcaggatctcgggctgcgaatcgtggagattggcgacgagaatgccactctcgatggtactgacgtgctgtttaccggtcgggaattttttgtaggactttctaagtggacaaatcataggggcgcggagattgtggccgatacatttagggatttcgcagtaagcactgtgccagtttcagggccttctcaccttagaggactgtgcggaatgggcggaccccggactgttgtggcaggctcgtcagacgccgcccagaaggcagtgcgagccatggcagtccttacagaccatccttatgccagcctgacactccccgacgatgccgcggcggattgtcttttccttagaccgggatag

SEQ ID NO: 185429 - DNA, 858 bp, synthetic construct
  misc_feature 1..858: note = Description of Artificial Sequence: Synthetic coding sequence
  source 1..858: mol_type = other DNA
atgggcacccccggcgagggcctgggccggtgcagccacgccctgatcagaggagtcccagagagtctggcgtcaggagaaggagccggcgccggcctgccagccctggacctagctaaagctcagcgggagcacggagttctgggggggaaactgcgccagaggttgggactgcaactgctcgaactgcccccggaggagagtttgcctctgggtccattgttgggagatacggccgtgattcaaggagatactgcgctgataactcgcccctggtctccggctcgtcgtcccgaagtggatggtgttaggaaggctctgcaagatctaggcctgcggattgtggagatcggagacgaaaatgctactctggatggcacagacgtgctgttcactggtagagagttctttgtcggactgagtaaatggactaatcataggggggccgagatcgtagcagacacgttccgtgatttcgccgtgtcgacagtgcccgtgagcgggccctctcatctgcggggcctctgtgggatgggcgggcccaggaccgttgtagcagggagtagtgacgccgcccaaaaggctgtccgggcgatggctgtgctgacggatcacccatacgcttccctgacgctgcccgatgacgccgctgccgactgtctgtttctcaggcccggtttgccgggagtgccacccttccttctgcacaggggggggggcgacctgcctaacagccaggaagcgctacagaagctctcagatgttacactcgttcccgtcagctgttcggagcttgaaaaggcgggcgctgggttgagctcattatgcttagtgctgtcaactcggccgcacagctag

SEQ ID NO: 185430 - DNA, 681 bp, synthetic construct
  misc_feature 1..681: note = Description of Artificial Sequence: Synthetic coding sequence
  source 1..681: mol_type = other DNA
atgggcacccccggcgagggcctgggccggtgcagccacgccctgatccgcggcgtccctgaaagtttagcctctggggagggcgccggggccggcttacccgcgcttgatctcgccaaggcccagagagagcacggcgttctagggggtaagttgcggcagagactgggccttcagctgcttgagctcccgccggaggaatctctccccctgggacctttacttggggacaccgcagttattcagggagacactgcacttattacacgtccgtggtcaccagcaagacgccctgaagttgacggagtccgtaaggccctgcaggacttgggactgcgaattgtggaaatcggcgatgagaatgcaactttagacggaaccgacgtcctttttactggccgggaattcttcgtgggcctgagcaaatggacaaaccacaggggtgccgaaatcgtggctgatacattccgcgatttcgcagtttccactgtgcccgtttctggacctagccatctccggggactgtgcgggatgggcggtccacgcacggtagtggccggctccagcgatgccgcgcagaaagctgttagagcgatggcagtgctaacagatcatccctatgcttcgctgacgctgccagatgatgcggctgccgattgtcttttcctacgacccggatag

SEQ ID NO: 185431 - DNA, 567 bp, synthetic construct
  misc_feature 1..567: note = Description of Artificial Sequence: Synthetic coding sequence
  source 1..567: mol_type = other DNA
tgacggcggcccgaggtggacggcgtgcggaaggccctgcaggacctaggactgcgcattgttgagatcggtgatgaaaatgccactcttgacggcactgacgtcctgttcaccggcagggagttcttcgtgggactatcaaagtggacaaaccatcggggcgctgagatcgttgctgatacattcagggattttgccgtcagtaccgtgccggtgtcaggccctagccacctccgtggtctgtgcggcatggggggccctcgaaccgtcgtggccggctcatcagacgcggcccagaaagcagtcagaatgacccagcttttgaccgtaagtttttttgtattgggttgtctagtctgccccctgtcctcatgcactgtggaggtgggcatatgccccactgccaggcgtcattgtaggtcttccctgatgtccccatggtacctgtgtcctgcccagaactggcggagattggcgccaggatctgctcctagtgcttggtgtagcgcacacgcacccacagctgagggactggctctagggtattgctggcctggggtcggatag

SEQ ID NO: 185432 - DNA, 567 bp, synthetic construct
  misc_feature 1..567: note = Description of Artificial Sequence: Synthetic coding sequence
  source 1..567: mol_type = other DNA
tgacggcggcccgaggtggacggcgtgcggaaggccctgcaggacctaggtttaaggatcgtagagataggcgacgagaacgccacactggatggcaccgatgtcctgttcaccggacgcgagttcttcgtagggttgagcaaatggactaatcatcgaggggctgagattgtagccgacactttcagagacttcgctgtgtctactgtccccgtcagcggcccatcccatttgcgagggctgtgcggcatgggcggaccaagaacagtggtcgctggctcttcagacgctgcacagaaggcagtaaggatgacacagttactaaccgtttcattcttcgtactcggctgcctggtgtgccctctgtctagttgcacagtcgaggttggaatctgtcccactgcccgccgccattgtcgctctagcctgatgtctccatggtacctgtgccctgctcaaaactggagacggctggccccaggatctgccccatcggcttggtgctcagctcacgctcccacggcagaaggcctggcactcgggtattgttggccaggggtgggatag

SEQ ID NO: 185433 - DNA, 681 bp, synthetic construct
  misc_feature 1..681: note = Description of Artificial Sequence: Synthetic coding sequence
  source 1..681: mol_type = other DNA
atgggcacccccggcgagggcctgggccggtgcagccacgccctgatccggggtgtacctgaatctctggcaagtggagaaggagcaggtgccggattgcccgccctggatttggctaaagcccagcgggaacacggggtattgggggggaaactcagacaaaggctgggcctccagctcctggaactgccgcccgaggagtcactacctctgggacccttactgggcgacactgcagtgattcagggcgataccgcccttatcaccagaccctggtccccagccagaagaccagaagttgatggagtccgcaaggcactgcaggatctggggctcaggatcgtggagatcggtgacgagaatgccaccctggacggcacagatgtgcttttcaccggccgggagttcttcgtgggcctgagtaagtggacgaaccaccggggcgctgagatcgtagccgatacattcagagacttcgccgtgtctaccgtgcctgtgtccggcccatcccacctaagaggactgtgcggaatggggggcccacgcaccgttgttgctggttcgtcagacgcggcgcagaaggcagttcgggctatggccgttctcactgatcacccatatgccagcctcacgttgcccgatgacgcagcagcggactgtctgtttcttcggcccgggtag

SEQ ID NO: 185434 - DNA, 858 bp, synthetic construct
  misc_feature 1..858: note = Description of Artificial Sequence: Synthetic coding sequence
  source 1..858: mol_type = other DNA
atgggcacccccggcgagggcctgggccggtgcagccacgccctgatcagaggcgtgccggagagtttggcctcaggcgagggagcaggcgccggcctgcctgctctggatctggccaaggcgcagcgagagcatggagtactgggcgggaagcttcgacagcgtcttgggttacagcttctcgaactgccccccgaggagtctctcccactgggtccgctgttaggcgatacggccgtaattcagggtgacacagcattgataacgcggccatggtcaccagccaggagacccgaggtggatggagttcgaaaggccttacaagatctcggactgcgtattgtggagatcggggatgagaacgcaaccttggacggcacagatgtgctcttcacgggtagagagttttttgtgggattgagcaaatggactaaccatcggggcgctgagattgtggcagacacatttagggattttgcagtgagcactgtccccgtgtcaggaccttcacatctgcgaggactgtgcggtatgggtggcccgcgaactgtggtggccggcagctcagacgccgcccagaaagccgtgagagctatggcagtcctgactgatcacccatacgcctcactgaccctccccgacgacgcggcagccgattgtcttttcttgcggccaggacttccgggcgtgcccccgtttttgctccaccgcggtggaggtgatttaccgaattcacaagaggccctgcagaagctgtccgacgtgaccctcgtgccagtgtcgtgttccgagctagaaaaagcgggagctggcctcagttccctgtgcctggtactgtctactcgtccacatagctag

SEQ ID NO: 185435 - DNA, 711 bp, synthetic construct
  misc_feature 1..711: note = Description of Artificial Sequence: Synthetic coding sequence
  source 1..711: mol_type = other DNA
atgggcacccccggcgagggcctgggccggtgcagccacgccctgatacgcggtgtgccagagagtcttgcaagcggagagggggccggcgctggactgcctgccctggacctcgcgaaagcgcaacgcgagcatggagtcttagggggcaagctgcgccagaggctggggctgcaactcctcgagctgccacccgaggagtccctcccactcggcccattgctcggcgacaccgctgttatacagggggacacggcactgataactcgcccctggtcccctgctcgccggccagaagttgatggggtgagaaaggcactgcaagacctgggtctgcgtattgttgaaataggtgacgaaaatgccacattggatgggactgacgtgttgttcacaggcagggaattctttgtgggactttcgaaatggacaaatcatcgcggcgctgaaatagtggccgacacctttcgcgacttcgccgtgtccacggtcccagtttccggtccatcacatttgaggggactgtgcggaatggggggccccaggactgtggtggctgggagctctgatgctgcccagaaggccgtacgcgcgatggcagtgttaacagatcacccttacgcatccctcacgctcccagacgacgcagcagccgattgtctttttctccggcccggactgcccggcgtgccccctttcctgctgcactag

SEQ ID NO: 185436 - DNA, 711 bp, synthetic construct
  misc_feature 1..711: note = Description of Artificial Sequence: Synthetic coding sequence
  source 1..711: mol_type = other DNA
atgggcacccccggcgagggcctgggccggtgcagccacgccctgatacgtggggtgcccgagagcttggccagcggagagggagcaggggctgggctcccagctctggacctcgctaaggcccagagggaacacggggttctgggaggcaaactgaggcagcgcctaggtctccagctgcttgaactcccaccagaagaatctctccccctcggtcccctgctgggcgataccgccgttattcagggcgatactgctctgataacgcgcccttggtctcccgcaagacgtccagaggttgatggagtgcggaaagccttgcaagacctgggcctgcggatagtcgaaataggcgatgaaaatgcgacgctggacggtactgacgtgctcttcacaggtagggaattcttcgtcggtctctctaagtggaccaatcatcggggggcagagattgtggccgatacgttccgggatttcgctgtttcaacagttccagtatccggtcctagccatctcagggggctctgtggtatggggggcccccgtacagttgtggctgggagttccgacgcagcacagaaggccgtcagggcgatggctgtgctaacagaccatccttatgcgagcctcactctgcctgatgacgcagcagccgattgcctgttcttgaggccaggtctccctggtgttccaccttttttattgcactag

SEQ ID NO: 185437 - DNA, 858 bp, synthetic construct
  misc_feature 1..858: note = Description of Artificial Sequence: Synthetic coding sequence
  source 1..858: mol_type = other DNA
atgggcacccccggcgagggcctgggccggtgcagccacgccctgatacgaggggtgcctgaatctctcgcctccggggaaggggctggggctggattgcctgctcttgatctggcaaaggctcagcgcgagcacggggtgctcggtggaaagctgagacagcgattagggctgcaactgttggagctgccgccagaagagtcccttccactggggccactcctgggcgatactgcagtgattcagggggataccgccctaatcaccagaccatggtcccctgcgaggagaccagaggtcgatggcgttagaaaagcccttcaggatctgggcctccggatcgttgagattggcgacgagaacgcaacattagatggaaccgacgtgctatttactggtagggaatttttcgtgggtctcagcaagtggactaaccacagaggagccgaaatcgtcgccgatacttttagggattttgctgtgtccaccgtgcctgtgagtggaccctcccacctgcgtggactctgtggaatgggggggccgcgtaccgttgttgccggaagctcagatgccgctcagaaggccgtccgagccatggccgtgttaactgaccatccgtacgccagccttaccctgccagatgacgcagccgccgattgcttgttcctgcggcccggactacccggcgtccctcccttcctgctccaccgggggggaggggacctgcccaattcacaagaggccctgcaaaagctctctgatgtgacactcgtccccgtgtcatgcagcgaacttgagaaggctggagctggcctctcatcgctgtgcctcgtcctcagcacgcgccctcatagctag

SEQ ID NO: 185438 - DNA, 678 bp, synthetic construct
  misc_feature 1..678: note = Description of Artificial Sequence: Synthetic coding sequence
  source 1..678: mol_type = other DNA
atgggcacccccggcgagggcctgggccggtgcagccacgccctgattcgtggagtcccagaatccctggcgtccggggaaggggcaggagcgggtttgcctgctttagacctcgccaaggcccagcgagaacacggagtactgggaggaaaactgcgacagagattaggcttgcagttgcttgagcttcctcctgaggaaagtctccccctggggcccttactcggggacaccgctgtcattcagggtgatactgctctgatcacaaggccttggtcacccgccaggcgccctgaggtggatggcgttcggaaagccctgcaggatctcggtctgcgcatcgtcgagattggagatgaaaacgcgactctggatgggaccgacgtgttgttcactgggcgtgagtttttcgttggactctccaagtggactaatcaccgcggcgcagagattgtcgctgatacctttcgggacttcgcagtgagcactgtccccgtatcaggaccgtctcacctgaggggattgtgtggtatgggcggtcctagaacagtggtcgctggctcaagcgacgctgcacagaaggccgttagggccatggctgttcttactgaccatccatatgccagcttgacattgcctgatgatgccgccgcagattgtttatttcttcgaccatag

SEQ ID NO: 185439 - DNA, 858 bp, synthetic construct
  misc_feature 1..858: note = Description of Artificial Sequence: Synthetic coding sequence
  source 1..858: mol_type = other DNA
atgggcacccccggcgagggcctgggccggtgcagccacgccctgatacgaggagtcccggagtcgctggccagtggagaaggcgcgggagctgggcttccggccctggatctggcaaaggcgcagagagaacacggcgtgctggggggtaaactcaggcagaggcttggtctgcaactacttgagctccctccagaggaatcactgcctcttggaccacttttgggagacaccgctgtcatacagggcgacactgccctgattacgcgcccctggtccccagcccggcggcctgaggtggacggagtccgcaaggccctccaggatctaggattaaggatcgttgagattggggacgaaaatgcgacactggatgggaccgacgtcctgtttactggacgggagttttttgttggcttgtctaagtggacaaatcatcggggcgccgagatcgtcgctgacacctttagggacttcgcagtcagcacagtccctgtctctggtccttcacatctaaggggcttatgtggtatggggggccctcgcactgttgttgccggctcatcagatgccgcacagaaagcggtcagagccatggccgtcctaaccgatcacccttacgcttccttaaccctccccgatgacgcggcggccgactgtctgtttttgaggccaggacttccgggagtgccacccttccttttgcaccggggtggcggagatctgccgaattcccaggaagcactccagaagctttcagatgtaacgctggttcccgtaagctgctccgagttggaaaaagccggcgctggtctgagttcactgtgtcttgtcctgtcaactagaccacactcatag

SEQ ID NO: 185440 - DNA, 567 bp, synthetic construct
  misc_feature 1..567: note = Description of Artificial Sequence: Synthetic coding sequence
  source 1..567: mol_type = other DNA
tgacggcggcccgaggtggacggcgtgcggaaggccctgcaggacttaggcctcaggatcgtcgagatcggggatgagaacgcaactctggacggaacagatgtgctcttcaccggccgagagtttttcgtaggactatcaaagtggacgaaccatcgaggggctgaaatcgtagccgacacgtttagggacttcgcggtctccaccgtacctgtatccggtccatcccatctgcgcggcttgtgcggaatgggggggcctcggactgtggtcgcaggatcgtccgatgcggctcagaaggccgtgcgtatgacacaactgctgacagtgtcattcttcgtactgggatgtctcgtctgtccactgagttcatgtacagtggaggtgggtatttgtccgaccgcacggcggcattgcagatcatcacttatgtctccctggtacctgtgtccggcccagaactggagaaggctggcacccggttctgctccttcggcttggtgctccgctcatgcccctactgcagagggtcttgccctgggttactgttggcccggagtcggatag

SEQ ID NO: 185441 - DNA, 567 bp, synthetic construct
  misc_feature 1..567: note = Description of Artificial Sequence: Synthetic coding sequence
  source 1..567: mol_type = other DNA
tgacggcggcccgaggtggacggcgtgcggaaggccctgcaggacctcggcttgaggattgtggagatcggggatgagaacgcaactctcgatgggaccgacgtgttgtttaccggaagagaatttttcgtgggtctctccaaatggaccaaccacaggggcgctgaaatcgttgcggataccttcagagactttgccgtgtccactgtccccgtgtctggcccaagccacctcagagggctgtgcggcatgggcgggcccagaaccgttgtggccgggtctagtgacgccgcacagaaggccgtgcgtatgactcagctgctgactgtgtcattttttgtgctagggtgcctcgtttgccccttaagctcctgtaccgttgaagtgggaatctgtcctacagcgagaagacactgtagaagctcactgatgagcccttggtacctctgtccagctcagaattggaggaggctggctccaggctcagctccatccgcttggtgcagtgcccacgctcctaccgcagaaggactggctctgggatactgttggcccggtgtaggatag

SEQ ID NO: 185442 - DNA, 858 bp, synthetic construct
  misc_feature 1..858: note = Description of Artificial Sequence: Synthetic coding sequence
  source 1..858: mol_type = other DNA
atgggcacccccggcgagggcctgggccggtgcagccacgccctgatccggggagttcccgagagtttagcttccggcgagggggccggggccgggctcccagctctagacctggccaaggcccagagagagcatggcgtgctggggggcaaactgcgacaacggctgggactacagttgctcgagcttcccccagaagagtccctgccgctcggtcctctgctaggggatacagccgttattcagggagacaccgccctcataacccgcccatggtctcccgcgcgtaggcctgaagtcgatggggtgagaaaagccctgcaagatcttggcctcagaatcgtagagattggtgacgagaacgccacacttgacgggactgatgtgctcttcactggccgggagttttttgtggggctttctaaatggaccaaccatagaggcgccgagatcgtcgctgacacttttcgtgactttgcagtctctaccgttccagtcagtgggccatctcacctacgcggactctgcggaatgggcggacctcgcaccgtcgtggctggttcaagcgacgccgcacaaaaagccgtgagagccatggcagtgctgacagaccatccgtacgccagtctgacgctgcccgatgatgcagccgcagactgcttattcttgcgccccggactacccggagtacctccattcttacttcaccgcggcggcggggatctgcccaattcccaggaggccctccagaaactgagtgatgttaccctggtgcccgttagctgtagtgaactcgagaaggccggcgccggtttgtcttcattgtgccttgttctgtccactcgtccccactcctag

SEQ ID NO: 185443 - DNA, 711 bp, synthetic construct
  misc_feature 1..711: note = Description of Artificial Sequence: Synthetic coding sequence
  source 1..711: mol_type = other DNA
atgggcacccccggcgagggcctgggccggtgcagccacgccctgatcaggggcgtcccagagagcctggccagtggtgaaggagcgggtgccggcctgcccgccttggacctggccaaagcccagagggaacacggcgttcttggggggaaattgagacaacgcctcgggctccagctccttgagctccctcctgaggaaagcttgcccttaggtccactgcttggagacaccgcagtaattcagggagacaccgctcttattacacgtccctggtcccctgctaggcggcctgaggtggatggggtcaggaaggcgctgcaagacctagggctcagaatcgtcgagattggcgatgaaaacgctacactcgacggaacggacgtactgttcaccggccgagagttttttgtgggcctttccaaatggaccaaccaccgcggcgctgagatcgttgccgacacattcagagatttcgccgtgagtaccgtaccggttagtggcccaagtcatttgagaggtctgtgtggaatggggggacctcgaacagttgttgctgggtcaagcgacgccgcgcagaaagcagtgcgtgctatggccgtgctaactgatcatccttatgccagcctgaccctgccggatgatgctgcggccgactgcttgttccttcgtcccggactccctggtgtgcctcccttcttgttgcactag

SEQ ID NO: 185444 - DNA, 567 bp, synthetic construct
  misc_feature 1..567: note = Description of Artificial Sequence: Synthetic coding sequence
  source 1..567: mol_type = other DNA
tgacggcggcccgaggtggacggcgtgcggaaggccctgcaggacctgggcctgagaattgtcgagattggggacgagaacgctaccctggatggcactgatgtgctctttaccggacgcgagttttttgtaggcctatccaagtggaccaaccacaggggagcagagatcgtggcagatactttccgtgacttcgccgtgtccacagtgcctgtatccggtccatcccatctcagaggtctgtgtgggatgggcggaccgcgcacagtggtggcaggcagttcagatgccgcccagaaagccgtacggatgacccagctgctgacagtcagtttttttgttcttgggtgtttggtgtgccctctgagctcctgtacggtcgaggtcgggatctgtcctacggctcgccgccactgccgctcctctctcatgagtccatggtacctctgtccagctcagaactggcgaagacttgcacccgggagcgcaccttccgcttggtgctcagcacacgccccaaccgccgaaggactggcactgggctactgctggccgggggttggctag

SEQ ID NO: 185445 - DNA, 858 bp, synthetic construct
  misc_feature 1..858: note = Description of Artificial Sequence: Synthetic coding sequence
  source 1..858: mol_type = other DNA
atgggcacccccggcgagggcctgggccggtgcagccacgccctgattagaggagttcctgagtccctggccagtggtgagggagccggcgccggcctccccgcactggatctggcgaaggctcagagggagcacggcgtgctgggcggaaaattacggcagcgtctggggctgcagctgctcgagcttcccccagaagagtctctgccgttaggacctctgctgggagatactgcagtgattcagggagacacagcactcattacgagaccctggtcccccgctcgacggcctgaggttgacggagtcagaaaggcactccaggaccttggtttgagaatcgtagagattggagacgagaacgctacactggacggaactgatgtgctgttcaccggccgcgagttcttcgtgggactctctaaatggactaaccatagaggcgcagagattgttgctgacaccttcagggacttcgccgtgtccacagtgcctgtgagcgggccatcacatctgcgtggtctgtgcggaatgggtggacctcgcaccgtggtggccggatcgagtgacgccgcgcaaaaggccgtacgggcgatggctgtgctcaccgaccacccatacgcttctctaaccttgcccgatgacgctgctgccgattgtctgttccttaggccaggcctgcctggggtgcctcccttcttactgcacagggggggcggcgatctacccaatagccaggaagctctacaaaaattgagcgacgtaacgttggtacctgtttcttgctctgagctggagaaggcaggcgccggcctaagctccttatgtctagtattaagcaccagacctcattcatag

SEQ ID NO: 185446 - DNA, 858 bp, synthetic construct
  misc_feature 1..858: note = Description of Artificial Sequence: Synthetic coding sequence
  source 1..858: mol_type = other DNA
atgggcacccccggcgagggcctgggccggtgcagccacgccctgatcaggggggtgcctgagtctttggccagcggagaaggagccggcgcgggtctgcccgccctcgatttagcaaaagcccagcgtgaacatggcgtgctcggcggcaaacttagacaacgactcggactccaacttctggagttacctcctgaggaatctctacctttaggtccgttgctgggcgacacagccgtgatccagggcgacaccgctcttatcacaagaccatggagccccgcaaggaggcctgaggtggacggcgttcggaaggctctgcaggacctcggactcaggattgtggaaatcggagacgaaaacgccaccctggacggcacggatgtgctgtttacggggagggagttcttcgtcggactgtctaaatggaccaaccatcgtggagcagagatagtggccgacacctttagggattttgctgtttccaccgtgccagtatccggaccgagtcacctcaggggtctctgtgggatgggcggaccacgcacagtcgttgccggttcttccgacgctgcacagaaggcggtgagagcaatggcagttctcaccgaccacccttacgcaagtctgacgctgccggacgacgccgctgctgattgtctatttctaagacccggtttgcctggcgttccaccatttttgttacatagaggaggtggtgatctgccgaatagccaggaagctctgcagaaactgtctgatgtgacgctagtgcccgtgtcctgctcagagcttgaaaaggctggagctggtctcagcagcttatgcctcgtcctgtccaccagaccacactcctag

SEQ ID NO: 185447 - DNA, 711 bp, synthetic construct
  misc_feature 1..711: note = Description of Artificial Sequence: Synthetic coding sequence
  source 1..711: mol_type = other DNA
atgggcacccccggcgagggcctgggccggtgcagccacgccctgatacgtggcgtgccggagtctctcgcctccggggagggtgctggcgccggcctgccagccctcgatttggctaaagctcagcgagagcatggcgtgctcggcggcaaactccgccaacgcctggggctacagctgttggaattacccccagaggagagccttccactgggcccacttctgggcgacactgccgtgatccaaggggacaccgcccttattacgcgcccttggagtcccgcgcgccggccagaggtagacggcgtgagaaaggcactgcaagacctgggcctgcgtatcgtagaaataggtgacgaaaatgccacactcgacggcaccgacgtcctattcacgggtcgtgaattttttgtgggcttgtccaaatggaccaaccatcggggggctgagatcgtcgccgacacctttcgcgacttcgccgtgtctaccgtgccagtatcaggtccctcccacctgcgcggactgtgcggaatgggaggccctagaactgtggtggcaggaagttctgacgcagcccagaaagctgtgagggccatggccgtgttgaccgaccacccatacgcctctctgacattgcccgatgatgcagccgccgattgtcttttcctgaggccagggctccctggcgttccaccgttcttgctccattag

SEQ ID NO: 185448 - DNA, 711 bp, synthetic construct
  misc_feature 1..711: note = Description of Artificial Sequence: Synthetic coding sequence
  source 1..711: mol_type = other DNA
atgggcacccccggcgagggcctgggccggtgcagccacgccctgatccgcggtgtgccagagagcctcgctagcggcgagggcgcaggagccggcctgcctgctctggatctggctaaagctcagcgagagcatggtgtactgggggggaagctgaggcagcgtctaggactgcagctgctagaactgccccctgaagaaagcctgccactaggaccattattgggcgacacggcagttattcagggcgataccgcccttatcacccgcccctggtcccccgctcggcgccccgaagtggacggcgtcagaaaggccctgcaggatctcggtctgaggatcgtggagatcggcgacgagaatgccaccttagatggtactgacgttttatttacaggccgggaattcttcgtgggcctgtcaaaatggaccaaccacagaggagcggaaatcgtagccgatacctttcgtgatttcgctgtgtccacggtgcccgttagcgggcccagccatctcaggggattgtgtgggatgggaggtccacggaccgtggtagccgggagctcggacgccgcccagaaggccgttcgcgccatggcagtccttaccgaccatccctacgcaagccttaccctgccagatgacgccgctgcggattgtttattccttagacccggtctgcctggcgtccccccatttctcctgcactag

SEQ ID NO: 185449 - DNA, 2601 bp, synthetic construct
  misc_feature 1..2601: note = Description of Artificial Sequence: Synthetic coding sequence
  source 1..2601: mol_type = other DNA
atgctgcggcccggcgcccagctgctgcggggcctgctgctgcggagttgcccattgcagggttccccgggccggccccgatctgtttgtggccgggagggagaagagaaaccccctctttctgccgaaacccaatggaaagaccgcgcagagacagttatcattgggggcggctgcgtcggtgtaagcctggcctaccatctggcaaaagcgggcatgaaggatgttgtgcttttagagaaaagcgagttgaccgcaggatcaacctggcacgctgccggacttactacctattttcacccggggatcaacctgaaaaaaatacactatgattccataaaactgtacgaaaagttggaggaggaaactggccaagtggtgggctttcaccaacctgggagtataaggcttgccactacacccgtcagagtggacgagttcaagtaccagatgacaagaaccgggtggcacgccaccgaacagtatctcatcgaacctgagaaaatccaagaaatgtttccattgttgaacatgaacaaggtgcttgcaggcttgtacaatcccggcgacggtcacatagacccctattccctgacgatggcgctggccgccggtgcccggaagtgcggggctctgttgaagtatcctgccccagtcacctctcttaaagctaggtccgacgggacgtgggatgtggaaactccccagggcagcatgcgggctaaccgcattgtgaacgcagcaggattctgggcaagagaggttggaaagatgattggactggagcatccattaattcccgtgcagcaccagtacgttgtaacgagcactattagcgaggtgaaagccctaaaacgagagctccctgtgctgagggacctggaagggagctattatctgcgacaagaaagggatggcctgctatttggtccatacgagagccaggagaaaatgaaagtacaggatagttgggttaccaatggtgtgccacccggctttggcaaagaactattcgaatccgacctggaccgaattatggagcacataaaggctgcaatggagatggttcctgttctgaaaaaggcagacatcataaacgtggttaatgggccaatcacttactctccggacatcctgcccatggtgggcccccatcagggcgtccgcaactattgggtggctatcgggtttggctacgggatcatccatgccggtggtgtgggcaagtatctctctgattggattctgcacggagaaccccccttcgatctgatcgagctcgaccccaaccggtacggtaaatggactactacgcagtacactgaagctaaggctagggagtcctacggctttaacaatatcgttggttatcctaaagaggagcggttcgctggccgcccgacccaacgcgtttccggtttgtaccagcgcttagagagtaagtgttccatggggtttcatgccggatgggaacagcctcactggttctacaaacctgggcaggacactcagtatagaccatcctttaggagaacaaattggtttgaacctgtgggaagtgagtataaacaggtgatgcagagagtggcagtgactgacctaagcccattcggtaagtttaacatcaagggacaggattccattcgtttactagaccacctgtttgcaaacgttatccccaaggtgggctttacaaacatcagccatatgctgacaccgaaggggagagtatacgccgagctgactgtctctcaccagtcacccggcgaattcctgctgatcacaggatcagggtcagagctccacgacctgcgctggatcgaagaagaggctgtgaaagggggatacgacgtcgaaatcaagaacataacagacgagctcggagtgttgggtgttgctggcccccaggctagaaaggttttgcaaaaactgacatccgaggatttgagtgacgacgtctttaaattcctgcagacgaaatcactgaaagtgagcaacatccctgttaccgcaatccgtattagttacactggagagctggggtgggaactctatcatcgccgcgaggactcggttgccctgtacgatgcaatcatgaatgctggccaagaggagggtatagacaacttcggaacatatgccatgaatgctttgcgtctcgaaaaggcctttcgagcttggggcctcgagatgaactgtgataccaacccgctagaggccggcctagaatattttgtgaaactcaataagcccgcagactttatagggaaacaggcactgaagcagatcaaggcaaagggattgaaacggaggctggtgtgcctgaccttagctactgacgacgttgacccagaggggaacgaatccatatggtataatggaaaggtggtggggaacactacctcaggctcctactcctactccattcaaaaatcactagcctttgcatacgtcccagtacagctcagtgaggtggggcaacaggttgaggtggaactactggggaaaaactacccagcggttatcattcaggagcctctagtcctcactgaacccaccagaaatagacttcaaaagaaaggtggaaaggacaagacatag

SEQ ID NO: 185450 - DNA, 1722 bp, synthetic construct
  misc_feature 1..1722: note = Description of Artificial Sequence: Synthetic coding sequence
  source 1..1722: mol_type = other DNA
atggagcggcagagccggaacagcgacaactggcggtggctgtgctggtgcgaatccggtttgtcccctggccagtctcgggacgagcggtgcgggccagcgggtgagatccgggcacacgggtggatttacctagcccgcagattctgggcccgagaagttggcaaaatgatcggccttgaacacccacttatccccgtacagcaccagtatgtcgtgaccagcactatatccgaggtaaaagctttgaaaagggaactgcccgtgctgcgagatctggaaggctcctactaccttcggcaggagagggacggcctgctctttggcccctacgagtctcaagaaaagatgaaggtgcaggactcctgggttaccaatggcgtgccgcctggcttcggcaaagagctttttgagtccgatctcgataggattatggagcacatcaaagctgctatggaaatggtgccagttttgaaaaaggccgatatcatcaatgtggtgaacgggcctattacctacagtcccgatatcctcccgatggtgggtccgcatcagggcgtgcggaattattgggtggcgatcggcttcggttacggcatcattcacgccggcggtgtcggaaagtacctctccgattggatcctacacggagaaccccctttcgacctgatcgagttggacccgaataggtacggtaagtggaccactacccagtacaccgaagctaaggccagagagtcgtacggcttcaataatatcgtcggctaccccaaggaagaaagatttgctgggcgacccactcagcgggtgtctgggttgtaccaacgcctcgagtctaaatgtagcatgggctttcacgcaggatgggaacagccccactggttctataaacctggtcaggatactcagtacagaccttccttccgaaggaccaattggttcgagccagtggggagcgaatacaaacaggtcatgcaacgggtagccgtcacagacctgtcaccctttggcaagtttaatatcaagggacaagactcaatacgattgttggatcacctctttgcaaacgttatcccgaaagtggggttcaccaacatctcccacatgctaactcctaagggaagagtatacgccgagctgaccgtgagccaccaatcccctggcgagttcctgttaattaccggctctggttctgagctgcacgacctgagatggatagaggaagaagcggtgaagggcggatacgacgtggagattaagaacatcacagacgagctcggcgtgctgggagtagccggaccccaagcacgcaaagtcttgcagaagctgactagtgaagacctatccgacgacgtctttaaatttctgcagaccaagagcttaaaggtctctaacattcccgtgacagcaattcgcatttcttatacgggagagctcggttgggaattgtaccacagaagagaagattcggtcgccctatatgatgctataatgaacgcaggccaggaagaaggcattgataactttggaacctacgctatgaatgcattaagactcgagaaagcgttccgggcctggggactggaaatgaactgtgacactaatcccctagaagccggcctcgaatacttcgtgaagctgaataaggaccagaactcttgctttgcacacttcaaagaagagaatggttgggtctcgaggtgggctattcgcccctattag

SEQ ID NO: 185451 - DNA, 1842 bp, synthetic construct
  misc_feature 1..1842: note = Description of Artificial Sequence: Synthetic coding sequence
  source 1..1842: mol_type = other DNA
tacctgatcgagcccgagaagatccaggagatgttccccctgctgaacatgaataaagtcctggcgggtctgtataaccctggagatgggcacatagacccctattcactgactatggccttggcagccggtgcgcggaaatgtggggctttgcttaagtaccccgcacctgtgacaagcctaaaggccagaagtgacggaacatgggacgtcgaaactcctcagggatcaatgagggccaaccggatagtgaacgcggcaggcttctgggcaagagaggtcggaaaaatgatcggcctcgaacaccccctgatcccagtacagcatcagtacgttgtcacttcaacaatttcggaggttaaagcgcttaagagagaactgccagtactgagagatctcgaggggtcttattacctgagacaggagcgcgacggcctcctctttggaccatatgagtcgcaggagaagatgaaagttcaggactcatgggttaccaatggagtccctccagggtttggtaaggagctttttgaatcggacctggatcgcatcatggaacacattaaagctgccatggaaatggttccagtcctgaagaaggccgacatcataaacgttgtcaacggtcccattacttacagcccagacattctaccaatggtgggtccacaccaaggtgtgcggaattattgggtggctatcgggttcggctacggcatcatacacgccggtggcgttggcaagtacttgagtgattggatccttcatggggagcctccttttgatctgatcgaacttgacccaaacaggtatggaaagtggaccacaacacagtatacagaagccaaggcacgcgagagctacggttttaacaacatcgtaggctacccaaaagaggaacgtttcgccgggagacctacacagcgcgtgtccggattgtatcagcgacttgagtccaagtgctccatgggctttcacgcggggtgggagcagccacactggttctataaacctggacaggatactcaatatcgtccctcctttagacgtactaactggttcgagcctgtgggctctgaatacaaacaagtcatgcagcgcgtcgccgtgaccgatcttagccccttcggcaagttcaacatcaaaggacaggacagcattcgcctgctggatcatttatttgccaacgttatacccaaagtagggttcacgaatatttctcatatgctaacacctaaaggccgtgtgtatgccgaactcaccgtgtcccatcagagcccaggcgaatttctgctgatcaccggttcgggttcggaactccatgatctccgttggatcgaagaagaagccgtcaaaggcggatacgatgtagaaataaagaatataacagatgaactgggcgtactcggggtggcgggccctcaggcgagaaaggtgcttcagaaactcacctctgaggacctctctgacgacgtgtttaagttcctccaaaccaaaagcttgaaggtgtcgaacatcccggtgaccgccatcagaatcagctacaccggtgaactaggatgggaactttaccacaggcgggaggattccgtcgccctctacgatgccataatgaatgccggccaggaggagggcattgataactttggtacttacgccatgaacgcactccgcttggaaaaggcctttagagcctgggggctggaaatgaactgtgacactaaccctctggaggccggtctcgagtactttgtgaaactgaacaaggaccaaaattcctgttttgctcattttaaggaggagaatggctgggtcagccggtgggcaattaggccttactag

SEQ ID NO: 185452 - DNA, 1875 bp, synthetic construct
  misc_feature 1..1875: note = Description of Artificial Sequence: Synthetic coding sequence
  source 1..1875: mol_type = other DNA
atgacccggaccggctggcacgccaccgagcagtacctgatcgagcctgagaagattcaggaaatgttcccccttctgaatatgaacaaggtgctggcaggactgtacaatcctggcgacggccatatagacccctacagcctgaccatggcattggccgcgggcgctcggaagtgcggtgccttgctcaaatacccagcgcctgtgacctctttaaaggcacggagtgacgggacatgggatgtcgaaactccccagggaagcatgagggctaatagaattgttaatgcagccggcttctgggcaagggaagtaggaaagatgatcgggttagagcacccactgattccggtgcaacaccaatatgtcgtgacatccaccatctctgaggtgaaggcactgaaacgggaactcccagtccttagggatctggaaggttcgtactaccttcggcaagaacgcgatgggctgctttttggaccatatgaatcacaagagaagatgaaagtccaggactcttgggttacaaatggcgtgcctcctggattcggcaaggaactgttcgaaagcgacctggacagaatcatggaacacatcaaggctgccatggagatggtgccggtgctcaagaaggccgacatcattaatgtcgtcaatgggcccatcacctactctcctgatattttgcccatggtggggccgcaccagggcgtaagaaactattgggtggcgatcggctttggctacgggatcatccacgcagggggcgtgggaaagtatctgagcgattggattctgcacggcgaaccaccctttgatttgatcgagctcgacccgaatcggtatggcaaatggacgactactcagtacactgaggcaaaggcccgagagtcgtacgggtttaacaacattgtcggttatccaaaggaagagaggtttgcaggacggcccacccaacgggtctccggcttgtatcagcgcctagagtccaagtgcagcatggggttccacgccggatgggaacaaccgcactggttctacaagccaggacaggacacacagtataggccatcatttcgccgcacaaattggtttgagcccgttggctctgagtacaaacaggtcatgcagcgggtcgctgtgaccgacttatcccccttcgggaaattcaatatcaaaggccaggattcaatccgactgctggatcatctctttgccaatgtgatcccaaaagtcggctttactaatatttctcacatgcttacccccaaaggtagggtttacgctgaactgactgtctcacaccagagccctggcgaatttctcttaatcacgggctctggcagtgagctgcacgacctgcgatggatcgaagaagaagcagtgaagggtggatacgatgtagaaattaagaacataactgacgagctgggagtgctgggagttgcaggccctcaggcccgtaaagtgttacagaaacttacaagcgaggacctgtcagacgatgtgtttaaattcctgcagaccaaatctctgaaggtctccaatatcccagtgactgccatcagaatcagctataccggcgaactgggatgggagctctaccatcggagagaggacagtgtcgcactctatgatgcaattatgaatgcaggccaggaagagggcattgataacttcggcacttacgccatgaatgccctaagactggagaaggccttcagggcctggggcctcgagatgaattgcgacacaaaccctcttgaggctggtctcgaatactttgtgaagctgaacaaagaccaaaactcttgcttcgcgcactttaaggaggagaatggctgggtgagtaggtgggccattaggccttattag

SEQ ID NO: 185453 - DNA, 1185 bp, synthetic construct
  misc_feature 1..1185: note = Description of Artificial Sequence: Synthetic coding sequence
  source 1..1185: mol_type = other DNA
atgtggagctgctggcggaaccagagcagccggctggacctgcccgggacacaatacggtattatccatgctggaggggtcggcaaatatctgtccgattggatcctgcacggcgaaccccccttcgatcttattgagttagatcctaaccgttatggcaaatggacaacgactcagtatactgaagccaaagctcgagagagctacggatttaacaatattgtcggttatcccaaggaggagaggttcgctggccgacctacacagcgggtgagtggcctgtatcagagattagagtcaaagtgctccatggggtttcacgccggatgggagcagcctcattggttctacaaaccgggacaagatacgcagtatagaccttcctttcggaggaccaattggttcgagcctgttggatctgagtataagcaggtaatgcagagggtagccgttacggatttgtcaccttttggtaaatttaatatcaaaggccaggactccatcaggcttcttgatcatctcttcgccaacgtgataccgaaagtaggttttacaaatatttcacatatgctcacgccaaaaggacgagtttatgccgaactgacagtgagccatcagtcccccggagagtttctactaattaccgggtcaggatctgaactccatgatctgcgctggatcgaggaagaagctgtaaagggaggttatgatgtcgaaatcaaaaacatcaccgatgaactgggggtgttgggagtcgctgggccccaggctcgcaaggtgctgcagaagctcacatccgaggaccttagcgacgatgtgtttaaatttctccaaactaagagcctcaaagtctctaatatccctgtcaccgccattaggatctcatacaccggagaactgggttgggaactgtaccatcgcagagaggatagtgtcgcgctatatgatgctataatgaacgcagggcaggaagagggtatcgataattttggtacgtacgccatgaacgcccttcgactggagaaggcctttcgagcctggggcctagagatgaactgcgacaccaatcctctcgaagcggggctggagtactttgtgaagctgaataaggaccagaactcctgtttcgcccacttcaaggaggagaatggctgggtgagccgctgggccatccgcccttattag

SEQ ID NO: 185454 - DNA, 4731 bp, synthetic construct
  misc_feature 1..4731: note = Description of Artificial Sequence: Synthetic coding sequence
  source 1..4731: mol_type = other DNA
atggccgagcggggcctggagcccagccccgccgccgtggccgccctcccgcccgaggttcgggcgcagctcgccgagctcgagttggagctctccgagggggacatcacacagaagggctatgagaagaagcggagcaagctcctgagtccctactccccacagacccaagagacagacagcgcggttcagaaggaattacggaatcagacacctgcgccgtccgccgctcagacctctgcaccaagcaaataccacaggacccgaagcggcggcgctcgggacgagcgttaccgctctgatatacataccgaggcagtgcaagctgccctggccaagcataaggagcaaaagatggcactgcccatgcccactaagcggcgctccacattcgtgcagtccccagccgacgcctgcacaccccctgacacaagctcagctagcgaggacgaagggtctctgaggcgccaggctgccctaagcgccgcccttcaacagtccctgcagaatgcagaaagctggatcaacaggagcatccaggggtcatcaacctcatcctctgcgtccagcactctgtcccacggggaggtgaaaggtacatctggatcacttgccgacgtgtttgctaatactagaatcgaaaacttttcagctcctccagacgtgaccactacaacatcaagctcttccagttccagctccatccgtcctgccaatatcgatctgccaccttcaggaatcgttaaaggaatgcataagggtagtaaccgaagtagccttatggatactgccgacggcgtcccggttagtagtcgcgtgagcaccaagattcagcaattactcaatacattgaaacggcctaagagacctcccctgaaagagttctttgtggatgacagcgaagagattgtggaggtgccccagccagatcccaaccaacccaaaccagagggccgacagatgacaccagtgaaaggggagccactgggagttatatgtaactggcctcccgccttggagagtgccttgcagcgctgggggaccactcaggctaagtgctcttgtctgactgcgctggacatgaccgggaagccagtatacacgctgacttatggcaaactgtggtccaggtccttgaaactcgcttacaccttgctgaacaagctgggaacaaaaaatgagccagtcctgaagcctggggatcgcgtggcactcgtgtacccaaacaacgaccctgtcatgttcatggttgctttttatgggtgcctgctcgccgaagttatacctgtacctatagaagtcccccttaccagaaaagatgccggggggcagcaaataggtttccttttaggatcttgcggcattgcactggctcttacctcagaagtgtgtctaaagggtctgcccaaaacacagaatggtgagatcgttcagtttaaaggttggcccagactgaagtgggtggtaacagattcgaaatatctgtccaagccccccaaggactggcagccccacatcagccccgccgggaccgaacctgcatacattgagtataagacgtcaaaagaaggcagcgtgatgggggtcaccgtgtcaagacttgcgatgctttcacactgtcaggcccttagtcaagcctgtaattacagtgaaggggaaactattgtgaacgttctggactttaagaaggacgccggattgtggcacggcatgttcgctaacgtgatgaataagatgcacaccatctctgtcccatattcagtgatgaagacatgtccactcagctgggtccagcgagtgcacgctcataaagctaaggttgccttagtaaaatgccgagatcttcactgggctatgatggcgcatcgggaccagcgggatgtgagcctgtcgagtctgagaatgctcatcgtcacagacggcgctaacccatggtctgtcagcagctgtgatgctttcctcagcctgtttcagtctcacggtctgaagcctgaggctatttgcccatgcgccacatcagcagaggccatgacagtggctattcgacgacctggcgttcccggcgccccacttcccggccgcgccatactttccatgaacgggctgagctacggagtcattagagttaataccgaagacaaaaattctgcactaaccgtccaggatgtcgggcacgttatgcctggtggaatgatgtgtatcgtgaaacctgatggccccccgcagctctgtaaaactgacgagataggagaaatttgcgtgtcttcacgtaccggcgggatgatgtatttcggtcttgctggagtcactaaaaacacttttgaggttatacctgtgaacagtgccggcagccccgtgggagacgtgccgttcatcagaagcgggctgctaggattcgtgggccccggcagcttggtgtttgtggtcgggaagatggacgggttgctaatggtgagtggccggcgccataatgctgatgacattgtggctacaggtctcgccgtcgagtctatcaagactgtttatcgtggccgcattgccgtgttctcagtgtctgtcttctacgatgagcgtattgtcgtggtggcagagcagcgcccagacgcctccgaagaggattcgtttcagtggatgagtcgcgttcttcaggccattgattccattcaccaggtcggagtgtactgtctcgcactggtaccagcaaacaccctgcccaaaaccccactcggggggattcacatatcacagaccaagcagcttttcctggaaggatcattacatccttgcaacattctgatgtgtccgcacacctgcgtaaccaatctgcctaaacctaggcaaaagcagcctggagtcgggccagcatctgttatggtcggcaacctggtagcaggaaaacgcattgctcaggctgccggccgcgatctcggacagatcgaggagaatgatctcgtgcggaagcatcagttcctggccgagatcttgcaatggagagcgcaggccactccagaccacgtgcttttcatgctgctgaacgcaaaagggactactgtgtgcacggcaagctgccttcagctgcacaagagagccgagagaatcgcatcggtgcttggtgacaaggggcacctgaacgccggagacaacgttgtgctgctctatcctcctgggatcgagctaattgccgccttctatggctgtctgtatgccggctgtatcccagttaccgtaagacctcctcacgctcaaaacctgaccgcgactttgccgaccgtgaggatgattgtggatgtctcaaaagccgcctgcatattaacctcccagaccctgatgagattgcttaggtcaagggaggccgcagctgccgtagacgtgaaaacctggcctactataatcgatacagacgacctgcctaggaagcggctccctcagctgtacaagccccctaccccggaaatgctggcttatctggatttttccgtgtccactacgggaatgctgactggcgtcaaaatgtcgcattcagcagtgaacgcgctgtgtagggctattaagctccagtgtgagctgtattcttcccgacaaattgctatttgcttagacccttattgtggcctagggttcgctttgtggtgcctctgttctgtctatagtggacaccaaagcgttctcattcccccaatggagctagaaaacaatcttttcttatggctgagcaccgttaaccagtataagataagagataccttctgcagctattccgtaatggagttatgtactaagggactgggaaatcaggtggaggtgctcaagacgcgtggtattaacttgtcttgtgttaggacatgtgtggtagtggccgaggagaggccaagggtggcactgcaacagtctttctcaaagctttttaaagacattggtttatcacctagagccgtgagcacaacatttggaagtagagtgaatgtcgcaatctgtctgcaggggactagtggtccagatccaacaacggtatatgtcgacctgaagagcctgaggcacgacagagtaagacttgtggagcgcggtgctccacagagcctcctcctttccgagagcggaaagattctccccggcgtaaaggttgtcatcgtcaatccagaaactaaagggccagtcggcgacagccatctgggagaaatctgggttaatagccctcacaccgcaagcgggtactacactatctacgactctgagactctgcaggccgatcattttaacactagactgtcattcggggatgccgcacagaccctgtgggcgcgcactgggtacctggggtttgtgagaaggactgaactcaccgccgctacaggcgagcgacatgatgctctctatgtagtgggcgcattagatgagacgctggagttgagaggactgcggtaccatccaattgacatcgagacctcagtgtctcggatccatcgctcgatcgctgaatgtgctgtattcacctggaccaatctgctggtggtggtggttgaactgtgcggctccgaacaggaggctcttgatttggtgcctctggtcaccaatgtggtgctggaggagcactaccttattgtgggcgttgttgtcgtagttgatccaggtgtcattccgattaacagccgtggtgaaaaacagcggatgcatctccgggactccttcctggcagaccagctggatcctatttacgtggcttataacatgtag

SEQ ID NO: 185455 - DNA, 1179 bp, synthetic construct
  misc_feature 1..1179: note = Description of Artificial Sequence: Synthetic coding sequence
  source 1..1179: mol_type = other DNA
atggccgagcggggcctggagcccagccccgccgccgtggccgcccttccgcctgaggtgcgggcccagctggctgagttggagctggagctgagcgaaggagacataacacagaaaggctatgagaagaagcgatctaagctcctgtctccatattctccacagacccaagaaacggactcggcagtccagaaagagttgaggaatcaaactcccgctcccagcgcagcacaaactagtgccccaagcaaatatcatcggactaggtccgggggagcccgcgacgagagataccgcagcgagtttagtctcgtccgcatttactccgaggacatccacactgaagcagtgcaggctgcacttgcaaaacacaaggaacaaaaaatggccctgcctatgcccaccaagcggcgcagcacctttgttcaatctccagccgatgcctgtacccctccagatacctcgtcagcttccgaagatgaggggagcttgaggcggcaggcggctctgtccgccgcattacaacaaagcctacagaatgccgaatcatggataaataggagcatacagggctcctctacatcttcatcagcaagcagtacgctttcccacggtgaagtgaaagggacctcgggatctctcgctgacgtgtttgcaaacacacgcatcgagaatttttctgcccctcctgatgtgaccaccaccacatcgagcagctcctcgtcctcgtccatccggcccgctaatattgacctccctccctctgggattgtaaagggcatgcacaagggaagtaatagatcgtccctgatggacacagcagatggcgtgccagtgagtagccgggtttcgactaaaattcaacagctcctgaacacactcaaacgccccaaaagaccccctttgaaggagtttttcgtcgacgatagcgaagagatcgtggaggttccccagccagatccaaaccaacctaagcctgagggccggcagatgacgccagtgaagggcgaacctctgggggtgatatgcaactggccccccgcccttgaatcagccctacaacgatgggggacaacccaggccaagtgttcttgcttaacggctctggacatgaccggaaagcccgtatatacgctgacttatggagagtcagcaagattccagatcctgctgagctag

SEQ ID NO: 185456 - DNA, 4671 bp, synthetic construct
  misc_feature 1..4671: note = Description of Artificial Sequence: Synthetic coding sequence
  source 1..4671: mol_type = other DNA
atggccgaccggagcctggagggcatggccctgcccctggaggtgcgagcccgactcgccgaacttgagctcgaactttccgaaggcgacattacccagaaggggtatgaaaaaaagcgctctaaactgatcggcgcatacctaccgcagccaccacgggtggaccaagcactgcctcaggagcggcgggcgccggtgacaccttcttccgcttcaaggtatcatcgtaggagatcttcagggagccgcgatgaacggtatcggagcgatgtacatacagaggccgtgcaggctgccctggccaagcataaagagcgcaaaatggcagtacccatgccatccaagcgacgcagcctggtggtccaaacctccatggacgcatacacccctcccgacaccagtagcgggagtgaagacgaggggtccgtgcagggagacagccaaggaacccccacctcatctcagggttcgatcaatatggagcactggatttcccaagccattcatggatctacgaccagcacgactagcagctcttccacccagagcggggggtcaggcgccgctcaccgactggcagatgtgatggcccagacccacatcgaaaatcattccgcaccaccggatgtcactacatataccagcgaacatagtatccaggtggagagacctcaaggcagtactggaagtaggaccgctcccaaatatggaaacgccgagctgatggagacaggcgatggggtcccagtttcctcacgggtgagcgcaaaaatccagcagttagtgaacacgctgaagagacctaagcgcccacccttacgcgagttttttgtcgatgactttgaagaactactcgaagtccagcagccagaccctaatcaaccaaagcctgagggagcgcagatgctggcaatgcgtggcgaacagttaggggttgtcactaattggccaccaagcttagaggcagctctgcaacgctggggcaccatctcacccaaggcaccatgtctaacaaccatggatactaatggtaaacctctgtacattcttacctacggaaaactgtggacccggagcatgaaagtcgcatactctattcttcacaagctgggcaccaaacaagagcctatggtccggcctggcgacagggtcgctctggtcttcccaaacaatgaccccgcagccttcatggccgctttttacggttgccttctcgcagaggttgtgccagtgcctattgaggtacccctgacacgaaaggatgctggtagccagcagatcggcttcttgttgggatcttgtggcgtaacggtcgctctgacctccgacgcatgccacaaaggactgcccaaatctcctacgggcgaaataccgcagttcaagggctggcctaaactcctctggttcgtcaccgagagcaaacacttgagcaagccaccaagggactggttcccacatattaaggacgcaaacaatgacacagcatacatcgagtataagacttgcaaggatggctccgtgctcggtgtcaccgttactaggacggctctgctgacccactgccaggccttgacccaggcatgcggttacacggaggcagagaccatagtgaacgttctcgatttcaagaaagatgtcggcctatggcacgggattttaacctcagtgatgaatatgatgcacgtgatcagcatcccatatagcctaatgaaggttaacccactcagctggatccagaaagtttgccagtataaagcgaaggtggcctgtgtcaagtctagggacatgcattgggcccttgtggctcatagggatcagagagatattaatctgtcgtctttaagaatgctaatcgtggccgatggtgccaacccgtggagcatctcatcatgtgatgctttcctgaacgtattccagagtaaaggtctccggcaagaggtcatttgtccctgcgcgtctagtcccgaggcactcactgttgctataaggagacctacggatgactcgaatcagccacctggtcgtggagtgctgagtatgcacggactcacctacggcgttatccgggttgactccgaagagaagctgtctgtgctgacagtgcaagacgtggggctggtgatgcccggagcaattatgtgtagcgtgaagcccgacggcgtgccacagttgtgtaggactgacgaaattggagagctgtgcgtgtgtgcagttgctaccggtacttcctactacggtctgtcaggcatgacaaaaaacacattcgaggtgttccccatgacttcttcaggcgcgcccatcagcgaatacccattcatcaggacagggctgctgggtttcgtgggcccagggggcctggtcttcgtcgttggaaagatggatgggttaatggtagtttccgggaggcgacacaatgccgacgatattgttgccactgcccttgccgtcgagcctatgaaatttgtgtatcgcgggcgcatcgctgtgttctcagtaacagtgcttcacgacgaaagaatcgtgatcgtcgcagagcaacggccggatagtactgaggaggacagtttccagtggatgtcccgtgtcctgcaggccatcgatagcattcatcaggtcggagtctactgcctggcccttgtcccggccaacacgttgccaaaaaccccactaggaggcatccacttaagtgagaccaaacagctgtttttggaggggagccttcacccctgtaatgtgctgatgtgcccccatacctgcgtgactaacctaccgaagccaaggcagaagcagcctgaaataggtcccgccagtgttatggtgggtaatctcgtgtctggtaaaaggatagcacaggcctctggtagggacttgggacagattgaggacaatgaccaggcaagaaagttcctgtttttgtcagaggtgctgcagtggagagcccaaacgacccctgaccatattctgtacaccctgctgaactgccgcggcgcaatcgctaatagcctgacgtgcgtgcagctccacaagagagccgagaaaatcgccgtaatgctgatggagagaggacacctgcaagatggggaccacgtcgcactggtatatcctccagggatcgacttgattgccgccttctatggatgcctttacgctgggtgcgtcccaatcacagtaaggcccccacatcctcagaacattgccactactctgccgacagtgaagatgattgtcgaagtgtcccgcagcgcctgcttgatgacaacccagctcatttgtaagctgcttcggagccgcgaggcagccgccgccgtggacgtgagaacctggccactgatcctggacaccgatgacctcccaaaaaagagacccgcccagatctgtaagccatgtaaccctgacaccctagcttacctggacttcagcgtgtccactaccggtatgctcgcaggtgtgaaaatgtctcacgccgccacatccgctttttgtaggagcatcaaactgcaatgcgaactatacccatcacgcgaggtcgcaatttgcctagacccatactgtggtctgggattcgtgctgtggtgcctctgtagtgtatactccggccatcaatccatcctgatccccccttcagaactggaaacgaacccagctttgtggctcctggcagtgagtcaatataaggttcgggacactttttgctcatacagcgtgatggaactgtgcaccaagggccttggttcccagaccgagagtttaaaggctcggggactcgatctctctcgagtgcggacctgcgtggtggtggctgaggagaggccacgtatcgctctgacacagagcttctccaaacttttcaaggacctcggcctccaccccagggctgtgagtacatcattcgggtgccgcgtgaatttggcaatctgcctccaggggaccagcggcccggatcctacaaccgtgtacgtcgacatgcgcgctttaagacacgatcgggtccgactggtagaaagaggaagcccgcactctttgccactgatggagagcggaaagatcctaccgggggtacgcatcattatcgcaaaccccgagacgaagggacccctgggcgatagccatctcggcgagatctgggttcattcggcacataatgcttcaggctattttactatttatggtgatgagagccttcaaagcgatcattttaatagcaggctgtcgtttggcgacactcaaacaatttgggcacggactggctatcttggattcctgcggcgcaccgagcttaccgatgcgaatggcgagcggcatgatgccctgtacgttgttggtgcattggacgaggccatggagctgaggggtatgagatatcatccaatcgatatcgaaacgtccgtgattagagcacacaagagcgtcactgaatgtgcagtgttcacttggactaacctgctggtcgtggtggtggaactggacgggagcgagcaagaagctctggacttagtgccccttgttactaatgtggtactagaagaacactatctgatcgtcggcgttgtggtggtcgtcgatataggagtgataccaattaactcccggggtgaaaaacagagaatgcatttgcgtgacggtttcttggctgaccaacttgaccccatttatgtggcgtataacatgtag

SEQ ID NO: 185457 - DNA, 1971 bp, synthetic construct
  misc_feature 1..1971: note = Description of Artificial Sequence: Synthetic coding sequence
  source 1..1971: mol_type = other DNA
atggccgtgcccatgcccagcaagcggcggagcctggtggtgcagactagtatggatgcctacacaccacctgacacatcaagtggctccgaggacgaaggtagcgtgcagggggacagtcagggtacaccgacgtcaagccaagggtccatcaatatggagcactggatctctcaagcaatccatggctccactaccagtacaactagtagctcctccacacagagcggaggctcaggcgcggctcatagactggctgatgtcatggctcagactcacattgaaaatcatagcgcccctcccgatgtcaccacctacacctcagaacacagtatacaggtggagcggccccaggggagcaccggctcacggactgcaccgaaatatgggaatgcggagctgatggaaacaggggatggggtccctgtctcttctagagtgtctgccaagatccagcagctcgtgaataccctaaaaagacctaagcgtccgcctctgcgcgagtttttcgtcgatgactttgaggaattactcgaggtgcagcagcctgaccctaatcagcccaaaccagaaggagcccaaatgctggctatgcggggtgaacagctgggcgtcgtgactaattggccgcccagcctggaggctgcactgcagcgctggggtactatatctcctaaggcgccctgtctgacgacaatggataccaatgggaagcctttgtacatcctcacctacgggaagctgtggacgaggtctatgaaagtggcatatagcattctgcacaaactgggcactaagcaggaacccatggttaggccaggcgatcgggtcgctctggtgttcccaaataatgatccagcggcctttatggccgctttctacggatgcttgctggccgaggtggtgccagtgccgattgaagttcctcttactcggaaggacgctgggagccagcagattggattccttctcggttcgtgcggcgttacagttgcactgacgagcgatgcctgccacaaaggcttaccgaagtcgcctacaggtgagatcccacagttcaagggctggcccaagctcctgtggtttgttaccgaatcgaagcacctgtcgaagcctccccgggactggttccctcatattaaggacgcgaacaatgatacagcctacattgaatacaaaacctgtaaagatggcagtgtgctgggagttaccgtcacgaggactgcacttctgacacattgtcaggcgctaacccaggcctgcgggtatactgaagccgagactatcgtgaatgttcttgacttcaaaaaagacgtgggcctgtggcacgggatcctgacatcagttatgaacatgatgcacgtgatcagcattccatactccctcatgaaagtgaacccgctgtcatggatccagaaggtgtgtcaatataaggccaaagtcgcttgcgtgaagagtagagacatgcactgggcactggtcgcacacagggatcaaagggatatcaacctgagtagcttacggatgctgatagtagccgacggcgccaatccttggagcatctctagttgcgacgcctttctgaacgtgttccagagcaaagggctgagacaggaggttatctgcccatgcgcttcctccccagaggcgttaactgtggccattagaaggccaactgacgactctaatcagccccctggccgaggcgtattatctatgcacggcttaacctacggcgtgattcgcgtcgattccgaagaaaaactgagtgtgctcacagtacaggacgtcgggttagtgatgccaggtgcgataatgtgtagcgtgaagccggatggcgtcccacagctttgtagaacagatgaaattggcgagctgtgtgtgtgtgccgtggctaccggcactagttactatggtctgagcggaatgactaagaacacatttgagcacacatccaataaggggaagtag

SEQ ID NO: 185458 - DNA, 597 bp, synthetic construct
  misc_feature 1..597: note = Description of Artificial Sequence: Synthetic coding sequence
  source 1..597: mol_type = other DNA
atgagccacgccgccaccagcgccttctgccggagcatcaagctgcagtgcgagctgtatccgagccgagaggtagcaatatgtctggacccttactgcggtctgggatttgtcttgtggtgtttgtgcagtgtttacagcgggcaccaaagcattttaatacctccatcagaactggagacaaacccagctctgtggcttttggcagtcagccaatataaagtcagggatacattttgctcctactcagtgatggagctgtgcaccaaggggctcgggtctcagacagagtcattgaaagcccggggacttgatctgagcagagtgagaacctgtgtcgtcgtggctgaggagagaccccgtattgcgctcactcagtctttcagtaaactgttcaaggacctgggtctgcatcccagagctgtgagcaccagcttcgggtgccgagtaaatctcgccatctgtctacaatgttgggactaccggcacgaaccacccagaccagcccccaaatgtttcaaaatggtctacaaagagggggttaggagcgtaggcgaagataagatcagagagaaacggacgaaaacctggcgttag

SEQ ID NO: 185459 - DNA, 696 bp, synthetic construct
  misc_feature 1..696: note = Description of Artificial Sequence: Synthetic coding sequence
  source 1..696: mol_type = other DNA
tgagagaccatcgtgaacgtgctggacttcaagaaggacgtgggcctctggcatggcatccttacatctgttatgaacatgatgcacgttatatccataccgtactccctgatgaaagtgaaccccctctcttggattcagaaagtctgccagtacaaggcaaaggtcgcatgtgtgaagtctagagatatgcactgggctttggtcgcacacagggaccagagggacataaatctgtctagcctgcgcatgctgatagtggctgacggggctaacccatggtccatttcttcgtgtgacgcttttttgaacgtctttcaaagcaagggactaaggcaggaagttatctgcccatgtgcttccagcccggaggccctaaccgtagccataagaagacctacagatgactctaatcagccccccggccgaggggtgctgagtatgcatgggctcacctatggcgtaatccgggtcgattccgaggaaaagttgtccgtgctgactgtacaagacgtgggactggtcatgcccggagctattatgtgtagtgtaaagcccgatggcgtgcctcagctctgtcgcacagacgaaataggtgagctatgcgtgtgcgccgtagctactggcacctcctactacggcctgagcggcatgaccaagaatacgttcgaacacaccagcaacaagggtaagtag

SEQ ID NO: 185460 - DNA, 564 bp, synthetic construct
  misc_feature 1..564: note = Description of Artificial Sequence: Synthetic coding sequence
  source 1..564: mol_type = other DNA
atggccgaccggagcctggagggcatggccctgcccctggaggtgagagctcggctcgcggagcttgaattggagttgtccgagggagatatcacccaaaaagggtacgagaagaagaggtccaagcttataggagcttacttgcctcagcccccgactgcaaacggggccgcagtggtgagatgtagactgcagcactcagagggagctcccaggcgcacctttcggtcggctcacatcggagtttgcgatgtaagggaagccgccgctagggaacgtgtggcaagcacggctggaaatcggcccctgttctactttaggtttggcgttgaccaggccctgccacaggaaaggcgcgcacctgtcaccccaagttcagcgtcccgttatcataggaggagaagttctggctccagggatgagaggtatcggtcagacgtgcataccgaagctgtacaggccgccttagctaagcataaagaacgtaaaatggcagtgccaatgccgtctaaacggaggtcactggtagtgcagacctctatggacgcttacaccccaccttag

SEQ ID NO: 185461 - DNA, 468 bp, synthetic construct
  misc_feature 1..468: note = Description of Artificial Sequence: Synthetic coding sequence
  source 1..468: mol_type = other DNA
tgagtgtacagcggccaccagagcatcctgatcccccccagcgagctggaaaccaaccctgcgttgtggctactggccgtttctcaatacaaggtccgggatacattttgttcttacagtgttatggagctgtgcactaagggcttgggaagccagacagaatccctgaaagcacgcgggctcgatttgtccagggtgcgcacatgcgtggtggtggcggaggagcgaccgcgcatagcattgactcagagcttctctaagctgtttaaagatcttgggctgcacccgcgggccgtgagtacctcgttcggctgcagggtaaacctcgccatctgcctccagtgttgggattaccggcacgagccccccaggccagccccaaagtgtttcaaaatggtgtataaggaaggggtgaggagcgtgggcgaggataaaatccgtgagaaacgaacgaagacttggcggtag

SEQ ID NO: 185462 - DNA, 1446 bp, synthetic construct
  misc_feature 1..1446: note = Description of Artificial Sequence: Synthetic coding sequence
  source 1..1446: mol_type = other DNA
atctgggtgagccggagcgcctgcctgatgaccacccagctgatctgcaagctgctgcggtctagagaggctgcagccgcagtagatgtgagaacctggcccctgattctggacactgacgacctaccaaagaagcggccagctcaaatttgcaagccatgcaacccggacactctcgcatacctagatttcagcgtttccaccactggcatgctggcaggggtcaagatgagccacgccgccacaagtgccttttgccggtcaatcaagcttcagtgcgagctgtatccgtcacgcgaagttgccatctgtctggacccctattgcgggctgggattcgtcctgtggtgcttatgtagtgtgtatagcgggcaccagtcaatattaatccctcctagcgaactggagacaaatcccgccttgtggctactcgccgtgtctcagtacaaggtccgggataccttttgctcttacagtgtcatggaactttgcactaaagggctaggaagccagactgagtccctgaaggcccgcggccttgacctgtcacgagtgaggacctgcgtggttgtcgcggaggagaggcctagaatcgctctcactcaaagcttttcgaaactatttaaagacctggggctccacccacgggctgtctctacctcctttggatgtagagtgaacctcgccatctgcctgcaaggcacaagtggccccgatcccacaacagtgtacgtcgatatgagagccctgcgacacgacagggtccgccttgtagaacgcggttccccacactcccttccacttatggagtcaggtaaaatactgccaggggtgaggattattatagctaatcccgagaccaaaggcccgctcggggattctcacctgggcgaaatttgggttcactcagcccacaacgcctccggctactttactatttacggggatgagagcctgcaatccgaccatttcaacagtcgcctttcattcggggatacccagactatttgggcaagaactggctaccttggatttctccgtcggacagaattgacggacgccaacggcgaacgtcatgatgcactgtatgttgttggggctctggatgaagcaatggaactcagaggcatgcggtatcacccaatcgatattgagacaagcgtgatcagggcccacaagtccgtaaccgagtgcgcagtcttcacatggactaatttactagtggtagttgtcgaattggacgggtctgagcaggaggcactggacctggtgcctctcgtgaccaatgtcgtgctggaagaacattatcttatcgttggagtcgttgtcgtggtcgacattggcgttatcccaataaattctcggggagagaaacagcggatgcacctgagagatggcttcctggctgatcagcttgatcctatatacgtggcatacaacatgtag

SEQ ID NO: 185463 - DNA, 1116 bp, synthetic construct
  misc_feature 1..1116: note = Description of Artificial Sequence: Synthetic coding sequence
  source 1..1116: mol_type = other DNA
atgcacggcctgacctacggcgtgatccgggtggacagcgaggagaagctatctgtcctgacagttcaggacgtgggcctggttatgcccggcgccatcatgtgctcggtgaagcctgatggcgtccctcagctgtgtcgtaccgacgagattggtgagctgtgtgtatgcgccgtggccacaggaacctcctactacgggctgtccggaatgactaagaacacctttgaagttttccccatgacctcgtccggggcacctatatccgagtatcctttcattcggacgggattgctgggttttgtgggaccaggggggctcgtgtttgttgtagggaaaatggacgggctaatggtggtttcaggacgtcgccataatgccgatgacattgtggccactgccctggcagtcgaacccatgaagttcgtctaccgcggcagaattgcagtcttttccgtgacagtcctgcatgatgaacggatcgttattgtggcagagcagcgccccgacagtacagaggaagatagctttcagtggatgtctcgagttctccaggccattgacagtattcaccaagttggggtctattgcctggctctcgtccccgcaaatacacttccaaagacccctctgggcggaattcacttgagcgagacaaaacagctgttcttggagggatctttgcatccctgcaatgtcctcatgtgtccgcacacgtgcgttacaaatcttccaaagcccagacagaagcagccggaaatcggcccggcctccgttatggtggggaacctggtctctggtaaaaggatagcccaggccagtggacgagaccttggccagatcgaggacaacgatcaggcaaggaagtttctgtttctgagtgaagttctccaatggcgtgcccagacgactccagatcacatcctgtacactctccttaattgtagagtaaggcgcggcgcaggcttaccctggttactggcctcaagaggcctagcctggtttctgggggctctgttgctgctgagcttgaacccctttgcctctgtgttgtgggagttcttcctgtgtttcgctatcctgaccgaaaccttcgtccctagagactgtttctag

SEQ ID NO: 185464 - DNA, 1236 bp, synthetic construct
  misc_feature 1..1236: note = Description of Artificial Sequence: Synthetic coding sequence
  source 1..1236: mol_type = other DNA
atgtggagcggctggtggctgtggcccctggtggccgtgtgcaccgcggatttctttagagatgaagccgaaaggataatgagggacagtcccgtgatcgatggccacaacgatctgccatggcagctgttggacatgttcaacaacaggctgcaggacgaacgtgctaatctaacaactctggcaggaacccacacgaatatcccgaaactgagagccggatttgtgggaggacagttttggtcagtgtatactccctgtgacactcagaataaggacgccgtgcggcggacacttgagcagatggatgtggtgcaccgtatgtgcaggatgtatccggagacttttctatatgtgactagctccgcaggcattcggcaggccttcagggaagggaaggtcgcttcactcataggggtggagggcggacactccattgatagttccctgggcgttctaagagccctgtaccagttggggatgcgctatctgaccctgacccattcttgcaacaccccttgggccgacaactggctcgtagacaccggtgactcggagcctcagtctcagggcttgagcccattcggacaacgcgtggtgaaagaattaaaccgattgggcgtgttgatcgacctggcccatgtcagcgtggccaccatgaaagcgaccttgcagctgagcagggctccagtcatattcagtcactcctctgcatacagcgtttgtgcttcccgccgaaacgtgcctgacgatgtccttcgcctagtgaaacagaccgacagtttggttatggtcaacttctacaacaactatatctcatgtacgaataaggccaacctctctcaagtagcagatcacttggatcacatcaaagaagtggccggggcaagagctgtcggttttgggggcgattttgacggggttcctagagtgcccgaaggtctggaggatgtcagcaaatatcctgacctaatcgctgagctgctccgccgaaactggacagaagcggaggtcaaaggggcgctggccgacaacctgctgcgcgttttcgaggcagtggagcaggcctcaaacctcacacaggcccctgaggaggaaccgatcccattggaccagctcggtggatcctgccggactcattacgggtatagtagcggcgcaagctcgcttcacagacattggggtttactgctcgcgagtcttgcccctctcgtcctatgtttatcattgctctag

SEQ ID NO: 185465 - DNA, 1236 bp, synthetic construct
  misc_feature 1..1236: note = Description of Artificial Sequence: Synthetic coding sequence
  source 1..1236: mol_type = other DNA
atgtggagcggctggtggctgtggcccctggtggccgtgtgcaccgccgacttttttagggatgaggcagagcggataatgagagactctccggtgatagacggccataacgatctcccatggcagttgctagatatgtttaacaaccggctgcaggacgaacgggccaacctaaccacgctggccgggacccatactaacatacctaagttacgcgctggttttgtcggtggccaattctggagtgtgtacaccccatgcgatacacaaaataaggacgctgtgcgcagaactcttgagcagatggatgtggtccatagaatgtgccgcatgtaccccgagactttcctctacgtgacctccagcgctggtatcagacaggcattccgggagggcaaggtggcctcactgatcggcgttgagggcggtcattccatcgacagcagcctgggcgtcttgcgggctttataccagcttggcatgcggtatctaacacttactcactcttgtaatactccctgggcagataactggcttgtcgacaccggtgactccgaaccacagtcacaggggctgtctccatttggccagagagtggtcaaagagctgaatagattgggtgtgctgattgatctggcccacgtcagtgtagctaccatgaaagcaactctccagctgagccgcgcccccgtgatcttctctcactcatcagcctactcagtgtgcgccagccggagaaacgtcccggatgatgtgcttcgtctggtgaagcaaaccgactcccttgtaatggtgaatttctataacaactacatctcttgcactaataaagccaatctgagccaggtggccgatcacctcgatcacattaaggaggtcgcgggggcacgggcggttggcttcggtggggatttcgatggcgtgccaagagttcccgaagggctcgaagacgtcagcaaatacccggacttgatcgccgagctgctacgaaggaactggacggaggcagaggtcaagggcgccctggccgacaatctgctgcgggtttttgaggctgtggagcaggccagtaatctcacacaagcccctgaagaggagcccatacctttagatcagctcggaggctcgtgcagaacacactatggttacagttctggcgccagttcacttcaccgccactggggtctgttgctagccagtctcgccccactcgtattatgcttgagcttactatag

SEQ ID NO: 185466 - DNA, 1236 bp, synthetic construct
  misc_feature 1..1236: note = Description of Artificial Sequence: Synthetic coding sequence
  source 1..1236: mol_type = other DNA
atgtggagcggctggtggctgtggcccctggtggccgtgtgcaccgctgacttttttagagatgaggccgaaaggatcatgcgcgatagtccagtaattgacggacataacgatcttccgtggcaattgctcgatatgtttaataatagactccaggatgagcgagctaacctgacaaccttggctggtactcacacaaacattcccaagctcagagctggattcgtcggcgggcagttctggtcagtgtataccccttgcgatacgcagaataaggacgcagttaggagaaccctggagcagatggatgtggtgcaccggatgtgccgcatgtacccagaaacgtttctttacgtcacctctagcgccggcatcagacaggcttttcgggaaggtaaggtggcatctctgatcggagtagagggcgggcactcaattgactcctccttaggggttcttagggccttatatcaactaggcatgcggtacttgacactcactcactcctgtaacaccccctgggcggataactggctcgtagatacaggggactccgagccccagagccagggactctcaccattcgggcagcgcgtggtgaaggaactcaacagactcggcgtgctgatcgacctggcacatgtgtctgtggctacgatgaaggccaccctccaactcagtagggcaccagttatcttctcccattcctctgcatatagcgtttgcgcctcccggcgtaatgtccctgacgacgtactgcgcttggttaaacaaacagatagcctcgtgatggtgaacttttataacaattacatatcctgtacgaacaaggcgaacctttcccaggtagccgatcacttagatcacatcaaggaggttgcgggcgctagggccgtgggcttcgggggagactttgacggggtgcctagagtgcctgaggggctggaggacgtgagcaagtaccctgatttgattgccgaacttctgcgccggaattggactgaagcagaggtgaagggtgccctcgctgataatttactcagggtttttgaagctgtggagcaggcctctaatttaactcaggccccagaagaggagccaatcccgctggatcagctgggagggtcttgcaggacccactacggctatagcagcggggcaagcagccttcaccgtcattgggggctcctgctggccagcctggccccactcgtgctgtgtctctcccttctgtag

SEQ ID NO: 185467 - DNA, 381 bp, synthetic construct
  misc_feature 1..381: note = Description of Artificial Sequence: Synthetic coding sequence
  source 1..381: mol_type = other DNA
atgcagcccagcggcctggagggccccggcaccttcggccggtggccactgttaagtctgctgctgctactgcttctcctccaacctgttacctgtgcctacacaacaccgggccctccaagagcactaactactctaggggcccctcgggcccatacgatgcccggtacttacgcaccctctactactttatcctcaccctctactcagggtctgcaggaacaggctcgagcgctcatgagagacttccccctggtggatgggagcggccagcccatgtgccatgctaggccacgcaccggcatgccatgtgcatcgccctggagcagactcacctcatacgcagcctgcgtcccacccatcctatcctggtccctgtag

SEQ ID NO: 185468 - DNA, 1200 bp, synthetic construct
  misc_feature 1..1200: note = Description of Artificial Sequence: Synthetic coding sequence
  source 1..1200: mol_type = other DNA
atgcagcccagcggcctggagggccccggcaccttcggccggtggcctttgctgtctctgctcctgcttctccttttgctgcaaccggtaacctgcgcctataccacgccgggcccccccagggccttgttttggtcggcctacgtgccatgccagacccaagatcgagacgcccttcggctcactctagaacagattgacttgattcgtcggatgtgtgctagctatagcgagttggaactagtgacatcagccaaagccctgaacgatacacagaaacttgcatgtttgataggagtcgaaggtggacattcattggataattcactgtctattctacctactttttacatgctgggagttcgatacttgactcttactcacacctgcaacactccctgggctgagagctccgccaaaggagtacatagtttctacaacaatatctccggcctcaccgacttcggcgagaaggtggtcgccgagatgaaccgtctagggatgatggtggatttgtcacacgtgagcgatgccgtggcccggcgagctctcgaggtgtctcaggccccagtgatcttttcccatagtgccgcaagaggcgtctgtaactcagctagaaatgtgcccgatgacatccttcagctcctcaagaagaacggcggtgttgttatggtgtccctgtcaatgggggttatccagtgtaacccatctgctaacgtgtcaacagtggccgaccattttgaccatattaaagccgtcattggatccaagtttatagggataggaggcgattacgatggagcaggaaagttcccacagggactggaagacgtgtcgacatacccggtcctgattgaggaactgctgtctagaggctggtcagaggaggagttacagggagtcctcagagggaatttactgagggtctttcggcaagttgaaaaggtgcaagaggagaacaagtggcaatctcccttggaggataaatttcctgacgaacaacttagctcatcctgccactcagacctaagccggctgaggcagcgccagagtcttactagcggccaggagctcactgaaatccctattcactggacagctaagcttcctgcgaagtggtctgtatcggagtcttccccccatatggcccccgtgttagcggtcgtggcaacattccccgtgctcatcctgtggttgtag

SEQ ID NO: 185469 - DNA, 1461 bp, synthetic construct
  misc_feature 1..1461: note = Description of Artificial Sequence: Synthetic coding sequence
  source 1..1461: mol_type = other DNA
atgcagcccagcggcctggagggccccggcaccttcggccggtggcctctgttgagtcttttacttttactgcttctactacaacccgtgacttgtgcctatacaactcccggtcccccacgggccctgaccaccctgggagctcctagagcccatactatgcctgggacctatgcgcctagcacgactcttagctcacccagtacccagggtttgcaggagcaggcccgggctctcatgcgggattttccactggtcgatgggcataacgacctcccgctagtcctgagacaagtgtatcagaaaggtctccaagatgtgaatctgagaaatttttcctacggccaaaccagtctagatcggctccgagacgggctggtgggagcacagttctggtcagcttatgtaccatgccaaacacaggatagagatgcactgaggctgaccctcgagcagatcgatctgatacgaagaatgtgtgcgtcgtactcagaactggaactcgtcacatccgctaaggctctgaatgatacccagaagctggcctgtttaatcggggtcgaagggggacattccctcgataactctctgtctattttgccaacgttttatatgcttggtgtgaggtatttgacactaactcacacttgcaataccccttgggctgaatcatcagcaaagggggtccatagcttctacaacaacatcagcggattgaccgacttcggggagaaagtggtggctgagatgaatcgcctagggatgatggtcgatttgtcccatgtcagtgacgcggtggcacgtcgggcgttggaggtaagccaggcaccagtgattttctctcacagtgctgcacgaggcgtatgcaatagtgctcgcaacgttcccgacgacatcctgcaactgctaaagaaaaacggcggcgtcgtcatggtctccctctcgatgggcgtaatacagtgcaaccctagtgcaaatgtatctaccgtggcggatcactttgaccacattaaagcagtcattggcagcaaatttatcggcattggcggggactacgacggagcggggaaattcccccagggcctcgaagacgtctctacctatcccgtgctgattgaagagctcctgagccgaggatggagcgaggaggagctgcagggggttctccgcgggaatctcctgagagtgtttaggcaagtggagaaggttcaagaggaaaataagtggcagagccctctggaagacaaattcccagacgaacagctgagctccagttgccacagcgacctatcacggttacggcaacggcagagccttacaagcgggcaggaattgaccgaaatcccaatccactggacagctaaactgccagccaagtggtctgtgtcagagtcctcccctcatatggcccccgtgctagctgtggtggctactttccccgtcctaatcctttggctgtag

SEQ ID NO: 185470 - DNA, 1461 bp, synthetic construct
  misc_feature 1..1461: note = Description of Artificial Sequence: Synthetic coding sequence
  source 1..1461: mol_type = other DNA
atgcagcccagcggcctggagggccccggcaccttcggccggtggccactgctgtctctgctccttctcctactgctgctccagccagttacctgtgcatataccaccccagggcctccgagagcactcacaaccctcggggcccctcgtgctcacacaatgcctggcacttatgctcccagcaccacactctcttcaccctccacacaagggttgcaagagcaggctcgggccctcatgcgagattttccactcgtggatggccacaacgacttaccactcgttcttcggcaggtgtatcaaaagggattgcaggatgtgaacttgcggaacttttcatacggccagacatctctggaccgcctgcgcgacggcctcgtgggagcacagttctggagcgcctatgtgccatgccagacccaggatagagacgctttgcggctaactttggaacagattgatctgattcgccggatgtgcgcaagctatagcgaactggagctggtcacctctgctaaggccctgaacgacacacagaaactggcttgtctaattggcgtggaaggtggacatagcctcgacaattctttgtccatccttcccacattctacatgctgggtgtccggtatcttacattgactcatacatgcaacaccccatgggccgagagctcggccaagggagtgcattcattctataataacatcagtgggctgaccgattttggcgaaaaggtggtcgctgaaatgaaccgcctggggatgatggtcgacctgtctcacgtgtctgatgctgtagccaggcgagccctggaagtgagccaagctcctgttatttttagccacagcgcggctaggggcgtgtgcaattccgcacgcaatgtccctgacgacatcctgcagttgttaaagaaaaatggcggagtcgtcatggtgtctcttagcatgggagtgattcaatgtaacccatccgcaaacgtgagcacagtagcagaccatttcgatcatatcaaggcggtaatcgggagtaaattcatcggcatagggggcgactatgatggcgctgggaagttcccgcagggactggaagacgtgtccacctatcctgtgctgattgaggaactgctgagcagaggttggagcgaagaagagctccaaggggtgctgcggggcaatctgctcagagtgtttaggcaggtagagaaagtccaggaggagaacaagtggcagagccctttggaagacaaatttccagacgagcagctgtccagcagttgccattctgatctgtctaggttgcgacagcggcaatcgcttactagtggacaggagctcactgaaataccgatacattggactgccaagctcccagctaaatggagtgtgagcgaaagctccccccatatggcgcctgtactagcagtggtagctacgttcccagttttgattctatggctgtag

SEQ ID NO: 185471 - DNA, 1542 bp, synthetic construct
  misc_feature 1..1542: note = Description of Artificial Sequence: Synthetic coding sequence
  source 1..1542: mol_type = other DNA
atgatccggacccccctgagcgccagcgcccaccggctgctgctgcccggttcaagaggaaggccacctagaaatatgcagcctaccgggcgagagggaagtcgggccctctctagaaggtacctacgccgactgttgttacttctgctcctgctgctgttacgccagcctgtaacaagggcagaaactacacctggtgctccacgcgctttatctacccttggctcacccagcctcttcaccactcctggggtccccagtgcactgaccaccccaggcttgaccacacccggcacacccaagacactggatctgagggggagagcccaagctctgatgcgtagttttccactagtggacgggcacaacgaccttccccaggtgttgagacagcgatacaaaaatgtcctgcaggacgtgaatctgagaaacttctctcacgggcaaacatcgttggatcggttacgcgacgggcttgtcggcgcccagttctggtctgcctctgtgtcttgccagagtcaggatcagaccgctgtccgactagctctggaacagatagacctgatccaccgcatgtgcgctagttactctgaactagagcttgtcaccagtgctgaaggcctgaattcatctcagaagcttgcatgcctaattggcgtggagggcggtcacagcctggactccagtttatccgtcttgcgctctttttatgtgcttggggtgagatatttaacacttaccttcacatgtagcactccttgggctgaatcatctacgaaattccgacaccacatgtataccaatgtgagcggcctgacctccttcggagaaaaagtagtggaggagctcaataggctggggatgatgatagacctgtcttacgccagtgatacactgattaggagggtgcttgaggtgagccaggccccggtcatatttagtcacagcgcagctcgggcggtttgcgataacctgctgaatgtgcccgatgacatcttgcagctcctgaaaaagaacggcgggatcgtcatggtgaccttgagtatgggggtcctgcaatgtaatctccttgcgaacgtcagcaccgtcgccgatcattttgatcacatacgagccgtgatcggaagcgagtttattgggatcggcggcaactacgatggtacagggagattcccccaagggctggaggatgtgtctacttatccagttctgatcgaggagctcctgtcgcggtcttggagcgaggaggaactccaaggcgtcctgcgcggaaacctgctgagagtattcaggcaagttgagaaggtgcgcgaggaaagcagagcccagtcacccgttgaggctgaattcccctacggacagctgagcactagctgccactcacacttagttcctcagaacgggcaccaggctacccatctcgaagtaacaaaacagcctacaaatagggtgccttggagaagttctaacgcgtccccttatctggtccccggacttgtagccgccgctaccattccgacgttcacccaatggctgtgttag

SEQ ID NO: 185472 - DNA, 2370 bp, synthetic construct
  misc_feature 1..2370: note = Description of Artificial Sequence: Synthetic coding sequence
  source 1..2370: mol_type = other DNA
atgcggaaggtggagagccggggcgagggcggccgggaggagctggggtcgaacagtcccccgcagagaaattggaaaggaatagctatcgcattactcgtgatcttggtagtttgtagtctcatcaccatgtctgtcatacttttgacacctgacgaactcacaaacagctcagagacacgactttccctcgaagatctgtttaggaaggacttcgtcctacacgatccggaggcacgatggattaatgatacagacgtcgtatacaagtcggagaacggacatgtgatcaaactgaatatcgaaacgaacgctaccaccctgttgctggaaaacactacttttgtgacctttaaagcttcccgacacagtgtgtcaccagatttaaaatatgtgcttctcgcctacgacgtaaaacagatattccactacagctacacagcttcttacgtcatttacaacattcatacccgggaagtgtgggagctgaacccgcctgaagtcgaagattctgttctccaatacgccgcttggggtgtgcaaggtcagcagctgatctacatattcgaaaataatatctactatcagccagatatcaagagctcctcactccggctaacaagttcagggaaagaagaaatcatcttcaacggcatagcagactggctgtatgaggaagagttgctgcattcccacatcgctcactggtggtctcctgacggtgagagacttgcatttctgatgatcaatgattccctggtccccacaatggtgatcccccgattcactggagccctttatccaaaaggtaagcagtatccgtatccaaaagccggacaggtcaaccccacaatcaaactctatgtggttaatctgtatggaccaacccacactctcgagctcatgccaccagactcgtttaagtctagagaatactacataaccatggtcaaatgggtgagcaacaccaaaacagtggtccggtggttaaacagagcacagaacatcagtatactgactgtgtgtgaaacaacaacaggcgcctgttccaaaaagtatgagatgacttcagatacctggctttctcagcagaatgaggagccggtgttcagtcgggatgggagcaaattcttcatgaccgtgcctgtgaaacagggggggcgcggtgagtttcatcatgttgccatgtttctgattcagtccaaatctgaacagattacagtacgccatctcacgtctggcaactgggaagtgataaagatcttggcatatgacgagacgacacaaaaaatatatttcttatcaaccgagagctcaccccgcggacggcagttgtattctgcatcaactgaaggactgctgaatcgtcaatgcatatcatgtaatttcatgaaggaacagtgcacttactttgatgcatccttcagccccatgaaccagcactttctgctattctgtgaggggcctcgtgtgccagtggtctccctccatagtacagataaccccgccaaatacttcattctggagtccaactcaatgctgaaagaggctatcctgaagaagaaaataggcaaacctgaaatcaaaatcttgcacatcgacgattatgagctgcccctacagttgagtctgcctaaggacttcatggacaggaatcaatacgccctcttgcttatcatggacgaagagcccggcggacagcttgtgaccgacaagttccacattgattgggactccgtactgatcgatatggataatgtgatagtcgctaggtttgacggtaggggttctggtttccagggcttgaagatcctgcaggagattcaccgtcggctgggttccgtggaggtgaaagatcaaatcacggctgtcaaatttttgctcaagcttccttacatagatagtaaaaggctgtccatttttggcaaaggttacggcgggtacatcgccagtatgattctgaaatctgatgagaaattatttaagtgtggaagtgttgtggcacctatcacagaccttaaactctatgcatccgcttttagtgaacgttacctgggcatgccaagtaaggaagagagtacataccaggccgccagcgtcctgcacaatgttcacggcctgaaagaagaaaacatactgatcattcacggcaccgcggacaccaaagtacactttcaacatagcgcggaactaatcaagcatctcattaaagctggagttaattataccatgcaggtttatcccgatgagggacacaatgtctctgagaaatcaaaatatcatctgtatagcactatcttaaaattctttagtgattgtctaaaggaggagatttccgtgcttccacaggaacctgaagaagacgagtag

SEQ ID NO: 185473 - DNA, 2403 bp, synthetic construct
  misc_feature 1..2403: note = Description of Artificial Sequence: Synthetic coding sequence
  source 1..2403: mol_type = other DNA
atgaccgccgccaagcaggagccccagcccacccccggcgcccgggcctctcaggcacagccagctgaccaggaactgggcagcaattctccgccacagcgcaattggaagggaatcgccatcgccctcctggtcattctcgtggtttgcagcttgattaccatgtccgtcattctgttaacacccgatgagttaaccaactcttctgaaacccgcctgagcctcgaggacttgtttaggaaagattttgtcctgcacgacccagaagctagatggatcaacgataccgatgtggtgtacaagagcgaaaacgggcacgtgatcaaactgaatattgaaaccaacgcaaccacgctgctgctcgagaacaccacctttgtgacgttcaaggctagccggcactcggtgtctcctgacttaaagtacgtgctcctggcctatgacgtaaaacaaattttccattactcttacaccgccagctacgtgatatataatatacacactcgggaagtgtgggagcttaaccccccagaagtggaagacagcgtgctccagtacgctgcttggggggtgcagggacagcagctcatctacatcttcgagaacaatatatactatcagcctgacattaagagcagctcattgcgactgacatctagtgggaaagaggagatcatcttcaatgggattgccgattggctgtatgaggaggagctgctgcattcgcatattgctcactggtggagtccagacggggaaagattggcattcttaatgatcaatgacagcttggttcccaccatggtcatccctaggtttacaggtgccttgtaccctaaagggaagcagtacccctatccaaaagcggggcaggttaatcctacaataaagctatacgtggtcaatctttatggaccaacccataccctggaactaatgccccccgactcattcaaatcaagggagtactacattaccatggtaaagtgggtgagcaatactaaaaccgtcgtaagatggctgaaccgggcccagaatatctccattctgacagtgtgcgaaacgaccacaggcgcctgtagtaagaagtacgagatgaccagcgatacatggctctcccagcagaatgaggaacctgtcttttcacgggatggctctaagttcttcatgacagtacccgtgaagcagggcgggagaggcgagttccatcacgtagccatgtttcttatccaatctaagagcgaacagataaccgtgcggcatctgacatcaggaaactgggaggttattaaaattttagcctacgacgagaccacacaaaaaatatactttctttccaccgagagcagcccaagaggccgccagctttactctgcgtccaccgagggactcctgaaccgacagtgtatcagttgtaatttcatgaaggagcagtgtacatatttcgacgctagcttttctcctatgaaccaacactttctgctgttctgtgaaggcccaagggtgcccgtcgtgtccctgcacagtactgataatcccgccaagtattttatcttggagagtaactcgatgttaaaggaggccattcttaagaaaaagatcgggaagcctgaaattaagatactccatattgacgactatgagctgcccttgcagctgtctttacctaaggactttatggatcggaaccagtacgcactgttgctaattatggatgaggagccaggcgggcaacttgtgaccgacaagttccacatcgactgggattcggtgcttatcgatatggataacgtgatcgttgcacgcttcgatgggcgggggagtggatttcagggtctgaagatattacaggagatacaccggaggctaggaagcgtcgaagtgaaggatcagatcacagctgtgaagtttctgctgaaactaccttacattgatagtaagcggctgtctatttttgggaaaggatacggcggctacatagcgtccatgatcctgaagtctgatgaaaagctgtttaaatgcggttctgtggtggcacctatcactgacttgaagctctacgcctctgccttctctgagcggtacctaggcatgccatctaaagaagaatcaacttaccaggcggcctccgtgctccacaacgtacacgggttgaaggaagagaatattttgatcattcatggcaccgccgacactaaagttcacttccagcactctgctgaactcatcaaacacttgattaaggctggggttaactacacaatgcaggtgtacccagatgaaggccataatgtctcagagaagagtaagtaccacctttattcaacgatcctgaaatttttttcggactgcctcaaagaagagattagtgtgctccctcaggaacctgaagaggatgagtag

SEQ ID NO: 185474 - DNA, 2391 bp, synthetic construct
  misc_feature 1..2391: note = Description of Artificial Sequence: Synthetic coding sequence
  source 1..2391: mol_type = other DNA
atgaaccagaccgccagcgtgagccaccacatcaagtgccagccctccaagacaattaaggaactcggatcaaacagtccaccgcagagaaactggaaaggcatcgccattgcactgctggtgatcttggtggtttgttccttaattaccatgtctgttatcctgctgacgccagatgaactaaccaactccagtgagacacgattgagcttggaggatctcttccggaaagattttgtgctgcacgatcccgaggccaggtggatcaatgacacagatgtggtgtacaagtctgagaatggacatgttattaaactgaacatagagaccaatgctacaacgttgctcctggagaatacaaccttcgtgacattcaaggccagccgccacagtgtgtcccccgatcttaagtatgtgttactcgcttacgatgtgaagcagatcttccactatagctataccgcctcttatgtaatttataacatccatacaagggaggtttgggagctgaacccaccggaagtggaggattccgtgttacaatatgcggcctggggcgtacagggtcagcagctgatatatatcttcgaaaacaatatctattaccaaccagacataaaaagcagttctttgagactaacctcgtccggaaaagaggagattatcttcaatgggatagcagattggctttatgaagaggaacttttgcactctcatatcgcgcactggtggtcccccgatggcgaaaggttagcatttttgatgatcaacgactcgctggtgccgacaatggtgattccgcggttcaccggagcactgtatcccaagggaaaacagtacccttacccaaaagcgggacaggtgaatcctactatcaagctgtacgtggtgaatctctacggccctacacacacccttgagttgatgccaccagattcattcaagtctcgagagtattacattactatggtgaagtgggtatcaaatacgaaaacagtggtgaggtggctgaacagggctcagaacatatcgatccttacagtttgtgagaccactaccggggcctgtagtaaaaagtatgaaatgacaagtgacacttggctctcccagcagaacgaggaacccgtcttctccagggacggctcgaagttcttcatgaccgtgcccgtgaagcagggaggaaggggtgagttccatcatgtagcgatgtttctgatacagagcaaatccgaacagataaccgtgcgtcatctgacatcaggtaactgggaggtaatcaagatcttagcatatgacgagacaactcagaaaatatacttcctgagtacggaaagttctcctagagggcgccagctgtatagtgcttcaaccgaaggattgttgaatcgccagtgtatcagttgcaattttatgaaggaacagtgtacgtacttcgacgcgtcatttagccccatgaatcagcatttcctcttattttgtgagggcccccgcgttcccgtggttagtttgcactcgaccgataatcccgctaagtactttatcttagagagcaactccatgctgaaagaggccattcttaagaaaaagatcggaaagccggaaattaaaattctccatattgatgactacgaattgcctctgcagctttcactgccgaaggacttcatggaccgcaatcagtacgccttactgctcatcatggacgaggagcctggtggccagctggtcaccgataagtttcatatcgactgggattccgtgctgatagatatggacaatgtgattgttgctcgttttgatggacgaggctccggcttccaggggctcaaaatcctacaggagatccatcgccgcctcggtagcgtggaggttaaagatcagatcacggccgtgaaatttctgctgaaactaccttacatagactcgaaaagactaagtatcttcggcaagggatacggcggttatatcgcttccatgatcttaaagtccgacgagaagctgttcaagtgtggcagcgtagtcgctcctatcacggacctgaagctctatgcaagcgctttctctgagcgttacctggggatgccctccaaagaggagagcacgtatcaagccgcaagtgtgctacacaatgtccatggcttgaaggaggaaaatatactaattatccacggcactgccgacactaaggtccattttcaacactcagccgaacttattaaacacctcatcaaagctggggtgaactatacaatgcaagtctatcccgatgagggacataatgtatctgagaagagcaaatatcacctctattccactattctgaagtttttctctgattgtctgaaggaagagatatctgtcctgccccaagagcctgaggaggatgaatag

SEQ ID NO: 185475 - DNA, 294 bp, synthetic construct
  misc_feature 1..294: note = Description of Artificial Sequence: Synthetic coding sequence
  source 1..294: mol_type = other DNA
atgagcgtgatcctgctgacccccgacgagctgaccaacagcagcgaaacaaggctgagcctggaagacctgttccgtaaggacttcgtgctgcacgaccccgaggctagatggatcaacgacacggacgtggtgtacaaatctgagaatggtcacgtcataaaactcaatatcgagactaatgccacaacgttgttgttggagaacaccacctttgtcacctttaaagcctccagacacagcgttagtcctgatctcaaatatgttctccttgcttacgacgttaaacaatag

SEQ ID NO: 185476 - DNA, 1803 bp, synthetic construct
  misc_feature 1..1803: note = Description of Artificial Sequence: Synthetic coding sequence
  source 1..1803: mol_type = other DNA
ctgagcatcctgatcctgaccagcaacgagctgaccaacagcagcgagaccaggctctctctggaggacctgttcaggaaagactttgtgttgcacgatcccgaagcacggtggatcaacgacacagacgtggtttacaaaagcgaaaacgggcatgtaatcaaacttaatatcgagaccaacgcaactacactgctgctggaaaatactacgtttgttaccttcaaagcttctagacactcagtcagccctgatctgaagtatgttctgctcgcatatgatgtgaaacagatatttcactattcttatactgcatcatacgttatctacaatattcatacgagggaggtctgggaacttaatccacctgaagtggaagactctgtactgcaatacgcagcttggggggtacagggtcagcaacttatttacatctttgaaaacaatatctattatcagcccgacataaaaagctcatctcttcggctgacttctagtgggaaggaagagatcattttcaacggcatcgcagactggctgtacgaggaagaactccttcacagccacattgcccattggtggtctccagacggggaacggctggcgttcctcatgatcaatgacagcctggttccaactatggtcatccctcggtttaccggggccctgtatccgaaaggcaagcagtacccttacccaaaggccggtcaagtgaaccctaccatcaaactctatgttgtgaacttatatgggccgacccatacgctggagttaatgcctccggactcctttaaaagcagagagtactacatcacaatggttaaatgggtgtccaataccaaaaccgtggtgagatggcttaatcgggcacagaacataagcattctgacagtgtgcgaaactactaccggcgcttgcagcaaaaaatacgaaatgacttctgacacctggttgtcccagcagaatgaagaaccagtgtttagcagagacggttcaaaatttttcatgacagtgccggtcaagcagggtggacggggtgaattccaccacgtagcaatgtttttgatacagtctaagagtgagcagattacagtgcgtcatctgacctctgggaactgggaagtgatcaagatattagcttatgatgaaacaacccaaaagatttacttcctgtcaacagagtcatcaccacgcggacggcagctgtactcagcatctacagaagggctattgaaccggcagtgcatctcgtgcaattttatgaaagaacagtgcacatacttcgatgctagcttctcgccaatgaaccagcattttctgctgttttgcgagggtcctagagtgccagtggtatcactgcattctactgataatccagctaagtactttatactagaaagcaactcaatgctgaaagaggctatcctgaaaaaaaaaatcggcaagccagaaatcaagattctgcatattgatgattacgagctgcccctgcaactctcacttcctaaggatttcatggataggaaccagtacgcgctcttgttaattatggacgaagagcccgggggacagctggtcactgacaaattccatattgattgggatagcgtcctcatcgatatggacaacgtcatcgtcgcaaggttcgatggcaggggctctggatttcagggtctaaaaatcctccaggaaatccaccggcggctagggtctgtcgaggtcaaggatcagattacagccgtgaaatttctgctgaaactgccttatatagattctaagcgtctgtcaatttttggcaaatag

SEQ ID NO: 185477 - DNA, 2241 bp, synthetic construct
  misc_feature 1..2241: note = Description of Artificial Sequence: Synthetic coding sequence
  source 1..2241: mol_type = other DNA
atgagcgtgatcctgctgacccccgacgagctgaccaacagcagcgagactagattatctctagaggatctattcaggaaagattttgtgttacacgatcccgaagccaggtggatcaacgacaccgatgttgtatacaaatccgaaaatgggcacgtgattaagctgaatatcgaaacaaacgctacgaccttattattggagaatacgacttttgtaactttcaaggcatcacgacactctgtgtcaccagacctgaagtatgtgttgctggcctacgatgttaagcaaatttttcattactcatatactgcgagttacgtgatttataatatacacactagggaggtgtgggaactcaatcctcctgaagttgaggactctgtattacagtatgctgcttggggagtccagggccagcagctgatttatatcttcgagaataatatttattatcaacctgatatcaagtcaagctcattgcggctcactagctccggaaaggaggagatcatctttaatggcatcgcagactggctgtacgaagaggaactcctccactcccatatagcccattggtggtcacctgacggagagagattggccttcttaatgatcaacgattctctggttccaaccatggtgattccgaggtttaccggggccttatatcctaagggcaaacagtatccttatcccaaagccggccaggttaatcctacaatcaaactgtatgtcgttaacctgtatggccccacccacaccctcgaactgatgccacctgacagcttcaagtcccgcgagtactatattacaatggtcaagtgggtaagtaacacgaagactgtcgttagatggctaaatcgcgcccagaacattagcatactaaccgtttgcgagactactactggagcatgctccaagaagtatgagatgaccagtgacacttggttgtctcagcaaaatgaggagccagttttctcgcgggacgggagcaaattttttatgacagtgcctgtgaagcagggcggcaggggcgaattccaccatgtggccatgttccttattcagtccaagtcagaacagattaccgtgaggcatctgaccagcgggaactgggaggtaatcaagattctcgcctatgatgaaacaactcaaaaaatttacttcctgtctaccgaatcatcaccacgaggccggcagctgtattccgcctctacagaaggccttcttaatcggcagtgcatttcatgcaattttatgaaagagcagtgcacctatttcgacgcctcttttagcccaatgaatcagcacttcctgctattttgcgaggggcccagagtccccgtggtgagtctccattctacagataaccccgctaagtacttcatactagaatctaattcgatgctcaaagaagctattctgaagaaaaagattggaaagcctgaaataaagattttacacatcgacgactacgaactgcccctgcaactgtctctgcctaaagattttatggatagaaatcagtacgctcttttacttataatggatgaagagccggggggccagctggttaccgacaagttccatattgactgggactctgttctgatcgacatggataacgtgatcgtggctcgattcgatggccggggaagtggattccagggtctgaaaattctgcaggaaatacaccggaggttggggtccgtagaagttaaagaccaaatcaccgcggttaaattcttgttgaaactgccatacatagactcaaagcgcttgtctattttcgggaagggttatggaggttacatcgcctccatgatcttgaaatccgacgaaaagctgttcaagtgcggctccgttgtggccccaattacagatcttaaactatatgcttcagccttttccgagaggtatctgggaatgccaagcaaggaggaaagcacataccaagccgcctcggtgctgcataacgtgcatggcctgaaagaggagaacattttgatcattcacgggactgctgacacaaaggtccacttccagcattccgccgagcttatcaagcacctcataaaggccggcgtgaactacactatgcaggtgtaccccgatgagggtcataacgtctccgaaaaatcaaagtaccatttgtattctacaatactcaagttcttcagtgactgcctgaaggaggaaatttccgtgctgccgcaagaacccgaagaagacgagtag

SEQ ID NO: 185478 - DNA, 954 bp, synthetic construct
  misc_feature 1..954: note = Description of Artificial Sequence: Synthetic coding sequence
  source 1..954: mol_type = other DNA
atggccgacacccagtacatcctgcccaacgacatcggcgtgagcagcttggattgcagggaagctttccggctgctcagcccaacagagcggctctatgcctaccatctgtctcgcgctgcatggtacggtgggttagccgtcctcctccaaacatcgcccgaggcaccctacatttacgccctattatctcgcctcttcagggcccaggacccagaccagttaagacagcatgctttggcagaagggctcacagaagaagagtaccaggccttcttggtgtatgcggcgggggtttattcaaacatgggcaactacaagagcttcggagatacaaagtttgtgcccaaccttccaaaagaaaagctggagagggtgattctggggtcagaggcagcacaacagcatccagaggaggtccgtgggttatggcaaacctgtggggaactcatgttctctctggagcccagactcagacatctcggactgggaaaggaaggaatcactacgtatttctctgggaattgcaccatggaagacgctcgcgtgcgactcgatcgtagcaagatacgttcagtgggcaagcccgccttggaaagatttttaaggagactgcaggtcctaaagagcactggggatgtggccggaggccgtgccctgtacgaagggtacgccaccgttacagacgctcctccagagtgtttcctcacacttagagacacagtcctgctccggaaggaatccagaaaactcatagtccagcccaacaccaggctcgagggctccgacgtgcagctgctggaatacgaagcttccgccgccggtctcattcggtctttcagtgaaagattccccgaagatgggccggagctggaagaaatcctgacacagttagctactgccgacgccagattctggaagggaccgtccgaagctccatctggacaggcttag

SEQ ID NO: 185479 - DNA, 2214 bp, synthetic construct
  misc_feature 1..2214: note = Description of Artificial Sequence: Synthetic coding sequence
  source 1..2214: mol_type = other DNA
atggccgacacccagtacatcctgcccaacgacatcggcgtgagctctctggactgccgggaggcctttcgtctgcttagtcctacggagagactgtatgcttaccacttgagcagagccgcgtggtatggcggtcttgctgtgttactgcagacgtcccctgaggcaccctatatttatgcccttctgtctcgcctgtttagagcccaagaccccgatcagctgcgccagcacgctctggctgagggacttaccgaggaggagtaccaggccttcttagtttatgctgccggggtctattccaacatggggaattataagtcattcggagacactaaatttgtgcccaacctacccaaggagaaactggaacgggttatcttagggagtgaggcggcccagcaacatcctgaggaggtccgcggattgtggcagacttgtggcgagcttatgttcagcttggagccacggctgaggcacttaggtctgggcaaggaaggtatcactacatacttttccggaaattgtacaatggaagatgcaaaacttgcccaagactttctggatagccagaacctctctgcttacaataccaggctttttaaggaggtggatggcgagggtaaaccttactacgaagtgcgactcgccagtgtgctgggcagcgagccctcgctcgactccgaggttacctcaaaactgaaatcctatgaatttaggggctctccttttcaggtgacgcggggggattacgcccctatactccagaaggttgtcgaacagcttgaaaaggccaaagcctatgccgccaattcccaccagggccagatgctcgcacaatacatcgagtcattcactcagggttcaatagaggcacacaagcgcggatccagattctggatacaggacaaagggcctattgtagagtcatatatcgggttcattgaatcctacagagacccgtttggctcccggggagagtttgagggattcgtcgctgtggtcaataaggctatgtctgctaaattcgaacgtctggtagcatctgccgagcaactgctaaaggagctgccctggcctccgaccttcgaaaaggacaagttcctcaccccagactttacatctttagatgtactcacgttcgccggctccggaatacctgccggtatcaacataccaaactatgatgatctgagacagacagaagggttcaaaaatgtgagcttggggaacgtcctcgccgtggcgtatgcaacccagcgcgagaagttaacattccttgaagaagacgataaagatctgtacatcctttggaagggaccgagttttgacgttcaggtgggcctccacgagctgttaggccacggttcggggaagctcttcgttcaggacgagaagggagcctttaactttgaccaggagactgtgatcaatccagaaaccggtgaacagatccagagttggtatcgctcaggcgagacctgggacagcaaattcagtaccatcgcatcttcatacgaggaatgtagagcagaaagcgttggcctttatttgtgcctacatcctcaggtgttggaaatatttggcttcgaaggagccgatgcagaagatgtcatttacgtgaattggttaaacatggtcagagccgggctgttggctttggaattctacacccccgaagcatttaattggcgccaggcacatatgcaagcacggtttgtgattcttcgagttctgttggaggccggtgagggtctcgtcacaattacccccactacagggtccgatggaagacccgacgcacgggtgagactggaccggtccaagattcgctctgtcggaaaaccagccttggaacgcttcctgcggcggctccaggtactcaaaagcactggggatgttgccggaggcagagcactctacgagggatacgcaacagtgacggatgcccctccagagtgcttccttacacttcgggatacagttctactgaggaaagaaagtcgaaaactgatcgtgcagcccaacacccgacttgaggggagcgatgtacagctgctggaatatgaggcgtccgcagcagggttaatacggtcatttagcgaacggttccctgaggacggaccggaacttgaggaaatattgacccagctggcgaccgccgacgcccgcttctggaaggggccaagtgaggccccgagcggacaggcctag

SEQ ID NO: 185480 - DNA, 2214 bp, synthetic construct
  misc_feature 1..2214: note = Description of Artificial Sequence: Synthetic coding sequence
  source 1..2214: mol_type = other DNA
atggccgacacccagtacatcctgcccaacgacatcggcgtgagctcactggattgtagggaggcatttagactgctgtctcctacagaaagactgtatgcatatcatctgtcgcgcgccgcctggtacggcggcctcgcagtgctgttacagacaagtcctgaggccccatatatttatgcccttttaagccgcctgtttagagcacaagaccccgaccagctcagacagcacgcccttgctgagggattgaccgaagaagagtatcaggcattcttggtttacgcggcgggggtttattctaatatggggaactataaaagtttcggcgacactaagtttgtacccaacctgcccaaggagaagctagagcgagtgattctcggatcagaagccgcgcagcagcatccggaagaggttcgggggctgtggcaaacgtgcggcgagctcatgttcagcctggagcccaggttacggcacctcgggctcggaaaggagggaataaccacttatttttcagggaactgcactatggaagacgctaaactggcccaggacttcttagattcccaaaacctgtccgcatacaatactaggctgtttaaggaagtagacggggagggtaaaccctattatgaagtgagattggcgtctgtgctgggatccgaaccttccctggactctgaggtgaccagcaagctcaaaagctatgagttccggggtagcccttttcaagtcacacgtggggactacgcccccattctgcaaaaggtagtggaacagctggagaaggcgaaggcctacgcggcgaatagtcatcagggacagatgttagcccagtatatcgagagttttactcaggggtccatcgaggcacataagcgaggaagtcgcttttggatacaggataagggacctatcgttgaaagctacattgggtttatcgaatcttatcgggaccctttcggcagcagaggcgagttcgagggtttcgtcgcagtggttaataaggcgatgagcgctaaatttgaacgtctggtcgccagtgccgagcagctgctaaaggagctgccatggccgcccacctttgagaaggacaagtttttgactccggacttcacttccctggacgtgttgacattcgccggcagtgggatcccagccggtattaatattcccaactacgatgacttacgccaaactgaaggctttaagaatgtgtcgctcggaaacgtgctagctgtcgcgtacgcaacgcagcgcgagaaacttacctttttagaagaggatgataaagatctgtacattctatggaagggaccctcatttgatgtccaggtggggctgcatgaactgttgggccatggatccggaaagctttttgtgcaggatgagaaaggcgcattcaacttcgatcaggagactgtcattaaccccgagacgggagagcagattcagagctggtaccggagtggcgaaacctgggatagtaagttctccacaattgccagttcctacgaggaatgtagggctgagagcgtgggtctatacctctgtctccaccctcaggtcttagaaatcttcggcttcgagggagctgatgcagaggacgtcatctatgtgaattggctcaatatggtgcgggccggactgctcgccttggagttttacacacctgaggcctttaattggagacaggctcacatgcaggcccgtttcgtgatcctgcgtgtgctgctggaagctggcgaaggtctggtgactatcacccccactaccggatcggatggaaggccagacgccagggtacgtctcgataggagcaagatccgttccgtgggaaagccggctcttgaacggtttctgcggcgactgcaggtcctgaaatccaccggcgacgttgccgggggccgagctttatatgagggctatgctacagtaaccgatgccccacccgagtgcttcctcacccttcgagatactgtgcttcttaggaaggaatctcgcaaattaattgtacagcccaatactcgtctggaaggatccgacgttcagttacttgaatacgaagcaagtgcagccggcctcattcggagcttctcagagcggtttccagaagacggccccgagctggaagaaatcctgacacagctagccaccgctgacgctcgcttctggaagggcccgagtgaagcaccttctggccaggcttag

SEQ ID NO: 185481 - DNA, 273 bp, synthetic construct
  misc_feature 1..273: note = Description of Artificial Sequence: Synthetic coding sequence
  source 1..273: mol_type = other DNA
atggccgacacccagtacatcctgcccaacgacatcggcgtgagctcccttgattgccgggaggcatttcgattgctgtctccaacggaacggctgtatgcctaccatctgtccagggccgcctggtatggtggactcgccgtacttttacagaccagcccagaggcaccatacatatatgccttgctgtcgcgcctgttccgtgctcaggaccctgatcaactgcgccaacacgccctggccgaaggcctcactgaggaagaataccagtag

SEQ ID NO: 185482 - DNA, 606 bp, synthetic construct
  misc_feature 1..606: note = Description of Artificial Sequence: Synthetic coding sequence
  source 1..606: mol_type = other DNA
atggccgacacccagtacatcctgcccaacgacatcggcgtgagctcactggactgtcgcgaggccttcaggctgctctctcccacagagaggctatacgcttatcacctctctcgggccgcgtggtacgggggcttggctgtacttctgcagacctcccccgaggccccatatatctacgccctcctgagcagactttttagagctcaggatcctgatcagctgcgccagcatgctctggcggaggggctcaccgaagaggaataccaggcttttctggtctacgctgcgggtgtctatagtaacatggggaattataaatccttcggagataccaagttcgtaccaaacctgcctaaagaaaaacttgaacgcgttattctggggagcgaggccgctcagcagcaccccgaagaggtgagaggcctttggcagacttgcggcgagctgatgttcagcctcgagccccgcctgcgacacctgggactgggcaaagaaggaattactacgtatttcagcggcaattgcaccatggaagacgccaagttggcccaggattttctggattcacaaaatctgtccgcttataacacgcgcctgttttag

SEQ ID NO: 185483 - DNA, 2274 bp, synthetic construct
  misc_feature 1..2274: note = Description of Artificial Sequence: Synthetic coding sequence
  source 1..2274: mol_type = other DNA
atgggcgagcccgaggccggcagcgagttcgccaacggcgccgccgcagccgccggacccatggccgatactcagtatattctgcctaatgatatcggggtgtcatcgctggattgccgggaagcttttcggctgctcagccctaccgaacggctttatgcttatcatctgtcccgcgccgcatggtacgggggccttgcagttctcctgcagacctctcccgaggccccctatatctatgccttgttaagcagactctttagggctcaggacccagaccagctgcggcagcatgctttggccgagggcctgacagaagaagagtatcaggccttcttagtctacgcggccggagtgtattctaatatggggaactataaatcttttggagacaccaaatttgtcccaaacttgcctaaggaaaaactggaacgcgtaatcctgggttcagaggcagcccaacagcatcctgaggaagtccgaggactgtggcagacctgtggcgaactgatgttcagtctagagcccagactgcgacacttgggcctcgggaaggagggtatcactacttactttagcggtaactgtactatggaggatgcaaagctggcgcaagacttcctggactctcagaatttgagcgcctataacactagactctttaaggaggtggatggagaggggaagccttattacgaggttagacttgccagtgttctgggaagcgagcctagcttagatagcgaggtaacctcaaaactcaagagctatgagttccgagggtcaccgtttcaagtaactaggggcgactatgcgcccatcctgcaaaaagtcgttgaacaattagagaaggccaaggcctacgccgcaaactcacaccaaggacagatgctagcccagtacatcgagtcttttacacagggatctatagaagcccacaaaaggggaagtcggttttggattcaggacaagggccctatcgtggagagctacatcggctttattgagagttacagggatccctttgggtccaggggcgagttcgaggggtttgtggccgtcgtgaataaggctatgagcgcaaagttcgagcgtctggtggctagtgcagagcagctgctcaaagaactcccttggcctccgaccttcgaaaaggataaattcctgactccggacttcacctcacttgacgttctgacatttgcaggttccggaatccccgctggcattaacatacctaattacgacgacctgaggcagactgaaggcttcaaaaatgtttctttaggaaatgtgctggctgtcgcttacgccactcagagagaaaaacttactttcctcgaggaagacgataaggatctgtatattctgtggaagggcccttcctttgatgttcaagtcggcctgcatgaactgctgggccatggttcgggaaaactatttgtgcaggatgaaaaaggcgcatttaatttcgatcaggagaccgttatcaaccccgagaccggcgagcaaatccagtcctggtatcgcagcggcgagacatgggattcgaagttttctactatcgcgtcttcatacgaagaatgtagagccgagtcggttggactttacctttgcctgcacccacaggttcttgaaattttcggttttgaaggagcagacgctgaggatgtcatctacgtaaattggctcaatatggtaagagccggcctgctggctctggagttctacacaccagaagcatttaactggcgacaggctcacatgcaggctaggttcgtgattctgagggtcctgttggaggcaggcgaagggttggtgactattaccccaacgaccggctccgacgggaggcctgacgcacgggtccgcctggatcgcagtaagattcgaagtgtcggcaaaccggcgctggaacgtttcctgcgaagactgcaggtcctgaagtccacaggcgatgttgctggtggcagggctctatatgaaggctacgcaacagtcacagacgccccccccgagtgcttccttacccttcgcgacacggtgctcctgcgaaaagagtcaaggaagctgatcgttcaacctaacacgcgccttgagggcagcgacgtgcagctcctggaatacgaggcgagcgctgctgggttgattagatccttttcggaacggttcccagaggatgggcctgagttggaagaaatcctgacacagcttgcaactgcggacgctcggttctggaagggtcctagcgaggcccctagtggtcaggcttag

SEQ ID NO: 185484 - DNA, 2271 bp, synthetic construct
  misc_feature 1..2271: note = Description of Artificial Sequence: Synthetic coding sequence
  source 1..2271: mol_type = other DNA
atgggcgagcccgaggccggcagcgagttcgccaacggcgccgccgcggcaggccctatggccgatactcagtatatcttgcctaatgacatcggtgttagctctttggactgtcgggaggcctttaggctcctctcaccaaccgagcggctgtacgcctaccacctttcccgcgcagcatggtatgggggcctggccgtgttgctacaaacctcacctgaagctccatatatttacgctcttctgtcacggttgtttcgcgcccaggaccccgatcagcttcgacaacacgccctggcagaagggctcaccgaagaagagtatcaggcattcctggtctacgcagctggagtctactccaacatggggaattacaaatccttcggcgacaccaaattcgtccccaatctgcccaaagagaaactcgaaagggtcatccttgggtccgaagcagcccagcagcacccagaggaggtgagagggctgtggcagacatgcggggaactaatgttcagccttgaaccccgtctgcgccatctggggctgggtaaggaaggtattactacctatttttccgggaattgtactatggaggacgccaagctcgcacaagatttcctggactcccagaatttgtcagcgtacaatacaaggctgttcaaggaggtcgacggcgaaggcaaaccttactacgaagttcgtctagcttccgtcttggggtccgaaccaagcttggattctgaagtgacctccaagctgaaatcttatgagtttcggggctctccgtttcaagtaactcggggcgattatgccccaattctccagaaggtggtggagcaattagagaaagctaaagcttatgctgcgaactcccaccaaggacagatgctggctcagtatattgaaagctttactcagggctccatcgaggcacataagaggggatctagattttggattcaggataaggggccaattgtggagtcgtacataggattcatcgaaagttatagagaccccttcggcagtaggggggaatttgagggtttcgtcgcggtggtgaataaagcaatgtctgctaaattcgagcgcctggtggcttcggctgagcagctgctgaaggagcttccctggccccccaccttcgagaaggataagtttttaacaccagattttacaagcttagacgtgcttacattcgcagggtccggtatacccgcaggcatcaatataccgaactacgatgacctcagacagacagagggatttaagaatgtgtccctcggcaacgtcctagctgtggcctacgccacgcagagagagaaactaacatttctcgaagaagacgacaaagacctgtatatcctctggaagggaccaagctttgatgtacaggtaggcctgcatgagctactgggacatggtagtggaaaactttttgtgcaagatgaaaaaggcgcgtttaacttcgaccaggaaaccgtcatcaacccggagacaggtgaacaaatccaaagttggtaccgttctggagaaacttgggatagcaagttctccaccatcgcaagttcatatgaagagtgtcgggcggagagtgttggattgtatctgtgcctacatcctcaggttctggaaatatttggcttcgaaggcgccgacgccgaggatgtcatatacgtcaattggctgaatatggtccgtgccggactcttagcattagagttctatacgcccgaagctttcaattggcgccaggcgcatatgcaagcccgtttcgtgattctacgtgttctgctggaggctggcgaaggactggtgacaataaccccaactaccgggagcgacggacgtcccgatgcacgggtgcgccttgacaggagcaaaatcaggtctgtggggaagcctgcattggagcgctttctacggagattgcaagtgctgaagagtactggcgacgtggctggtggcagagccctttacgaaggttacgccaccgtgactgacgccccccctgaatgctttctgacactgcgtgatactgtgttgctgagaaaagaaagccgaaaactgatcgtgcagcccaacactcgcctagaggggtctgacgtgcaactcctagaatacgaggctagcgcagcgggtctgatccggagtttctcagaaagatttcccgaagacgggcccgaactggaggaaatcctcacacaactcgctactgctgacgcaaggttttggaaaggcccttcagaggccccctctggacaagcgtag

SEQ ID NO: 185485 - DNA, 2214 bp, synthetic construct
  misc_feature 1..2214: note = Description of Artificial Sequence: Synthetic coding sequence
  source 1..2214: mol_type = other DNA
atggccgacacccagtacatcctgcccaacgacatcggcgtgagcagcctggactgccgcgaagcatttcgcttgttgtccccaacagagcgcctgtatgcctaccatctgagtcgagcagcgtggtatggcggtctggcggtgctgctccaaacctcccctgaagctccctatatctatgccttgctcagcagactgttccgcgctcaggacccagatcagcttcgtcaacacgctctggccgaaggcctgaccgaggaagagtatcaggcctttctggtctacgcagccggagtgtatagcaacatggggaattacaaatccttcggcgacacaaaatttgtgcctaatctgccgaaagaaaagcttgagcgggtgatactgggaagtgaagctgcacagcaacacccagaagaagtccggggcttgtggcagacctgcggagaacttatgttctccctggagccaagactgaggcacttgggccttggtaaagaaggtattacaacttatttcagtgggaactgcaccatggaggacgctaagttggctcaagacttcttagattctcaaaatctttcagcctacaacaccaggctcttcaaggaggtcgacggcgaagggaagccgtattacgaggtgagactcgcgtcagtactcgggtccgagccttcgttagactctgaggtaacatcgaaactgaagtcatatgagttcagagggtcaccgtttcaggtgacgcggggagactatgcccccatactgcaaaaagtggtagagcagttagagaaggccaaggcttatgcagccaattcgcatcaggggcaaatgcttgcccagtatatcgagtctttcacccaggggtcaatagaggcacacaaacgaggctcaagattttggatccaggataagggtccaatagtggagtcctatattggatttatcgagtcgtatcgcgatccatttggttctcgaggagagtttgaggggttcgttgctgtagtcaacaaggctatgtctgccaagtttgaaagactagtggcttcagctgaacagctcttaaaggaactgccttggccccctacgttcgagaaagacaaatttttgacaccggactttacatccttagacgtactgacattcgcgggatcggggatccccgctgggattaatatccccaattacgatgatctgagacagactgaaggcttcaaaaatgtgagcctagggaacgttttggccgttgcatacgcaacccagcgagaaaagctcacgtttttggaggaagacgacaaagacttgtacattctgtggaaagggccctccttcgatgtccaggtgggattacatgaactactgggacatggtagcgggaagttgttcgtccaggatgaaaaaggggcttttaatttcgatcaggagactgtgattaaccccgaaactggtgagcagattcagagctggtaccggtccggcgagacctgggacagcaaattttcaacgatagcttcctcttacgaagagtgtagggctgagagcgtcgggctatatctgtgtttgcatccacaggtcctcgagatattcggcttcgaaggggctgatgcagaagatgtgatctatgtgaactggttaaacatggtccgggcagggctactggctctcgaattctacacccccgaagcatttaactggaggcaggctcatatgcaggctcggttcgtcattttgagagtgctgctggaggccggtgagggtttagttaccatcacacctacaaccgggtctgatgggcgaccggacgcaagagttcggctggatcggagcaagattagatccgtgggtaagccagcgctggagagatttctccgaagattacaagtgctgaagtccaccggcgatgtagctgggggtcgggccctgtatgagggctatgccacagtgacagacgcaccccctgagtgcttcttaacgctgcgcgatactgtgttgctgcgcaaagagtcccgtaaactcatcgtccagcctaacacaagactggagggcagtgacgtgcagctccttgagtatgaagcctccgccgcgggcctgatcagaagctttagtgaacgattcccagaagacggccctgagcttgaggagattctgacccagctcgcaacagcggacgcccggttctggaaaggcccatccgaagcaccaagcggacaggcatag

SEQ ID NO: 185486 - DNA, 1908 bp, synthetic construct
  misc_feature 1..1908: note = Description of Artificial Sequence: Synthetic coding sequence
  source 1..1908: mol_type = other DNA
atgggcaactacaagagcttcggcgacaccaagttcgtgcccaacctgccaaaagagaaattggaacgcgtgatactgggctctgaagccgcccagcagcatcccgaagaggtgcgggggctgtggcagacatgcggcgaactgatgttctctttagagccaaggcttaggcaccttggcttgggcaaggaggggattactacatattttagcggaaattgcaccatggaggatgccaagcttgcacaggacttcctggatagccagaatctatcggcctataatactcggctgtttaaggaagtcgatggggaagggaagccatactatgaagtgcgcctcgcgtcagtgctggggagtgagccctcccttgacagcgaagttacaagcaaactcaagagctacgagttcagaggatcaccctttcaggtcacccggggcgactacgcgcccattctgcagaaggtagtggagcagctcgaaaaggccaaggcatatgccgctaacagtcaccagggacagatgctcgcccagtatattgagtctttcacgcagggaagcatcgaagcacacaaacgaggatcaagattctggattcaggacaagggtcctattgtggaaagctacattggcttcatcgagagttatcgagaccccttcggtagcaggggagagtttgaagggttcgtggcggtggtaaacaaagcaatgtccgcaaaatttgagcgactggtggcttctgctgaacaactgctcaaagaactaccatggccacctacctttgagaaggacaaattcctcactccggatttcactagcctcgacgttttgacgttcgctggctcaggcatcccggcaggaattaacatccccaactatgacgacctaaggcagaccgaggggttcaaaaatgtgtctctaggcaatgtgctggcagtggcctatgctacacagagagaaaaactgacttttttggaggaggacgacaaagacctatacatactatggaagggtccttcattcgacgttcaggtggggttgcatgagcttttaggacacggctctggcaaactatttgtccaggatgaaaagggggctttcaacttcgatcaggaaacagtgattaacccagagaccggtgagcagatccagagctggtaccgcagtggcgagacatgggactccaagttttccacgattgccagctcctatgaggaatgcagagctgaatccgtaggtctttatctctgtctgcaccctcaagtgctggaaatatttgggttcgagggggcggatgcagaggacgttatctacgtgaactggctgaacatggtgagggcggggctattggcactggaattctacacacctgaggccttcaactggcggcaggctcacatgcaggctcgatttgttatactgcgagtgctgctcgaggccggtgaggggctggtgactattacccccacaacagggagtgatggtcgcccagacgcccgcgtgaggttggatagatcaaaaatcaggagtgtcgggaagccggccctggagagattcttacgccggctgcaggttctgaaatccacgggggatgtcgcaggagggagggccctgtacgagggctatgcaaccgtgactgatgctccccctgagtgtttccttacgctgagagacaccgtactgctgaggaaggagtcaagaaaacttatcgttcagccaaataccagacttgagggtagcgatgtccagctattagaatacgaagctagtgccgcaggtctcatacggtccttcagcgaaaggttcccagaagacggccccgagctagaggaaatcttgacacagctggcaacagcagacgcgagattttggaaaggcccatcagaagccccttcaggacaggcctag

SEQ ID NO: 185487 - DNA, 2412 bp, synthetic construct
  misc_feature 1..2412: note = Description of Artificial Sequence: Synthetic coding sequence
  source 1..2412: mol_type = other DNA
atgaccaccgccaaggagcccagcgccagcggcaagagcgtgcagcaacaagaacaagagctggtgggctcaaatccaccacagcgcaactggaaagggattgccatagccctactggtgattctcgtcatctgcagcctgattgttacttccgtcatcttgctaacgcctgccgaggacaatagcctaagccaaaaaaagaaggtcacggtggaggacttgttttctgaggatttcaaaattcacgatccagaagcaaaatggatctcagatacagaatttatctatcgagaacaaaaagggaccgtgaggctgtggaacgttgagacgaacaccagtactgtactaatcgaaggcaagaaaattgaaagtctccgggctatccgctacgaaatcagccctgacagagagtatgctttgtttagctacaacgtcgagccgatttaccagcactcttacaccggctactatgtcctcagcaagataccgcatggagatccacagagtcttgaccctccagaggtgagtaacgcaaagctgcagtacgctggctggggcccaaaaggacagcagcttatttttatattcgaaaacaacatctattactgtgcccatgtgggaaaacaggccattcgtgtcgttagtactggcaaggaaggagtaatttacaacggcttgagcgactggttatacgaggaggaaattctgaaaacccatatcgcccactggtggtcccccgacgggacccggcttgcttatgctgcaattaacgattctcgcgttcctatcatggagctgcctacctatacgggatcaatctacccaacagtcaagccgtatcactaccctaaggcgggcagcgagaatccctccatttcactgcatgtaattgggctgaacggtccaacccacgatctagagatgatgccccctgatgatcccaggatgcgagagtattacattacaatggtaaagtgggcgacttccacaaaagtggcagtcacgtggcttaaccgggcacaaaatgttagcatactgaccctgtgtgacgccacaactggagtttgtactaagaaacacgaagacgaaagcgaggcgtggcttcacagacaaaacgaagaaccagtcttttccaaggacgggagaaaatttttcttcataagggccatccctcaaggaggcagagggaaattctaccacatcaccgtcagttcatcgcagccaaactctagcaatgacaacatccagagcattacgtcaggcgactgggatgtgacaaagattcttgcatacgacgagaagggcaacaaaatctattttctgtcaaccgaggatctgccccgcaggagacagctgtacagcgccaataccgtgggaaacttcaacagacagtgtctgtcgtgcgatctggtggagaattgtacctattttagcgcgtcgtttagccattcgatggactttttcctgctcaagtgcgagggtccaggagtccccatggtcaccgtgcacaatactacggacaagaaaaaaatgtttgacctggaaaccaacgagcacgtaaaaaaagctataaacgacagacagatgcctaaggtcgaataccgggatattgaaatcgatgattataacctaccaatgcaaatcttaaaaccagccacttttaccgacacaactcactaccccctgctgcttgtggttgatggcacccccgggtcacagtctgtcgctgaaaagttcgaggtatcatgggaaacagtcatggtgtccagccacggcgcggtggtggtaaagtgtgacgggcgtgggagtggatttcagggcacaaaactgcttcacgaagtcagacggcgcctcgggctgctcgaagaaaaagaccaaatggaggctgtcagaactatgttgaaagagcagtatatcgaccgcacacgcgttgcagtgtttggcaaagattacggcggttatttatccacatatattttgccggctaaaggtgagaaccagggacagacttttacttgcgggagcgctctgtcaccaatcaccgattttaagctatatgcctctgccttcagcgagaggtatctgggcctgcacgggctcgataatcgtgcctacgaaatgacaaaagtggcccacagagtttctgctttggaagagcagcagtttctgattattcacccgactgccgacgaaaagatccacttccagcacaccgccgagctgattacccagctcattcggggtaaggctaattactctctccagatatacccagacgaaagtcattacttcaccagctcaagcctgaagcagcacctgtacagatcaatcattaatttttttgtcgagtgcttcagaatccaggataagctgctcaccgttacagccaaagaggatgaggaggaggactag

SEQ ID NO: 185488 - DNA, 2598 bp, synthetic construct
  misc_feature 1..2598: note = Description of Artificial Sequence: Synthetic coding sequence
  source 1..2598: mol_type = other DNA
atggccagcctgtaccagcggttcaccggcaagatcaacaccagccgaagctttcctgccccccccgaggcaagccatctgctaggtggccaaggacccgaggaagacggaggcgctggggccaaaccactgggccctcgcgcacaggcagccgcaccccgagaaaggggcggcggcggcggcggcgcaggagggcgccctaggtttcaataccaggccaggtcagacggcgatgaagaggatgagttagtgggctcaaaccctccccagaggaattggaagggtatcgccatcgcattgttggtaatcctagtcatctgtagcctaatcgtaacatctgtgatcttgctgacacccgcagaggacaatagtctttctcaaaagaagaaggtcacagtagaagacctgttttctgaagattttaaaattcacgacccagaggcgaagtggatctccgatactgagtttatctaccgagagcagaaaggaacggttagattgtggaatgtggagaccaatacctccacggtactcattgagggtaagaaaatcgaatccctgcgcgctatccggtacgagattagcccagatagagaatatgcactgttttcctacaacgtggagcctatttaccaacattcttacacagggtattacgtgttatcaaaaatccctcatggggatcctcagtccctggacccacctgaagtgagcaacgccaaactccagtacgccgggtggggccccaaaggccagcaactaatcttcatcttcgagaataacatatactactgcgcccacgttggtaaacaggccatccgtgtggtgtccacgggtaaagagggtgtcatttacaacggattgtccgactggctctatgaagaggagattcttaagacacacatcgcccactggtggtctccagacgggacgcgactggcctatgctgccatcaatgatagccgggtgccgattatggagttacctacatatacgggctcaatatatccaactgtgaagccatatcactaccccaaggctggttccgagaacccaagcataagcttgcacgtgatcgggctgaatggcccaacacatgacctcgaaatgatgccccccgatgatccccggatgcgtgagtattacattacaatggtgaagtgggcgacatccaccaaagttgctgtgacctggctgaacagagcccaaaatgtttccattttaacattgtgtgacgccacaaccggcgtgtgcacaaagaaacatgaagacgaatctgaagcctggctccaccgtcagaacgaagaaccggttttttctaaagacggacgaaaattcttcttcattcgagccattccccagggcggaagagggaagttctatcatatcactgtgagtagctcgcagcccaacagttccaatgacaacatccagagcataacttcaggcgactgggacgtgaccaaaatcctggcctacgacgagaaaggcaataaaatctatttcctgtctactgaggacttaccaaggcgccgacaactttattccgctaacacagtcggaaactttaacaggcaatgtctgtcatgcgacttagttgaaaactgcacttacttctcagcctctttctctcattcaatggatttttttctcctgaagtgtgagggccccggtgtccctatggtgaccgtgcacaacaccacagataagaaaaagatgtttgaccttgagacaaatgaacacgttaaaaaggccattaacgatagacagatgcccaaagtggagtatcgagacattgagatcgatgattataatttgccgatgcagatactgaagcccgctactttcactgataccacccactatccactgctgctggttgtggatgggacgccggggagccagagtgtggccgaaaagttcgaggtttcctgggagacggtcatggtttcgtcacacggcgctgtcgtcgtcaagtgcgatggccgcggatcagggttccagggaactaaactcttacatgaggtgcgacgaagactggggctcctggaagagaaagaccaaatggaggccgtgcgcactatgttgaaagagcagtacatcgataggacgcgggtggccgttttcgggaaagattacggcgggtatctcagtacctacatcttacctgccaagggagagaaccaggggcaaaccttcacatgcggctccgcgctttcaccgataactgactttaagctgtacgcaagtgctttctcagaacggtatttagggctacatggcctcgacaaccgcgcctacgagatgaccaaggtagcgcatagggtctctgccttggaagagcaacagttcctgatcatccatcccaccgcggacgagaagatacacttccagcacacggccgagctgatcacccaattgatcagaggaaaggcaaattattccttacagatttaccctgatgaatcccattattttaccagttcaagtttaaagcagcacctgtacaggagtatcatcaatttttttgtggaatgctttcgtatccaggacaaactgcttaccgtgaccgccaaagaagacgaggaggaggattag

SEQ ID NO: 185489 - DNA, 2406 bp, synthetic construct
  misc_feature 1..2406: note = Description of Artificial Sequence: Synthetic coding sequence
  source 1..2406: mol_type = other DNA
atgaaggagaaggccatgatcaagaccgccaagatgcagggcaacgtgatggagttagtcggcagtaatcccccacagaggaactggaaaggcattgcaatcgccctcctcgtcatcctggtcatctgttcattgattgtgacatccgtaattttactgaccccggctgaagacaacagcttgagtcagaagaagaaagttacggtcgaggatctgtttagcgaggacttcaagatccacgaccctgaagcaaagtggatctccgacacagagttcatctatagagagcagaagggtacggttaggttatggaacgtagaaacaaacacgagtacagtcctgatagagggtaagaagatcgagtccctccgggctattcgatatgagatatctcccgatcgggaatacgcactgttctcctacaacgtcgagcctatttaccagcacagttatacaggctattacgtgctgtcaaagattcctcacggggacccacagtctcttgacccgccagaggtgtccaacgctaagctccaatatgctggctggggccccaagggccagcagctgatcttcattttcgagaacaatatttactactgcgcacatgtcggtaaacaagccattcgagttgtgtccacgggtaaggagggagtgatctacaacggactgagcgactggctctacgaagaagagatacttaaaacccacatcgcacattggtggtctcctgacggaacacgcctggcctatgcagctataaacgattcaagagtgcccataatggaactgccaacatacactggcagcatctacccaactgtaaagccttaccattaccccaaagccgggtctgagaaccccagtattagtttacacgtgattgggctgaacgggcccacacatgatctggagatgatgccaccagacgacccgcgcatgcgggagtactacatcacgatggtaaagtgggcgacatccacaaaagtcgccgtgacatggttaaacagggcacagaatgtgagcatcctgaccctctgtgacgccactactggcgtgtgcaccaagaagcatgaggacgagtctgaggcatggttgcatcgccaaaatgaagaaccagtgttctcaaaggacgggcgaaagtttttttttatccgggcaattcctcagggtggtcgtggaaaattctatcacatcaccgtgtcaagtagtcagcccaattcttctaatgacaatattcagtctatcaccagtggcgattgggacgtgaccaagatcctggcctacgacgagaaaggcaacaagatctacttccttagcacagaggacctgcctcgtagaagacaattgtatagtgcaaacaccgtcggaaacttcaacagacaatgtctttcttgcgacttggttgagaattgcacctactttagcgcctctttctctcactcaatggatttcttcttgctaaagtgcgaagggccgggtgtacctatggtcactgtccacaacactactgataagaagaagatgttcgatctcgaaacaaatgaacacgtcaagaaggcaatcaacgacagacagatgcccaaagttgagtacagagacatcgagatcgacgactacaacctcccgatgcagatccttaaaccagccacatttactgataccacacattatcccttgctcctggtagtggatggcacccccggaagccagagtgtcgccgaaaaatttgaggtttcatgggagacagtcatggtctcctctcatggggccgtcgtggtcaagtgtgatgggcggggcagcggcttccaagggaccaaactgttgcacgaggtcagaaggcgacttggcttactggaagagaaagatcagatggaagcggtgagaacaatgttaaaggaacagtatatcgaccgaacgagagttgcagtgtttgggaaggattatgggggttatttgtccacctacatccttccagccaagggagaaaaccaaggtcagacattcacctgcggatccgccctgagtccaatcaccgacttcaaactgtatgcgtcagcattttcagaacgctacttgggcttacacggcctggacaaccgggcttatgagatgacgaaagtggcccatcgggtctcggctctggaagaacagcagtttctgattatacatcctacagccgatgagaagatccacttccagcacacagctgagctgatcacacaacttattaggggcaaggcaaattactcgctgcagatataccctgacgagtcacactatttcacatcctcttctttgaaacaacatttatatcggtcaatcattaattttttcgtggaatgcttccggatccaggataaattactcacagtgaccgccaaggaggatgaggaggaggactag

SEQ ID NO: 185490 - DNA, 2277 bp, synthetic construct
  misc_feature 1..2277: note = Description of Artificial Sequence: Synthetic coding sequence
  source 1..2277: mol_type = other DNA
atgaccaccgccaaggagcccagcgccagcggcaagagcgtgcagcagcaggagcaagagctggttgggtctaacccgccgcaacgcaactggaaggggatcgccatcgccttgttggtgatactagtgatatgttcgctgatcgtgaccagtgtcattctgttgactccagcggaggacaacagtctttcccaaaagaagaaggtgaccgtggaggacctcttttcggaggactttaagatccatgaccccgaagccaagtggattagtgatacagaatttatttacagggagcagaagggaactgtgcgattgtggaacgttgagacgaataccagcaccgtcctaattgagggcaagaagattgagtctctccgagccatacggtatgaaatctcaccagacagagaatacgccctgttttcctataatgtggaacctatcttcatctttgaaaataatatttactattgtgctcatgtggggaaacaggcgattcgtgtggtctccaccggcaaggagggggttatctataacgggttgtcagattggctctatgaggaagaaatcttaaaaacgcacatcgcccattggtggagcccagacggcactcggctggcatatgcggccataaatgattctagagttcctatcatggagttgccaacctacaccgggtctatctatccaacagtcaagccttaccactaccctaaagcgggatctgaaaatccatctatttcgttgcatgtgatcggtctgaatgggcccacacacgatctggaaatgatgccaccggatgacccgagaatgcgggaatattacatcaccatggtaaaatgggcaacatccaccaaagttgcggtgacgtggttgaatcgggcccagaatgtcagcatacttaccttgtgtgatgcgacgactggagtgtgcacaaaaaagcatgaagacgagagtgaagcctggctgcacagacagaacgaggaacctgtgttttccaaagacggacgaaaattcttctttatccgagctataccacagggaggtcgtgggaaattctatcacattaccgtgtcctcatcacaaccaaactccagcaatgataatatccaatcgattacctcaggggattgggacgtgacaaagatcctggcctatgacgagaaaggcaataaaatctactttctctccacagaagacctccctaggcggaggcagttgtactccgctaatactgtgggaaatttcaataggcagtgcttgtcatgcgatcttgttgaaaactgcacttatttttctgcgtcattttcgcatagcatggacttcttcttactaaaatgtgagggtcctggggtccccatggtgacagtccataataccaccgataaaaagaaaatgttcgatctggaaacaaatgaacatgttaaaaaggccataaacgacagacagatgcccaaggtcgagtacagggacattgagatcgacgattataatctccccatgcagattttaaagcccgccaccttcaccgataccacacactatccgctgctgctggtagtggacggcacacctggaagtcaatctgtggccgagaagtttgaagtgagttgggaaactgttatggtgtcctcgcacggagctgtggttgtaaagtgtgatggcagagggagtgggttccagggcaccaagttgctgcatgaagtaagacggagacttgggctgctggaggagaaggaccagatggaggccgtacgcaccatgttgaaagaacagtacattgaccggacgcgcgttgcagtctttgggaaggactatggaggctatctttccacttacatcctgcccgccaaaggggaaaatcagggtcagactttcacctgcgggagtgctctgtccccaattaccgacttcaagttatatgcaagtgccttttccgagcgataccttggtcttcacggcctagataatcgggcatacgaaatgaccaaagtcgcccaccgggtgtccgccctggaagagcagcagttcctaataattcatccaacggcggatgagaaaattcatttccagcacaccgcggagctgatcacccaactgattagaggtaaggctaactacagtctgcagatctaccctgacgaatcccattacttcacgtcctcatctctgaagcagcacctgtacagaagtataatcaacttcttcgtcgaatgttttagaatccaggacaaactactcaccgtgaccgccaaagaagacgaggaagaggattag

SEQ ID NO: 185491 - DNA, 2649 bp, synthetic construct
  misc_feature 1..2649: note = Description of Artificial Sequence: Synthetic coding sequence
  source 1..2649: mol_type = other DNA
atggccgccgccatggagaccgagcagctgggcgtggagatcttcgagacggcagactgtgaggaaaacatcgaaagtcaggaccgtcccaagctcgagcctttttatgttgagcgatatagctggtcccagctgaaaaagctcttggcggacactcgaaaataccacgggtacatgatggccaaggcaccccacgacttcatgtttgtgaagcgcaacgatcccgatggcccacacagcgaccggatttattacctggctatgtcaggcgaaaaccgcgaaaacaccttattttactccgagattcctaagaccattaatcgggccgcagtcctgatgttgtcttggaagccacttcttgacctgtttcaggccacacttgattacggcatgtattccagagaagaagagctattgagggaaaggaagcgtattggtaccgtgggcatcgcttcctatgactatcaccagggttcaggaacctttctcttccaagctggctccggaatttaccacgtcaaagacggtgggccacaagggttcacacagcagccactccgtcccaatctcgtggagacatcatgtcccaacatccgcatggacccaaagctgtgccccgctgaccctgactggatagccttcatccattccaatgacatctggatcagtaacatcgtgacaagagaagaaagacggctgacctacgttcataacgagctagccaatatggaggaggacgccagatccgccggcgttgctacattcgtgttacaagaggagtttgatcgatattctggatattggtggtgtcccaaagctgagactacacccagcggcggcaagatactacgaattctgtacgaggagaacgatgaatcggaagtggaaattatccacgtcacctccccaatgttagagacccggcgggctgattcattccgttacccaaagacggggactgctaacccgaaagtgacctttaaaatgtctgagatcatgattgatgcagaaggtagaatcatagacgtgattgataaggaactaatccagcccttcgaaatactttttgaaggcgtggagtacatcgctcgggccggatggacacccgagggcaagtacgcttggtctattttgctcgatagatctcagaccagacttcagatagtgttgatcagcccagaactcttcattcctgtggaagatgatgtcatggagagacagagactcatcgaatccgtccctgacagcgttactcccctgattatttatgaggaaactacagacatttggatcaatattcacgatatttttcacgtgtttccacagtcacacgaggaggaaatagaattcatcttcgccagcgagtgtaagacgggttttaggcatctgtataagatcaccagcattttgaaagaatcaaaatacaaaagaagctccgggggcctgcctgcccccagtgatttcaagtgtcctattaaggaggagattgcaatcaccagcggagagtgggaagtgctgggtcggcacggcagcaatatccaagtagacgaagtgcgcaggcttgtttacttcgaaggcacgaaagactcaccgctcgagcatcatctatatgttgtgagctatgtgaaccctggtgaagtcactcgtttaactgatcgtgggtattcacactcttgttgcatttctcagcactgcgacttcttcatctcaaagtacagcaatcagaagaaccctcactgtgtcagtctgtacaagctgagctccccagaggacgatcctacgtgcaagaccaaggagttctgggcaactatactggactcagctggaccactgccggattacaccccccccgagatcttctccttcgaaagtactaccggttttaccttatatggaatgctctataagccacacgaccttcagccaggcaaaaaatacccaaccgtgctgttcatttacggcggacctcaggtgcagctggtgaacaataggtttaagggggtgaagtactttcggttgaatacactggcttccttagggtacgtcgtagtcgtaattgacaaccggggctcctgccatcgcggacttaaatttgagggtgcctttaagtataagatggggcaaattgaaattgacgaccaggtagaaggacttcagtatctggctagccggtacgattttatcgatctcgatagagtcggtattcacggttggagttatggcggctatctgtccctgatggccctcatgcaacgttccgatatcttcagagtagcaattgctggagcacctgtgacactctggatcttttacgacaccggctatacagaaaggtacatgggccacccagatcagaatgagcaggggtattatttggggtccgttgctatgcaagctgagaagttcccatccgaacccaaccggctcctcctccttcacggctttttggatgagaacgtgcactttgcccacacatctatcttgctgagcttcctggtgcgtgcagggaaaccatacgacctacagatttatccccaggaacggcattctattcgggtccccgagtcaggcgagcactatgagctgcacctgctacactacttgcaggagaacttggggtctcgcatcgccgctctgaaggtcatttag

SEQ ID NO: 185492 - DNA, 2550 bp, synthetic construct
  misc_feature 1..2550: note = Description of Artificial Sequence: Synthetic coding sequence
  source 1..2550: mol_type = other DNA
atgtggaagcggagcgagcagatgaagatcaagagcggcaagtgcaatatggcagcagcaatggagacagagcagttaggcgtggagatcttcgagacagccgattgtgaagagaacatcgagagtcaggatcgccccaagcttgaacccttctacgtggaaaggtattcctggagccagctgaagaagctcctagcagatacacggaaatatcacgggtatatgatggccaaggcacctcacgatttcatgtttgtgaagcggaacgatccggacggaccacatagcgacaggatttactatctcgctatgtcgggcgagaatcgagagaacactctattttactccgaaatccctaaaacgatcaatagagccgccgtgttgatgttgtcatggaaacctcttttggacctcttccaggctacgctggactacggcatgtactcaagggaggaagagctcttgagggaacgcaagagaataggaacggtcggaattgcgagctacgactaccatcaggggtctggcacattcctcttccaggctggctctgggatctaccatgtgaaggacggcgggccgcagggattcacacagcagccgctgcggccaaatcttgtcgagacatcttgccctaatatccgcatggatcctaagctctgtccggccgaccctgattggatagccttcattcactctaacgatatttggatttccaatatcgtcactagagaggagcgtagactcacctatgtgcataatgagctggctaacatggaggaggacgcgaggagtgccggggtcgccactttcgtgctgcaggaagaatttgaccgttacagcgggtattggtggtgtccgaaagcagagacaacaccctctggcgggaaaatccttagaatcctttacgaagaaaacgatgagtctgaggtagagatcattcacgtcacatccccgatgctggaaactaggagggccgatagcttccggtacccgaagacagggactgccaacccgaaagtcacctttaaaatgtcagaaataatgatcgacgcggaggggcgcattatcgatgtgatagataaggagcttatacagccatttgaaatactgttcgagggcgtggaatatatcgcccgtgccggctggacacctgaaggcaaatatgcctggtcgatcctgctggatagatctcagacgcggctgcagatcgtattaatcagccctgagctgtttataccagttgaggatgacgtcatggagcgccaacgcctgatcgagtctgtcccagactcagtgacccccttgattatctacgaagaaactaccgacatctggattaatatccacgacatttttcacgtgtttccccagagccacgaggaggagattgagttcatattcgcatcagaatgtaagactggcttccggcacctgtacaaaattacatcaatccttaaggaaagtaaatacaagcgctccagcggaggcctgccggctcctagcgatttcaaatgccctatcaaggaggagatcgcgataacttcaggagaatgggaggtgctgggcaggcacggatccaacattcaggtcgatgaagtccggcgattagtgtacttcgaagggaccaaagacagccccctggagcaccacctatacgtagtttcctatgtcaaccctggggaggtgacacgccttacagataggggctacagccacagttgctgcatctcccagcactgcgattttttcatctccaagtatagtaaccaaaagaatccccactgtgtgagcctgtataagctctcaagtccagaagatgacccgacatgcaaaacgaaagagttttgggcaaccattctggatagcgcaggccctctcccggactacaccccccccgagatcttctcctttgaaagcacaaccggtttcaccctctatggcatgctgtataaacctcacgacttgcagcctggtaagaagtatcctacagttcttttcatttatggcggaccccaaggccagattgagatcgatgaccaggtggaaggacttcaatatttagcatcccgctatgatttcatcgatctggatagggttgggatccacggttggagctatggcggttatttatcactgatggccctaatgcagcgctctgatattttcagggtggcaatagccggagcccccgtgaccttgtggatattctatgacacaggttacacagaaaggtatatgggccacccagaccagaatgaacaggggtattacctgggcagcgtcgctatgcaggccgagaagtttcctagcgaaccaaatcgcctgttattgctgcacgggttcctcgatgaaaacgtgcactttgcccacacgagtatccttctgtctttcctagtacgggcaggaaaaccttacgacctacagatctacccccaggagcggcattctatccgagtccctgaatcaggcgagcactatgagctgcacttgttacactatctgcaagagaacttaggctcacgcatcgcggctctgaaagtgatctag

SEQ ID NO: 185493 - DNA, 2544 bp, synthetic construct
  misc_feature 1..2544: note = Description of Artificial Sequence: Synthetic coding sequence
  source 1..2544: mol_type = other DNA
atgtggaagcggagcgagcagatgaagatcaagagcggcaagtgcaatatggccgcagctatggagacagagcagctcggcgtggagattttcgagactgccgactgtgaggagaacattgagtcccaggaccgtcccaagctcgagcccttctacgtggaacgttatagttggtcgcagctgaagaaacttttagctgacacccggaagtaccatggatacatgatggctaaggcacctcatgatttcatgtttgttaagaggaatgatccagacggaccgcatagcgataggatctattacctggcaatgtcaggtgagaacagggagaatacgttgttttattcggagattcccaaaacgattaatagggctgctgtactgatgctgagctggaaaccgttgcttgacctgttccaggcaacacttgattacgggatgtacagtcgtgaagaggaactcctcagagaacggaagcgtatcggcacggtagggatcgcctcatatgattatcaccaaggatcaggcactttcttatttcaggctggctccggcatctaccacgtaaaggatggcggcccacaggggttcacacagcagccactccgcccaaatctggtggaaaccagctgcccgaacatacgcatggatcccaagctgtgtccagctgatcccgactggatcgcatttattcacagtaatgatatctggatcagcaacattgttacacgtgaggagcggcgcctgacatatgtgcataacgagctggctaatatggaggaagacgcaagatcagccggagtcgcaactttcgtgctgcaggaggagttcgaccggtactctggttattggtggtgcccaaaagctgaaaccacaccttccggcggcaagatcctgaggatactgtacgaagaaaacgatgagagtgaggtggaaatcatccacgtgacgtccccaatgctggaaaccagacgggccgactcgtttcgttatccaaaaaccggaacagctaacccgaaagtcacgttcaagatgtccgaaattatgatagatgctgaggggagaattattgatgttatcgacaaggaactaatacaacctttcgaaatcctcttcgagggggtggaatacatcgctagagcaggctggacccctgagggcaagtacgcatggtcaatcctgctggaccgcagtcagacacggctgcagattgtgttgatctcacccgaactctttatacctgtggaggacgacgtgatggagcggcagcggctaatcgagagtgtgcccgatagcgtcacaccgctgataatttatgaggagacaacagatatctggattaatatacacgatattttccacgtgtttccccaatcacatgaggaagaaatcgagtttatcttcgctagcgaatgtaagacaggctttcggcatctgtacaagattactagcatacttaaggagtcgaagtataagcgctcttctggaggtctccccgcaccctcagattttaaatgtccaatcaaggaggaaatagccatcaccagtggcgagtgggaggtgctgggacggcacggttctaatatacaggttgacgaggttaggaggctggtgtatttcgagggcacaaaagactccccactggaacatcacttgtacgtggtttcttacgtgaaccctggcgaggtgacacgcctcacagatcggggttactctcattcatgctgtatatcgcagcattgtgatttctttattagtaagtatagtaatcagaagaaccctcactgtgttagtttatacaagctctccagtccagaggacgaccccacttgtaagacaaaagagttctgggctacaatcctggatagtgctggaccactgcccgactacaccccccccgagatcttctcatttgaatccactactggatttaccctgtatggcatgttatacaaacctcacgacctacagcctggaaaaaaataccccaccgtgttgttcatatatggaggacctcaagtacagctagttaacaaccgctttaaaggtgtcaagtatttccggttgaacaccctcgcatccctcgggtatgttgtggtcgtcatcgacaaccgaggatcttgccaccgcgggctcaaatttgagggcgcttttaagtacaagatggttgcgatcgcaggcgctccagttaccttgtggatcttttacgacactgggtatacggagaggtatatgggccacccagaccaaaacgagcagggttactacctaggttctgtggcgatgcaggccgagaagtttccatccgaacctaaccggctgctgcttctgcacggctttctagatgagaatgtgcatttcgcccacacatcgatcctgctgtcctttctggtgcgggccgggaagccttatgatcttcagatttacccgcaggagagacattcaattcgggtacctgagagtggagagcattacgaactgcatcttcttcactatctccaggagaacctcgggagccgtatagcagccctcaaagtgatctag

SEQ ID NO: 185494 - DNA, 2178 bp, synthetic construct
  misc_feature 1..2178: note = Description of Artificial Sequence: Synthetic coding sequence
  source 1..2178: mol_type = other DNA
atgtggaagcggagcgagcagatgaagatcaagagcggcaagtgcaatatggcggcagccatggaaacagagcagctgggagtggagatcttcgaaaccgccgactgtgaagaaaatatcgaaagtcaggaccgacccaagctggagccattctatgtggaaagatacagctggtctcagttgaagaaactgctcgctgatacgcggaagtaccacggatacatgatggctaaggccccgcacgattttatgttcgttaagaggaatgatcctgatggcccgcactccgatagaatctattacctggccatgtcaggtgaaaatagagagaacactctgttctacagcgagattcctaaaaccattaatcgggccgctgtcctaatgctgtcatggaagcccctgctggatttgtttcaggctaccctggactatggtatgtatagccgagaggaggagcttttgagagaacggaagcgcataggcaccgtgggcattgctagctacgactaccatcaggggtccggcacgtttctgtttcaagccggcagcggcatctatcatgtgaaagacggtggcccccagggattcactcagcagccattgagacctaatttagtggaaacgagttgtccaaatatccgcatggaccccaagctttgtcctgcggatccggattggattgcatttatacacagcaacgacatctggatttctaacattgtaacacgggaggagcggcggctgacgtatgttcataatgagctggccaacatggaagaagacgcgcgaagtgccggagtcgccaccttcgttctccaggaggaattcgaccgctactccgggtactggtggtgtccaaaggccgagaccactccatctggagggaaaatactccgtatcctctacgaggagaacgacgaatccgaggtcgagattatccatgtgacctcacctatgctggaaactcgtagggctgattctttcagatacccaaaaacaggaaccgcaaacccaaaggtgacctttaagatgtcagagataatgatcgatgccgaaggacgaatccaggtggacgaagtgaggaggctggtgtacttcgaaggaaccaaagactctcctctggagcaccacctgtatgtggtgtcttacgtcaatcccggtgaggtgacccggctcaccgatagaggctacagccacagttgctgtatcagccagcattgcgattttttcatctcaaagtactctaaccagaagaacccccactgcgtcagcttgtataagctgagttcaccagaggatgatcccacatgcaagacaaaggaattttgggcaacaatattggattctgcaggtccattgccagattacactccacctgagatttttagcttcgaatccacaacaggcttcaccctgtatggaatgctctataagccacacgatctacaaccaggaaaaaaatatccaactgttctatttatttatggaggcccccaggtgcaactcgttaataaccgctttaaaggggtgaagtattttcgactcaataccctggcttctctaggctacgtcgtcgtcgtgatcgataacagggggagctgccatcgtgggctaaagttcgagggagcattcaagtacaagatgggtcagattgagatcgatgatcaggtggaaggattacagtatctcgcatccaggtacgattttattgacctcgatcgcgtagggatccacggatggagctacggcggctacttatcccttatggccctgatgcagaggtcagacatattccgtgtcgcaatagctggtgcccctgttacactctggattttttacgataccgggtataccgaaaggtacatgggtcatcctgaccaaaatgagcagggttactatttgggcagcgtggcaatgcaggccgaaaagtttccttcggagccaaaccgactactcctgctgcatggattcttggacgagaacgttcacttcgcccatacaagtatcctgctgtcctttctggttcgggcgggaaaaccatacgatcttcaaatctaccctcaagaacgccattccattcgcgtccccgaaagtggagagcactacgaactgcatctactgcattacctgcaggaaaacctgggctcccgcattgccgctctgaaggtcatttag

SEQ ID NO: 185495 - DNA, 2697 bp, synthetic construct
  misc_feature 1..2697: note = Description of Artificial Sequence: Synthetic coding sequence
  source 1..2697: mol_type = other DNA
atgtggaagcggagcgagcagatgaagatcaagagcggcaagtgcaacatggcggctgcaatggagaccgaacagcttggggttgagatatttgagacggctgattgcgaagaaaacattgagtcacaggaccgccccaagctcgaacctttttatgtagagagatactcttggagccagctcaagaaacttttggccgacactagaaagtaccatggctatatgatggcaaaggcaccgcacgatttcatgttcgttaagcgcaacgacccagacggaccccactcagacagaatatactacttagcaatgtctggtgaaaaccgcgagaacaccctgttctattcagagatccctaagaccattaacagagctgcagtgctgatgctttcctggaaacccctgcttgatttatttcaggctacccttgattatggtatgtatagtagggaggaggaactattaagagagcggaagcgcataggaaccgttggaatcgcatcgtatgattatcatcagggctcaggaacgtttcttttccaggctggctctgggatctaccacgttaaagatggaggcccgcagggctttacccagcagccactccggcctaatctggtagagacatcctgtccaaacatccggatggatcccaagctgtgcccagccgatccggactggatcgcattcatacacagcaacgatatctggatatctaatatcgtgacgcgagaggaaaggcggctcacctatgtgcacaacgaactggcaaacatggaggaggacgctcggtcagctggggtggccacgtttgtgctacaggaggaattcgatagatactctggatattggtggtgtcccaaggctgagacaaccccctctggcggcaagatactcaggatcttatacgaggagaacgatgagtctgaagtggagatcatccatgtgaccagtcctatgctggagactaggagagcagattcttttcggtatcctaagacgggtacagccaaccctaaagtcacttttaaaatgtccgagattatgatcgacgctgaggggcgcataattgatgtaattgacaaggaattaattcagccattcgaaatcctcttcgagggagtcgaatatatcgctagagccggatggacacccgagggaaaatacgcatggtcgatcctgctggatcgatctcagacgcgactgcaaatcgtgctgatcagtcccgagctgttcatacctgtggaggatgacgtgatggagcgtcagcgcttaattgagagtgtgccggattccgtgacgcccctcatcatctatgaagaaaccacagatatctggataaatatccatgacatcttccacgtgttcccacagagccatgaagaggagatcgaattcatatttgcctcagaatgcaagacgggattccgacacttgtacaagataacatcgattcttaaggagtccaaatataagcgtagtagtggcggcttaccagccccctctgacttcaagtgccctataaaagaggaaattgcaattacgtccggggagtgggaggtactcggccgccatgggtccaatattcaggtggacgaggtgaggaggctagtgtatttcgaagggaccaaagacagccctctggagcatcacctgtacgttgtctcctacgttaatcctggcgaagtgacaagacttaccgatcgcggctactctcactcatgctgcatatctcagcattgcgattttttcataagcaagtattctaatcagaagaaccctcattgtgttagtctttataaactctcatccccagaggacgatcccacttgtaaaacgaaggaattttgggctacgatactggacagcgccggtccactcccggactacacgccccccgaaatattttcattcgagagcaccaccggttttacactctacgggatgttatacaagcctcacgacttacaaccagggaagaagtacccaacagtgttatttatctatggcggcccccaggtgcagctggtaaacaaccggttcaagggcgtgaagtacttcagactgaacacgctcgcctcactcggttacgtggtggttgtcatagataatcgggggtcttgccaccggggtcttaaattcgagggtgcttttaagtacaaaatggggcagatcgagatcgacgatcaggtggaaggactgcagtatcttgctagccgctacgattttatcgacctggatcgcgtgggaatacacggctggagttacgggggttatcttagcctgatggccctgatgcaacggtcagatatcttccgagtcgctattgcaggggcccccgtgacgctgtggatattttatgatactggctacactgagcgatacatgggtcaccctgatcaaaatgagcagggatactacctcgggagcgtggctatgcaagccgagaaattccccagcgagccaaacaggttgctgttgctccatggcttcttagatgagaatgtgcactttgcccatacatccatccttttgagttttctggtgcgtgccggcaaaccatacgatctccagatttacccacaggagcggcactccatccgggtgcctgagagcggggagcattatgaactgcacctcctgcattacctgcaggaaaacctgggatcccggattgctgctctgaaagtgatttag

SEQ ID NO: 185496 - DNA, 2349 bp, synthetic construct
  misc_feature 1..2349: note = Description of Artificial Sequence: Synthetic coding sequence
  source 1..2349: mol_type = other DNA
atggccgccgccatggagaccgagcagctgggcgtggagatcttcgaaacggcggattgcgaggagaacatcgaaagccaagatcgccctaagctcgagccattttatgtcgagcgctattcctggagccagcttaaaaaactgctggctgacacacgcaaataccatgggtatatgatggctaaggctcctcacgactttatgtttgtgaaacggaacgatcctgacggaccgcactcggacagaatctattacctagcgatgagcggagaaaatcgggagaacacgctcttttacagcgaaattccaaagactatcaatcgtgcagccgttctcatgcttagttggaagccactcctcgatctgtttcaagcgacactagactatggtatgtattcaagagaggaggagctcctgcgggagcggaagagaataggaaccgtggggattgcctcctatgactatcatcaagggagtgggacttttttgttccaagctggcagcgggatatatcacgtcaaggatggcgggccacaaggcttcacccagcaacccctgcgccccaacttggtcgaaactagctgtccgaatattaggatggaccccaaattgtgtcccgccgatcccgattggatcgcattcatccactcaaatgacatttggatctcaaacattgtgacccgcgaggaacgtaggctgacctacgttcataacgagctggccaatatggaggaggacgctcgatctgccggcgtggcaactttcgtgctgcaggaagagttcgatagatacagcggctattggtggtgccccaaggcggagaccaccccctccggtggtaagatcctgcggattctctacgaagagaacgatgaatcggaggtggaaatcattcatgtcacctcccctatgcttgagaccagacgcgcggactcctttcgctatcccaaaaccggcactgccaatccgaaggtgacttttaaaatgagcgaaatcatgatcgacgcggaaggaagaattattgacgtcattgataaggaactgattcagccattcgagattttattcgagggtgtagagtacatcgcccgggcaggatggactcctgaaggcaaatatgcctggtctatactgctcgacaggtctcagacacggctgcagatagtcttaatttctccagaattattcattccagtggaggatgacgttatggaaaggcagcgcttgatcgaatctgtgcccgacagcgttacgcctctaattatttatgaggagactaccgacatctggataaacatccacgacatctttcatgtgtttcctcagagtcatgaggaggagatcgagtttatattcgctagcgaatgtaagaccggtttcaggcacctctataaaatcacaagcatactcaaagagtccaagtacaaacgctcttccggagggctgccggcaccctctgactttaaatgccctataaaggaagagattgcaatcacgtcaggtgaatgggaggtgctgggacgccacggaagcaatattcaagtggatgaagtccgtcgcctcgtgtattttgagggcactaaagacagccccctcgaacatcacctctacgtcgtctcctatgtcaacccaggagaggtcacacgcctcacggaccgaggttactcacacagctgttgtatatctcagcattgtgacttctttatttctaagtattcgaatcagaagaacccgcattgcgtctcactctacaagctctctagtccagaggatgaccccacttgtaagaccaaagaattttgggcaacaatcttggattcagctgggccgctgcccgattatacacccccagaaattttctcttttgagtccaccaccggcttcactctctacggtatgctgtacaagccccacgacctccagcccggcaagaaatatcctacagtgctatttatttacggaggacctcaggtggctatcgctggcgcccctgttaccttgtggattttctacgacactgggtacactgaacgctacatgggccatcccgatcaaaacgaacagggatactaccttggaagcgtggctatgcaggccgagaaatttccatctgagcctaaccgtctgctactgctccatggcttcctggacgaaaacgttcattttgcccatacttcaattctcttgagcttcttggtgcgggctggcaagccttacgatttgcagatttatccgcaagagagacacagcattagggttcccgagtctggcgaacattacgaattacacctcctccattacctgcaggagaatctggggtctaggatcgccgccttgaaagtcatatag

SEQ ID NO: 185497 - DNA, 2697 bp, synthetic construct
  misc_feature 1..2697: note = Description of Artificial Sequence: Synthetic coding sequence
  source 1..2697: mol_type = other DNA
atgtggaagcggagcgagcagatgaagatcaagagcggcaagtgcaatatggcagcagcgatggagaccgagcagctaggggtagagatatttgagaccgctgactgtgaggaaaatattgaatcccaagacagaccgaaactcgagccgttctacgtcgagcggtactcctggagccagctgaaaaagttactcgcagatacacgaaagtatcacggttatatgatggctaaggcgcctcatgatttcatgtttgtgaaacgcaatgatccagatggacctcacagtgataggatttactacctggctatgtcgggcgaaaatcgagagaacacactcttttattctgagatacccaagaccataaatcgggctgctgtgctaatgttatcctggaagcctctccttgatctgttccaagccacactcgactatgggatgtacagtagggaagaggagctgctgcgggagaggaaacggatcggcactgtgggaattgcttcctatgactatcatcagggcagcggcaccttcctttttcaggctggatccggcatttaccacgtgaaagacggcggcccacaaggctttacacagcaacctctgagaccaaacctcgtggagacgtcttgtcctaatatccgcatggatcccaaattgtgcccggccgatccagactggatagcatttatacatagcaacgacatttggatctctaacattgtgacgagagaggaaagaagactgacctatgtacataatgagttggcaaacatggaggaggacgctagaagcgccggggtcgcaacattcgtgttacaagaagagttcgatcggtacagcggatattggtggtgtcctaaggccgaaacaacaccatcgggaggcaagattttgcggattttgtatgaggagaatgacgaatccgaggtggaaattatccacgttacatctcccatgttggaaactagaagagcagactctttccggtatcctaagaccggtactgcaaacccaaaagtcacgttcaaaatgagcgagatcatgatagacgcggaggggaggattatagatgttatcgataaggagctgattcaaccatttgagatcctgttcgaaggggtcgagtacatcgcgagggcagggtggacacccgaaggaaaatatgcttggtctattttgctggaccgcagtcaaacgcgcctgcagattgtcctgatcagtccagaactgtttatacctgtagaggacgatgtgatggagagacagagacttatcgaatccgttcctgactcagttacaccattgattatttacgaggagactaccgacatttggattaacattcacgacatatttcatgtgttccctcagtctcacgaggaagagattgaattcattttcgcttctgaatgcaagacgggtttccggcacttgtataagatcaccagtattcttaaagaaagtaaatataagcggagttcaggaggtctaccagccccctctgacttcaaatgtccgatcaaagaggagatcgctataacttctggcgagtgggaggtgctaggacgccatgggagcaacattcaggtggatgaggtcagaaggctggtttatttcgagggtaccaaggacagtcccctggaacaccacttgtatgtggtgtcgtacgttaacccgggtgaggtaacgcgcctgacagacagagggtactcccactcgtgctgtattagtcagcactgtgacttctttattagcaagtatagcaaccagaagaacccccactgtgtttctttgtacaagctgagctcccccgaggacgaccccacttgcaagaccaaggaattctgggcaaccattctagattctgctgggcccctgcccgattatacaccaccagaaattttctcatttgaatctacaaccggttttaccttgtatggaatgctctacaagccccacgacctccagcccggtaaaaagtatcccacagttttgtttatctacgggggtcctcaggtgcagctggtaaataaccgatttaagggggtgaagtattttagactgaatactttagcgtctctgggctacgttgtcgttgtgatcgacaatcggggctcttgtcaccggggcctgaagtttgagggggctttcaagtacaagatgggacagattgaaatcgatgatcaggttgaggggctccagtatttggcatccagatatgactttattgatctggacagggtggggattcatggctggtcctatggcggttacctatctttgatggcccttatgcagaggagcgatatctttagggtagctatcgcgggcgcaccagttacgctttggattttctatgatacaggatacaccgagagatatatgggacaccccgatcaaaatgagcaaggctactatcttgggagcgtggccatgcaggcggagaagttccctagcgagcctaacagattgctccttttgcatggcttccttgatgaaaacgtccattttgctcacacatcgattctgctcagtttcctcgttcgggccggaaagccctacgacctgcaaatctatccacaggagagacactccataagggtccctgagagtggggaacattacgagctgcatctacttcactacctgcaagaaaaccttgggtcacggatagccgcactgaaggtcatttag

SEQ ID NO: 185498 - DNA, 3669 bp, synthetic construct
  misc_feature 1..3669: note = Description of Artificial Sequence: Synthetic coding sequence
  source 1..3669: mol_type = other DNA
atgagcgaggccccccggttcttcgtgggccccgaggacaccgagattaatccaggcaactacaggcacttttttcaccacgccgacgaagacgatgaggaagaggacgacagcccaccagaacgacagatcgtcgtcggtatatgtagcatggcaaaaaagtccaaatctaaacctatgaaggagattctcgaacggatttccctcttcaaatatatcactgtggtggtgtttgaggaggaggttatccttaacgagcccgtggagaactggcctctctgcgactgtttaatttccttccactccaagggattccctctggataaagcagtggcatatgccaagctgaggaaccctttcgtgatcaatgacctcaatatgcaatacttgatccaggatagaagggaggtgtacagcatccttcaggcggaaggcatcctgctgccccgttacgccatcttgaacagggatcctaacaaccccaaggagtgtaatctcatcgagggcgaggaccatgtggaggtcaatggagaagtgttccagaagcccttcgtagagaagcccgtgtcggcagaggatcataatgtatacatctattaccccacaagtgcagggggaggctcccagcggctgttccggaagatcggctcgcggtccagcgtgtattcgccagagagcaacgtgaggaaaaccggttcttacatttacgaagaattcatgcctactgacggaactgatgttaaagtttacactgtgggacccgactacgctcacgctgaggcccgcaagtctccggcacttgacggaaaggtggaacgggacagcgaggggaaagaagtcaggtacccagtgatcctcaacgcccgagaaaagctcattgcgtggaaagtgtgcctggctttcaaacagaccgtatgcggattcgacttactgcgagccaacggacaaagttacgtgtgtgacgtcaacggcttcagtttcgtaaaaaatagcatgaaatactacgatgactgcgctaagatattaggtaatattgttatgagggaattggcgcctcaatttcatatcccatggtctatacccctggaggctgaagacatacccatcgtgcccacaacctcaggtactatgatggaattgaggtgtgtgattgctgtaatcaggcacggggatcgtaccccaaagcaaaaaatgaagatggaggtaaggcatcagaagttctttgatctgtttgagaaatgcgatgggtacaagtcaggcaaactgaagttaaagaagcctaaacagctccaggaagtcctagacattgctcgacagctcctcatggagctcggccagaataacgatagtgagatcgaggagaacaaacctaagcttgagcagcttaagaccgtgctcgagatgtatggtcattttagcggcattaataggaaagtgcagttgacatacctcccccatggatgccctaaaacctccagcgaggaggaagatagtcgccgtgaggagccttctctccttttagtattaaaatgggggggcgagctgacacccgcagggcgcgttcaagccgaggagttaggcagagctttcaggtgcatgtatccaggtggtcagggcgactacgccgggttcccagggtgtgggctgcttaggttacactccacttacaggcatgaccttaaaatttacgcctccgacgaggggcgtgtgcagatgactgcagcggcctttgccaaaggcttgcttgcactggagggagagttgacaccaatacttgtacagatggtgaaatccgcaaacatgaacggattacttgactccgacagcgacagcctgtcatcatgtcagcaacgagtgaaagccagactgcacgaaatactccagaaggatagggacttcacagcggaggattacgaaaaactaacaccctctggatcgatttccctgatcaaaagcatgcatctgattaagaatccagtcaagacatgtgacaaggtgtattccctcatacaaagcctgacctcccagatccggcacagaatggaagatcccaaaagctctgacattcagctttaccacagcgaaaccctcgagcttatgctgaggcgctggtccaagctagagaaagacttcaagactaagaacggccggtatgatatatccaaaatccccgacatttatgattgtatcaagtatgatgtacagcataacggcagcctgaaattggagaacacaatggagttgtacaggctcagcaaagcacttgcggatatagtgattccccaggagtatggtattactaaagctgaaaagctagagattgccaagggctactgtaccccgttagtgcggaagatccggagtgacctccagagaacccaggacgatgacaccgtgaataagctgcaccctgtgtattccaggggcgtcctttcacccgagcgccacgtccggacacggttatattttacctcagagtcccacgtgcactctctcctgagcatcctcagatacggagccctttgcaatgagtccaaggacgaacagtggaaaagggctatggactacttaaatgtggtgaacgagctgaactatatgacacaaatcgtgatcatgttatatgaggacccaaataaggatttgagcagcgaagaacgcttccacgtggagttgcatttctcccccggagccaagggctgcgaagaagataagaacctgcccagtggctacggttaccgcccggcttccagggagaacgagggacgccggcccttcaaaatcgataatgatgatgagcctcatacgtcaaagcgcgatgaggtggatagagccgtcatcctgttcaagcccatggtgtcagagccaatccatatccatcgcaagtctcccctgccacggtcccggaaaactgccaccaatgacgaagaaagtcctctcagcgtgagctctcctgaaggaactggcacatggctgcactacaccagcggggtggggacaggccggaggcgccgtcgatccggagaacagataacgtcttcccccgtcagcccgaagtcactcgcattcacatcgagtatttttggcagctggcagcaggttgtttccgaaaacgcaaactaccttcgcacaccaagaaccctggtcgaacagaagcagaaccctacagtgggatcccattgtgctggacttttcagcacctccgtcctgggtggctctagttcagcaccaaacctgcaggattatgcgagaactcatcggaagaagcttactagcagcggttgtatagacggatttgagctgtattctatggtgccttcaatctgccccttggaaactctgcacaacgccctgagtttaaagcaggtcgacgagtttttagcttccatcgccagtccatcgtcagacgtgcctcgaaaaacagccgaaatcagcagtacagcccttcgatcgtcacccattatgcggaagaaagtaagcctgaacacctatacccccgcgaagatcctaccaacaccaccggctacacttaagtccaccaaggcctcctcaaaacccgccacatccggccctagtagcgccgtggtccctaacacctcctctcgcaagaagaacattacaagcaagaccgagacacatgagcataagaagaacacaggcaaaaagaaatag

SEQ ID NO: 185499 - DNA, 3732 bp, synthetic construct
  misc_feature 1..3732: note = Description of Artificial Sequence: Synthetic coding sequence
  source 1..3732: mol_type = other DNA
atgagcgaggccccccggttcttcgtgggccccgaggacaccgagataaatcctggaaactacaggcatttttttcaccacgcggacgaggatgacgaagaggaggatgactcaccgcctgagcggcagatagtcgtcggaatctgcagcatggcaaaaaagtctaaatctaagccaatgaaagaaatactggaacgaatctccctcttcaaatatataacagttgttgtgttcgaagaagaggtgatcctgaatgaacctgtcgaaaattggcccctctgcgactgcttgataagctttcattcaaagggttttccccttgacaaagccgtagcttatgccaaactgcgcaacccctttgtgataaatgatctgaacatgcagtatctgatccaagatagacgagaagtctacagcatcttgcaggccgaaggaatactgttgccacgttacgctattcttaacagagatcctaacaatcctaaggagtgtaatttgattgagggagaagaccacgtcgaagtgaacggcgaagtctttcagaagccttttgttgaaaaacccgtgtccgcagaggatcataatgtgtacatatactatcctacctccgccggtggtggttcgcagcggctgttcaggaaaatcggatctcggtcaagtgtgtattcccctgagtccaacgtgaggaagactggctcatacatctacgaagaattcatgccaaccgatggaacagacgtgaaagtctacaccgtgggcccagactatgcccacgccgaagcacgtaaatcccctgctttggacggcaaggtagagcgtgacagtgaaggcaaagaggttcgctaccccgttattctgaatgccagggaaaagcttattgcctggaaagtgtgcctcgccttcaaacagaccgtctgcggatttgatctgttgcgggcgaatgggcagtcttacgtttgcgacgtcaacggctttagtttcgtgaaaaattctatgaaatattacgatgattgtgcaaagattctgggcaacatagtaatgcgcgaattagcgccacagtttcacatcccctggtcaatacctttggaagccgaggatattccaattgtcccaacgacctccggcaccatgatggaattgcggtgtgtgatagccgtcatcagacatggcgaccgcacccccaagcagaagatgaagatggaggtccgtcatcagaagttcttcgacttgtttgaaaagtgcgacggatacaaatccggtaagttgaagctgaaaaagccaaagcaactacaggaagtactggatatcgcgcgacagttgttgatggagctgggccagaataatgactcagaaatagaagagaataagcctaaactggagcagctcaagaccgtgttggaaatgtatgggcacttcagcggaattaaccggaaagtgcagctgacctatctcccccacggctgtccaaagacatcttccgaggaggaggactcccggagggaagaaccctccctgttgctcgtacttaagtggggcggagagctcaccccagccgggcgggtgcaagccgaagaactgggccgggcgttcaggtgtatgtacccggggggtcaaggcgactatgcgggcttcccggggtgcgggctactgcggttacattccacgtatagacacgacctcaagatctacgcatctgacgagggaagagtccagatgacagctgccgccttcgccaagggcctgctcgctctggaaggcgagctcactccgatactggtgcagatggtcaaatcagccaacatgaacgggttgcttgattccgatagcgactccttgagctcatgccagcagagggtaaaggcacgattacacgagatcttacaaaaggaccgggactttacggccgaggactacgaaaagctgaccccaagtggctccatcagtctgatcaaaagcatgcatctcatcaagaacccagttaagacgtgtgacaaggtttattcgttaatacagtccctgacttctcaaatccgtcatcgtatggaggacccgaagagtagcgatatacagctgtatcacagcgaaaccctggagttgatgctgagacgatggtcaaagctggagaaagacttcaagaccaaaaatggaaggtacgatatttctaagatcccagatatttacgactgcataaaatatgacgtccagcataatggctccctgaaactagagaacaccatggaactgtatcgactctccaaggctctggccgatatagtgatacctcaggagtacggcattacaaaggctgaaaagcttgagattgctaagggttactgtacccctctggtgcgcaagatccgatctgacctgcagagaacgcaggacgatgataccgtcaataagctgcacccagtgtatagccgtggggttctctctccggaacggcatgtgagaacgcggctctatttcacctcagaatcccatgtacattcactgctgagtattctgcggtacggtgccctttgcaacgagtcaaaagacgagcaatggaagcgggcaatggattatctaaatgtcgtgaacgagctcaactatatgacccaaatcgtcatcatgctgtatgaggacccaaacaaagatctgagctccgaggagaggttccatgtggagttgcacttttctcctggagccaagggatgcgaggaagataaaaatctgccaagcggctacggctatcgccccgcctctagagagaacgagggacggcgcccttttaagattgacaacgatgacgagccacatacatccaagcgggacgaagtggaccgtgctgtcatcctgtttaagccgatggtgtctgaacctatacacatccatcgcaagtccccattgcctagatctcggaagaccgcaactaatgatgaggagtctccactatccgtgagtagccctgaaggcactgggacgtggcttcactacacaagcggggtcggcacagggaggcgtcgaagacggtccggagaacagataacaagtagccccgtgtcccctaaatctttagccttcacttcgtccatcttcggtagctggcaacaagtggtctcagaaaacgccaactatctccggactcctcggacattggttgaacagaagcagaatcctaccgtgggatctcactgtgcgggactcttttctacctcggtcctaggcggtagctcctcagccccaaacttgcaagactacgccaggacccacagaaaaaagcttacgtccagtggatgtattgatgacgctacacgggggtctgcggtcaagcggttcagtatcagtttcgctcggcaccctactaacggttttgagctctattcaatggtcccctctatctgtccgctggagacattgcataatgcattgtctcttaagcaggttgatgagttcctcgccagcattgcgtcacctagctcggacgtgccacgcaaaacagccgagataagtagtaccgccctcaggtcctcccctataatgcgcaagaaagtcagcctgaatacttatacccccgctaagatccttccaactccccctgccactttgaagtccactaaggctagctctaaaccagcaactagtggcccctcttctgccgtggtgcctaacacctcctctaggaagaaaaacatcactagtaagactgagacacacgaacacaagaaaaacacgggcaaaaaaaaatag

SEQ ID NO: 185500 - DNA, 3669 bp, synthetic construct
  misc_feature 1..3669: note = Description of Artificial Sequence: Synthetic coding sequence
  source 1..3669: mol_type = other DNA
atgagcgaggccccccggttcttcgtgggccccgaggacaccgagatcaaccctggcaactaccggcattttttccaccatgcagatgaggacgacgaagaggaggatgattcgccacccgagaggcagattgtggtggggatctgtagtatggccaagaaatcaaagtccaagccgatgaaggaaatattagaaaggataagcctttttaaatacattacagtggtcgtgttcgaagaagaggtgatcctgaacgagccggttgaaaactggcccctgtgtgattgtttgattagctttcactctaaaggtttccccctggataaagccgtcgcttacgccaaactaaggaacccctttgtgattaatgatctaaatatgcaatatttaatacaggaccggagagaggtgtatagcatcctgcaggcagaaggaatactgctccctaggtacgccatcttgaatagagatccaaacaaccctaaggagtgcaatctcatagaaggggaggaccacgtcgaagtgaacggagaggtattccagaagccctttgtcgagaaaccagtcagcgccgaggatcacaacgtgtatatctattatccaacttcagcgggaggcggcagccagcggctatttcgcaagattgggtcacgcagtagcgtgtattcccctgagtccaatgtccgaaagacaggatcgtatatttacgaggaattcatgcctactgatggcacggatgtgaaagtgtacactgtcggcccagattacgctcacgcggaggcaagaaagtccccggctctcgatggaaaagtcgaaagagacagtgagggcaaggaggtgcgctaccctgtgattctgaatgctagggagaagttgattgcttggaaagtttgtttggcttttaaacaaactgtgtgcggcttcgatctgctgagagctaatgggcagtcttacgtgtgtgacgttaacggtttttccttcgttaagaactccatgaagtattatgatgactgcgccaagatccttggcaatatcgtaatgagggagctggcccctcaatttcacatcccgtggtccattccgctcgaggccgaagatattcccatcgttcccaccaccagcgggacgatgatggagctgaggtgcgtcatcgctgtgatccggcatggagataggaccccaaaacaaaaaatgaagatggaagttaggcatcagaagttttttgatctttttgaaaagtgcgatggttataaaagtgggaagctgaaattgaaaaagcctaagcagttgcaagaggtgctggacatcgccaggcagctactcatggaactgggtcagaataacgattctgagattgaagagaacaaacctaaacttgaacaacttaaaacagtcctggagatgtacggtcacttctctggcatcaatcggaaggtacaactgacgtaccttccacatggctgtcccaaaacctctagcgaggaggaggacagtaggagagaagagccgtcactcctcctagttctcaaatggggtggcgagttaacgcctgccggccgcgtgcaggcagaggagctcggccgggccttccggtgcatgtatcccggcggccagggcgattacgctgggttccccggctgcggacttctcagattgcatagcacctatagacatgaccttaaaatttacgctagtgatgagggaagggtccaaatgaccgctgctgccttcgcaaaaggccttctcgcacttgaaggagaattgacacctatccttgtgcagatggtcaagagcgccaacatgaatggcctgctggacagcgacagcgacagtcttagctcctgccagcagagggtgaaggcccggctgcacgagattcttcagaaagatagggactttacagctgaggactacgagaagctaactccatcaggaagcatctctttaatcaagtccatgcacttgattaagaaccctgttaagacttgtgacaaagtgtacagcttaatccagagcctgacgagtcagatacgccaccgaatggaggatccaaaatctagtgatattcagctgtaccacagtgagacactagagctgatgctgagacggtggagtaaattggaaaaagacttcaagaccaaaaatggcaggtatgacatttccaaaatccccgacatctatgattgcatcaagtatgacgtacagcacaacggatctctcaaactcgagaacacaatggagttgtaccgcctctcaaaggcactcgcagatatagtgatcccccaggagtacggcattaccaaggctgagaagttagagatcgccaaaggatattgcacccctctggtgcgcaaaatacgctctgacttacagcgcactcaggacgatgacacggtgaataagctgcaccctgtctattcacgaggagtgctgagtcctgaacgacacgtgaggacacggctgtacttcacaagcgaaagccacgtgcactctctcctctctatcctccgctatggagccctctgtaatgagtccaaagacgaacagtggaaacgggcaatggattacctgaacgtagtaaatgagttgaactatatgactcagattgttattatgctctacgaagaccccaacaaggacttgagttcagaggaacggttccatgtggagctccatttctccccgggcgccaagggttgcgaggaagacaaaaacctccccagtggatatggatatcgccctgcaagcagagagaatgagggaagacgcccttttaagattgataatgacgatgaaccccacacgagcaaaagggacgaggtggaccgcgcagtaatcctgtttaagcccatggtgagtgagcccatacacattcatcgtaagtctcctttgcctcggtcacgaaagactgcgaccaacgatgaagaaagcccactctctgtcagttctcctgaagggactggaacctggctacattatacatcgggagtcgggaccggccgaaggcgcaggagatccggcgaacagattacctcaagtcccgtcagccccaaatccctggctttcacaagttccatctttgggtcttggcaacaggttgttagcgagaacgcgaattatctgagaaccccacggaccttagtggagcaaaagcagaatcccactgtaggtagccactgtgccggcctattttctacctcagtgcttggaggctcttcaagtgcccctaatctgcaggactatgctcggacacacagaaagaaacttacttccagtggatgtatagatggcttcgaactgtattctatggtaccttctatctgccctctggagacgctccacaacgcgctgtctctcaagcaggtcgacgaattccttgcaagcattgccagccctagctccgatgtgccacgtaaaaccgcggagatctctagtactgccttaaggagctcccctataatgcgtaaaaaagtctctctgaacacttacactccggccaagatcctgccaacaccccctgcaactttaaagagtacaaaggcctcaagcaaacctgccactagtgggccatcgtccgccgtcgttccaaacacaagtagccggaagaagaatatcactagcaaaacggagacacatgaacataaaaaaaatacgggcaagaagaaatag

SEQ ID NO: 185501 - DNA, 3837 bp, synthetic construct
  misc_feature 1..3837: note = Description of Artificial Sequence: Synthetic coding sequence
  source 1..3837: mol_type = other DNA
atgagcgaggccccccggttcttcgtgggccccgaggacaccgagataaatccaggcaactatcgccacttttttcaccatgctgacgaggacgatgaagaagaggatgattcaccacccgaaagacagatcgtggttgggatttgcagcatggccaagaagtcgaagtccaagccaatgaaagaaatactcgaaaggatctccttgttcaaatacatcacagttgtcgtgtttgaagaagaggtaatcctcaacgaaccagtggaaaactggcctctgtgcgattgtcttatatctttccactccaagggtttcccactcgataaagccgtggcttacgcaaagctgagaaatccattcgtaattaatgatctgaacatgcagtatcttattcaagataggagggaggtgtactccattttgcaggccgaggggatactcttgcccagatacgctattctgaaccgcgatcccaacaacccaaaagagtgtaatctgatcgagggcgaggaccacgttgaggtcaatggggaagtgttccagaagcccttcgtcgaaaagcccgtatctgccgaagaccataacgtgtatatctactatcccacctcagctggcggaggttctcagcgcctgttccggaaaataggaagtcgctcttccgtgtactcgcctgaaagtaacgttagaaagaccggatcatacatttacgaggaattcatgcccaccgacgggacagatgtaaaagtctacacagtgggacccgattatgcgcatgctgaggcccgtaaatctcctgccctagacgggaaggtggagcgggactccgagggcaaagaagtcagatacccagtcatcctgaacgctagagagaagctcatagcctggaaggtatgcctggcgtttaaacagacggtttgcggctttgacctcctgcgagccaacgggcagtcctatgtgtgcgatgttaatggctttagtttcgtcaagaatagcatgaaatactacgacgactgtgctaagatcttaggcaatatcgtgatgagagagttggctcctcagtttcacattccctggtctattcctcttgaggcagaagacatcccaattgttcccactaccagtggcacgatgatggagctgaggtgtgtcatcgcagtcatccgacatggcgaccgcaccccaaaacaaaagatgaaaatggaggtgaggcatcagaaattctttgatttgttcgagaaatgcgatggttacaagtctgggaagttgaagctgaagaaacccaaacagctgcaggaagtcctcgatattgctcggcagctgctgatggagctgggacagaacaacgactccgagatcgaggagaacaagcctaagctcgaacagttgaagaccgtactagaaatgtatggacacttcagtggcatcaataggaaagtccagctgacatacctcccgcatggctgccccaaaacatcctctgaagaggaggattcaagacgcgaagagccctcccttctcctcgtgctgaaatggggcggcgaacttacccccgctggtagagtccaggcggaggaattgggccgcgcattcagatgcatgtaccctggtggccagggtgactatgccggatttccaggctgtggactgctgcggctacactccacttaccggcacgatctcaaaatctatgccagtgacgaaggaagggtgcagatgacagctgcagcctttgcgaagggtctcctcgcgctggagggcgagttgacgccaatcttggtgcagatggtgaaatcggctaacatgaatggtttactggactccgactccgactctctgtccagttgtcaacagcgggtcaaggctaggctgcacgagatcttacagaaggatcgggatttcacagcagaggattatgagaaattgaccccctctggctctattagcctgattaagagcatgcacctaattaagaacccggtgaagacctgcgacaaggtctattctctgatccaaagcctgacgagccagatccggcacagaatggaggaccctaagagctcagatatccaactgtatcattccgaaacccttgaactgatgctacggcgttggtccaagctcgaaaaggacttcaaaactaaaaatggccgatatgatatcagtaagatccccgacatctacgattgtattaaatatgacgtgcaacacaacggaagcctgaaacttgagaacacgatggaattatatagactttcgaaagcgcttgctgacatcgtaatccctcaagaatatgggatcacaaaggccgaaaaattagagatcgcaaaaggttactgcactcctctggtgaggaagatacgctcagatctgcagaggacgcaggatgatgataccgtcaacaaactgcaccctgtgtacagtagaggcgtactttccccagagaggcatgttcggaccagactttacttcacctcggaaagtcacgtgcactcgctcctgtcaattctcaggtacggtgcattgtgtaacgaccacgactctcagaatgaagatggaggcatggttaaagagatggaaagcaaggacgagcagtggaaacgagctatggattatctcaacgtagtcaatgaactgaactatatgacacaaatcgttatcatgctgtacgaggatcctaacaaggacctgtcttccgaagagagattccacgtagagcttcatttctccccaggggccaaggggtgcgaagaagacaaaaatctccccagtgggtacggctataggcctgccagccgggaaaacgagggtcgtcggccctttaagatcgacaatgacgatgaacctcatacttctaagcgcgacgaggtggaccgcgctgtaatcctcttcaaaccaatggtgagcgagccaattcacattcacaggaagagccccctgccaagaagtagaaaaactgccacaaacgatgaggaatcacctctgtcagtttcttcgccggagggaactggcacatggttgcattatacatccggcgtcggaacagggcgccgacgtaggcgaagcggggaacagatcacatcatcccctgtgagccctaagtctctcgcgtttacatcaagtattttcggcagctggcagcaggtagtttcggaaaacgcaaattatctgagaaccccccggaccctggtcgagcagaagcagaatccaaccgtgggttcacattgcgcggggctgttttcaacttcagtcctgggcggatcctcctccgcccctaatctgcaggattatgcgcggacacatcgaaaaaagttaaccagctccggttgtattgatgatgccactcgggggtcggctgtgaaaaggttttccattagttttgctcgtcaccctacaaatgaacacttacacctctacaggtgctggtccgtgtcatccgttgaatttttgggctcctccggctttgagctctattcaatggttcccagcatctgtcctctagagacattacacaatgccctctccctcaagcaggtggatgagttcttggcctcaatcgccagcccaagttctgatgtgccacggaaaacagccgagatcagttctaccgctttacgctcatcacccatcatgaggaagaaggtcagcctgaacacctatacaccggcgaagatcctgccaacccctcccgctactctcaagagtaccaaggcatccagcaagcccgcgaccagcggaccttcttcagcagtggtcccaaacacctctagtagaaaaaaaaatattacctctaagacagagacccatgaacacaaaaagaacacaggtaagaagaagtag

SEQ ID NO: 185502 - DNA, 177 bp, synthetic construct
  misc_feature 1..177: note = Description of Artificial Sequence: Synthetic coding sequence
  source 1..177: mol_type = other DNA
atgagcgaggccccccggttcttcgtgggccccgaggacaccgagatcaatcccggtaactataggcattttttccaccatgccgatgaggacgatgaggaagaagacgacagcccccctgaacgtcaaattgttgtcggaatttgcagcatggctaagaagtccaagtccaagtag

SEQ ID NO: 185503 - DNA, 2877 bp, synthetic construct
  misc_feature 1..2877: note = Description of Artificial Sequence: Synthetic coding sequence
  source 1..2877: mol_type = other DNA
atgctgaagagcaagaccttcctgaagaagacccgggccggcggcgtaatgaagattgtgcgggaacattacctccgggacgatattgggtgcggggcccccgggtgtgccgcatgcggaggcgcccatgaaggtccagccctggagccacagccgcaggacccggcctcctcggtctgtccccagccgcattacctccttcctgacactaatgtgctgctgcaccagattgacgtcttagaggatcctgcgatccgcaacgtgatagtcttgcagaccgtactgcaagaagtgcggaacaggagcgctcctgtctataaacggatacgtgatgtcacaaataaccaggaaaagcacttttatacatttactaatgagcaccatcgcgagacctacgtcgaacaggagcaaggcgagaatgctaatgatcgaaacgaccgcgccatccgcgtggcggctaagtggtataacgaacacttaaaaaaaatgtcggcggacaaccagctccaggtcatattcatcacgaacgaccggaggaataaagagaaagctatagaggaaggtattcctgcatttacatgcgaagagtacgtgaaatcactgacggctaatccggaactcattgacagactggcatgcctctctgaggaaggaaatgagatagagtctggcaagatcattttctccgaacatttgccgctctccaagctacagcagggtatcaaatccgggacttacttacagggaacgtttcgagctagccgggagaattaccttgaggctacagtttggatacatggggacaacgaggaaaacaaagagatcattcttcagggcctgaagcacttaaatagagccgttcatgaggatattgtggccgtggaactacttcctaaaagccagtgggtggcaccaagttcagttgtgctgcacgacgaaggtcaaaatgaggaagacgtggagaaagaggaggaaaccgagaggatgctgaagaccgccgtgtcagagaaaatgttaaaacctactgggagggtggtaggtattattaagaggaattggcgaccctattgcggaatgttgtcaaagtctgacatcaaagagagcagaagacacctgtttacaccagcagacaaacgaattccccggatcaggattgaaactcggcaagcatcgaccctcgaagggcggcgtatcattgttgctattgacggctggccgagaaactcacgctaccctaatgggcatttcgtgaggaacctgggtgatgtgggggaaaaagagactgagactgaggttttgcttctggagcacgacgtcccccaccagccatttagccaagctgtcctgtcgttcttgcccaaaatgccttggagtattaccgagaaagatatgaaaaatagggaggatctgagacacctttgtatctgcagtgtagacccaccaggatgtaccgacatagacgacgcccttcactgccgggagctcgagaatggcaatctagaggttggcgtacacatcgctgacgtgtctcactttatccgcccggggaacgcgcttgatcaagaaagtgcccgccgggggaccacggtgtatttgtgcgagaaacgcattgatatggtccccgaactcttgtcttcaaatctgtgctcgctgaagtgcgatgtcgatagactggcctttagctgcatctgggagatgaatcacaatgccgagatccttaaaaccaagtttaccaagtccgtgataaatagtaaggctagcctcacatatgccgaagcccagctacgaatcgattcagctaacatgaatgatgacataacgacctccttacgcggactgaacaagttggcgaagattctgaagaaaaggcggatcgagaaaggggcactcacactgagctctcctgaagtccgcttccacatggattccgagacgcatgaccctattgatctccaaactaaagagctaagggagacaaattctatggtggaggagttcatgctgctggccaacatcagcgtggctaagaaaatccacgaagagtttagcgagcatgctcttctgcggaagcatccagctccccccccaagtaactacgagattcttgtgaaagcagctcgctcacgaaatctggagattaaaaccgacactgctaaatccctcgccgagagcctcgatcaggccgagtcccccacgttcccctacctgaacaccctgcttcgtatacttgccacacgctgcatgatgcaggccgtttatttttgttccggtatggataacgatttccatcattacggccttgcctcacccatctacacacatttcacctcgcctattcggagatacgctgacgtgatcgttcaccgcctattagccgttgccattggggccgattgcacttatcctgaactcacggacaagcacaagcttgcagatatttgcaaaaatctaaatttcaggcataagatggcccagtacgcccaacgggcctccgtcgcgttccatacccagttattctttaagtctaaaggaatagtgagcgaggaggcctacatcctgtttgtgcggaagaacgccatcgtcgttctgatccccaagtacgggctggaaggcaccgtgttctttgaagagaaggataaacctaacccacagctgatttacgacgacgagatacccagcttaaaaatagaggacaccgttttccatgtgtttgataaggttaaagtgaaaatcatgctcgactcatcaaatttgcagcatcagaagatcagaatgagcctggtcgaacctcagatccctggaattagcatacccacagacacttccaacatggatctgaacgggccgaaaaagaaaaagatgaaactgggtaaatag

SEQ ID NO: 185504 - DNA, 2391 bp, synthetic construct
  misc_feature 1..2391: note = Description of Artificial Sequence: Synthetic coding sequence
  source 1..2391: mol_type = other DNA
atgagcgccgacaaccagctgcaggtgatcttcatcaccaacgaccggcgcaataaagaaaaggcgattgaggagggaattccagcctttacctgtgaagaatacgtaaagtctctgacagccaacccagaactgatcgatcggttggcatgcctaagtgaagagggcaatgagatagagagcgggaagatcatcttttccgagcacctccccctgtcaaagctgcaacagggcatcaagagcggaacgtacttgcaaggcacttttcgggcgagccgggagaattacctggaggctacagtttggattcacggcgacaatgaggaaaacaaggagattatcctgcagggcctgaagcatttgaacagagcagttcacgaggacatcgtcgcagtggaactgctgcctaaaagccagtgggtggctccatcaagcgtcgtgctccatgacgaggggcagaacgaagaagatgtggagaaagaggaggagactgagcggatgctcaagacagctgtttctgaaaagatgttaaaacctacaggcagggtagtggggatcattaagcgaaactggcggccttattgcggaatgctgtccaagtctgacataaaagaatccagaaggcatctattcactcctgcagacaaacgcattccacgcatcaggatcgagacacggcaggcaagtacattggagggccggaggatcatcgtcgccatcgacgggtggccccgcaacagccggtatccaaatggccatttcgtacgcaacctgggggacgtgggggaaaaggaaacggagaccgaggtgctccttctcgagcacgatgtgcctcaccagccattctcccaggctgtcttgagcttcttgccaaagatgccatggtctatcacagagaaggacatgaagaacagagaagacttaaggcacctgtgtatctgctccgtagatcctcctggctgtaccgacattgatgatgctctgcactgtcgggagctcgagaacggcaacctcgaagtgggcgtgcatatcgctgatgtttctcatttcatccgacccggcaacgcgttggaccaggagagcgcccggagaggcactacagtgtatctgtgtgagaagcgaatcgacatggtgccagagcttctgagctcaaacctgtgctctttaaaatgtgacgttgaccggctcgcctttagctgcatatgggaaatgaatcacaatgctgagatattgaaaactaagttcactaaatcagttattaattccaaggctagtctcacctatgcagaagcacagcttagaattgacagcgccaatatgaacgatgatatcacgacatccctgagaggcttgaacaagctggccaagattctcaagaaacgccgcatcgagaaaggggctctgacactgtcatcaccggaagtgagatttcacatggacagtgaaacacacgacccaatcgacctgcagacaaaggagctgcgggaaaccaactctatggtcgaagagtttatgttgctggctaatatttcggttgccaaaaagattcatgaggaattctctgagcacgcattactgagaaaacaccccgccccccctccttccaactatgagattctggttaaggctgccaggtctcgaaacttggagataaagacagacacggcaaagtccctggccgaatccttggaccaagccgaatctccaacgtttccttatctgaacacactgcttaggatcttggcaacccggtgcatgatgcaagccgtgtacttttgtagcggaatggataacgattttcaccactacggcctagctagtccaatttatacccattttacctctcccatacggaggtatgctgatgttattgtgcaccgcctgctggcagtggccataggggctgactgcacatatccggagctaaccgacaagcataaacttgccgatatctgtaagaatcttaatttcagacacaaaatggcacagtacgctcagagggcgtccgtggcatttcacacacagttattcttcaaaagtaagggtatcgtgtcagaagaagcctatattctgtttgtgcggaagaacgcgatcgtggttttaattccaaagtacggtctcgaagggacagtgtttttcgaggagaaagacaagccgaacccccaattaatctatgacgacgagattccctctctaaaaatcgaggataccgtgtttcacgtttttgacaaagtcaaggtcaaaatcatgctggacagcagtaacctgcagcaccagaagatccgcatgagtttggtggaaccgcagattcctggaattagtataccaactgatacgtctaatatggatctcaatggccctaaaaaaaagaagatgaagctgggcaagtag

SEQ ID NO: 185505 - DNA, 2787 bp, synthetic construct
  misc_feature 1..2787: note = Description of Artificial Sequence: Synthetic coding sequence
  source 1..2787: mol_type = other DNA
atgctgaagagcaagaccttcctgaagaagacccgggccggcggcgtgatgaaaattgtccgcgagcattacctgcgggatgacataggttgtggcgcccccggctgcgcagcttgcgggggagctcacgagggccctgcgctcgagcctcagccccaggacccagcgagcagtgtttgcccacagcctcactatttgctgcctgatacaaacgttctgctgcaccagatcgtttcagcctggaggcccggaacatgggcttccgtggcttcttcgctacggttgcccggcagcttggagacatacgtcgaacaggaacagggggagaacgcaaacgaccgcaacgacagggctattagagtggccgctaaatggtacaacgagcacctgaaaaaaatgtcagccgataaccaactgcaggttatctttatcacaaacgatcggcggaataaggagaaagctattgaagaggggattcctgccttcacatgtgaggagtacgtaaaatccctcacagcgaatccggagctgatagatcgtttggcttgtctgtctgaggaagggaatgagatcgagtccggaaagatcatattcagtgagcacctgcccctgtctaaactgcagcagggaatcaagagtggtacatatttacaagggacattccgagcctctcgcgagaactacctggaagccactgtgtggatacacggcgataacgaggagaacaaggagataattctgcagggcctaaagcacttaaatcgcgccgtccatgaggatattgtggctgtcgaattgctcccaaaatcacaatgggtggccccaagctccgtcgtgttgcatgacgagggacaaaacgaggaggatgtggaaaaggaggaggagactgagagaatgcttaaaacagccgtctctgagaagatgctgaaacccacaggtcgggtggtgggcataattaaaagaaattggaggccatattgcggtatgctttctaagtcagatataaaggagagccgtcggcatctgttcacgcccgctgataagcgaattccccgtattcgcatcgaaacaagacaggccagcacacttgagggtagacgcatcattgtggccatagatggctggcccaggaatagccgctatccaaacggacacttcgttagaaatctgggtgacgtgggagagaaagagacagagacagaggtgttgctactagagcatgacgtgccacaccagccattttcccaggccgttcttagcttcttgccgaagatgccatggtcaattaccgagaaagacatgaaaaaccgcgaagacctgaggcatttgtgcatctgttctgtcgatcccccgggctgcaccgatatcgatgatgccctccattgtagagagcttgagaacggtaacctggaagtgggggttcacattgccgacgtatcccatttcatccggccaggcaatgctctcgaccaggaatccgcgagacggggaaccaccgtgtatctgtgtgagaaaaggatcgacatggttcccgagctgctttcatccaacttgtgttccctaaagtgcgatgtcgaccggctggcattttcctgtatttgggagatgaatcacaacgccgagatcctgaaaaccaagtttacaaagagcgtcattaatagcaaggcatccctgacctacgctgaagcgcagctgcggattgactctgcaaacatgaacgacgatataaccacttcactgagaggactaaataaactggccaaaattttgaagaagagaagaatagagaagggcgctcttacgctgtcatcacctgaggtgagatttcatatggatagcgagacccacgaccctatcgacctccaaactaaggagttgagagaaaccaactctatggttgaagaatttatgttactggctaatatctcggttgctaagaagatacacgaggaattctcggagcacgctctgctgcgaaagcaccctgcccctccaccatctaattacgaaatcttagtgaaggcagcaagaagcagaaacctggagattaagaccgacacagccaagagtttggccgagtccctggatcaggcagagtctccaacgtttccctatctgaatactcttctccggattttagccacacgctgtatgatgcaggcggtttatttctgcagtggcatggataacgatttccaccattacggtctggcctcccctatttacacacacttcacctccccgatacgacggtatgcagatgtgattgtacacaggctgcttgctgttgccattggtgcagactgtacatatcctgaactgaccgataagcacaaattggcggacatatgcaagaacctgaactttagacacaagatggcccagtatgctcaacgagcctccgtggcattccatacccagttgttctttaagtcaaaggggattgttagcgaggaagcatatatcctgttcgtgaggaaaaacgccatagtggtactgatcccaaaatatgggctggaagggactgtcttcttcgaggaaaaggacaagccaaacccacagctgatttacgatgacgaaattccctctttaaagatcgaggacactgtgtttcacgtctttgacaaggttaaggtgaaaatcatgttggactcttctaatctccagcatcagaagattcggatgagtctggtggagccccagatccccgggatcagtatcccgacggatacgtcaaacatggatctcaacgggcctaagaaaaagaagatgaagctgggtaaatag

SEQ ID NO: 185506 - DNA, 2916 bp, synthetic construct
  misc_feature 1..2916: note = Description of Artificial Sequence: Synthetic coding sequence
  source 1..2916: mol_type = other DNA
atgcagaccgcctgccaggccgtgcagcaccagcggggccggcggcagtataataagctccgcaatctcctcaaggacgcaagacacgattgcatcctgtttgccaacgagttccagcaatgctgctacctacctagagaaagaggggagtccatggagaaatggcagacccgcagtatctataacgcagccgtttggtactatcaccactgtcaggatcggatgccaatcgtcatggtcactgaagacgaggaggccattcagcagtacggctcagagaccgaaggagtgttcgtgattaccttcaagaattatcttgataatttttggcccgatctgaaagcagcgcacgaattgtgcgattcaatccttcagagcaggagagaaagagaaaacgagtctcaggagtctcacggcaaggagtatccagaacatttaccattggaggttctggaggctgggatcaaaagtggccgatacattcagggcatcctgaacgtgaataaacaccgagcacaaatagaggccttcgtgcgattgcagggcgcctcaagtaaagatagcgatctggtgtctgacatcctgatccacggcatgaaggcccgcaaccggtctatccatggcgatgtagtcgtggtcgagttgttacctaagaacgagtggaaggggaggaccgtggctctgtgtgagaacgattgtgatgataaggcgtcaggcgagtctccttccgagcccatgccaactggccgcgtggtagggattctgcagaaaaactggagggactacgtggtaactttccctagcaaagaagaggttcagtctcaaggaaaaaacgctcaaaaaatcctcgtgaccccctgggactaccgcatccccaaaatacggatatctacccagcaagctgaaacccttcaggattttagggtggttgtgcggatcgactcatgggagagcacatccgtgtaccccaatggacactttgtaagggtcctgggcagaatcggagacctggagggagagatcgctaccatcttagttgaaaatagcatcagtgtcatccccttttcagaggcccagatgtgtgagatgcctgttaatacccctgaatcaccatggaaggtctctccagaggaggagcagaaacgaaaggacctgaggaagagtcatctagtgttcagtatcgatcccaaagggtgtgaagacgtggatgataccttgagtgtcagaactctgaataacggaaatctcgagctgggcgtccacatcgctgacgtgacgcatttcgtggctccaaactcttatatcgacatagaggcacgcacacgcgccaccacctattacctcgctgatagacggtacgatatgcttccatccgtgctgagcgctgacttatgttccctcctgggtggtgtggaccgctatgctgtgagcatcatgtgggaattggataaagccagctacgagatcaagaaggtttggtacggaagaactataatacgcagcgcgtacaagctgttctacgaagccgctcaagagcttctggatggcaatctctccgtcgtggatgacattcccgagttcaaagacttggacgaaaaaagccgacaggctaaactggaggaactggtatgggcgatcgggaaactcaccgacatagcccgccatgttagagccaaaagagacggttgcggtgctttggagctagaaggcgtggaagtgtgtgtgcaactcgacgataaaaagaatattcacgacttgataccaaagcagcctcttgaagttcatgagacagtggcagaatgtatgatccttgccaatcactgggtggcaaaaaagatctgggagagctttccacaccaggctcttctacggcagcaccccccaccacaccaggagttctttagcgaattgagagaatgcgcaaaagccaagggtttttttatcgatacgagatctaacaaaactttggctgacagcctggataacgctaatgatccacacgacccgattgtcaatcgcttattgcgctccatggcgacccaggccatgtctaatgccctttactttagcacaggatcgtgtgccgaagaggagttccaccactacgggctcgctttagataagtatacgcattttacaagccctattagacgctactccgacatcgtcgtacatagactcctgatggccgccatctccaaagataagaaaatggaaattaaaggcaacctcttctctaacaaggatttagaggagctgtgccggcatatcaacaatcggaatcaggctgcacagcattctcaaaagcagtccacagagttgtttcagtgtatgtacttcaaagacaaggatccagctacagaagagaggtgtatcagcgacggggtgatctactcgataagaaccaacggggtgctgctattcatcccaagatttgggattaagggcgctgcctatctcaagaacaaggacgggctcgtgatctcatgcgggccagatagctgctctgagtggaaacccggcagtctacagcgatttcagaacaaaattacttccacaacgacggacggcgagtccgtgacatttcacctgttcgaccacgtgacagtgcgaatttccatccaagcttcacggtgccacagtgatacaattcggctagagataatctctaataaaccctataagatcccaaatacagaactcattcaccaaagctcccccctcctaaaaagtgagttagtcaaggaagtcactaaaagcgtagaagaggctcagctagctcaggaggtcaaggtgaacataattcaggaagagtatcaggaatatcggcaaacgaaggggcgatccctgtacacactgctcgaagagatccgggaccttgctcttctggatgtctcgaataactacggaatttag

SEQ ID NO: 185507 - DNA, 3165 bp, synthetic construct
  misc_feature 1..3165: note = Description of Artificial Sequence: Synthetic coding sequence
  source 1..3165: mol_type = other DNA
atgctgcagaagcgggagaaggtgctgctgctgcggaccttccaggggcggacactcaggatagttcgggagcattacctgagaccatgcgtgccatgccacagtcctctgtgtccgcaaccagccgcctgttcccacgacggaaaattgctctcttcagatgtaacccattacgttataccagactggaaggtcgtccaggactacctggagattcttgaatttccagagctgaagggcatcatcttcatgcagacagcttgtcaggcagtacaacatcaacgggggcgtcgtcaatacaacaaactgcgaaacctgttgaaggacgcgcgtcatgactgtatcctcttcgccaacgagttccagcagtgttgttaccttccgcgggagagaggggagagtatggagaagtggcagacccggtcaatttacaacgccgctgtttggtactaccatcattgtcaggaccgcatgcccattgtaatggtaacagaagacgaggaggctatacaacagtacggatccgaaactgagggcgtttttgtgatcaccttcaaaaactacctggataacttctggcctgatttaaaggctgctcatgaactgtgcgattctattcttcaaagccgaagagagagggaaaatgaaagccaggaatcccacgggaaggaataccccgaacacctcccactcgaagtgctcgaggctgggatcaagtctggtcgctatatccagggcatactcaacgtcaacaaacatcgcgcccaaatcgaagcctttgttagattacagggagcctcatctaaggattctgacctggtctcggatattctcatccatggaatgaaggccagaaataggtccattcacggcgacgttgtagtggtagaattgctgcccaagaatgaatggaaaggacgaacagtggctctctgcgagaatgactgcgacgataaggcttccggcgagtccccttctgagccaatgccaaccgggcgcgttgtcgggatacttcaaaaaaattggcgagactatgtcgtcacctttccaagcaaagaggaagtgcagtcacaaggcaagaacgcccagaagattctggtgacaccttgggattacagaatacctaaaatcaggatttccacacagcaagctgaaaccctgcaagacttccgggtcgtggtgcgcatcgacagctgggaaagtacctccgtttatccaaacggccacttcgtccgggtgctgggcagaatcggtgatctggaaggcgagatcgccacaatactggttgagaattctatatcggtgataccatttagtgaagcccagatgtgtgagatgccagtgaatacaccagagagcccatggaaagtgagcccagaagaagaacagaagcgaaaagacctcaggaaatcgcacctcgtgttttccatcgatccaaaagggtgcgaagatgtggatgatacattatccgtgcgtacactaaacaacggaaacctcgaattgggcgttcacattgctgacgtaacccactttgtggccccgaattcttatatagacatcgaagctaggactagggccactacatattatctagctgacaggaggtacgatatgcttccaagcgtcctgagcgctgacctgtgtagcctcctgggtggcgtcgatcgctacgcagttagcatcatgtgggaacttgataaggccagttacgaaatcaaaaaggtgtggtacggcagaacaatcattagatctgcctacaagttgttctatgaggccgctcaggagctgctcgacggcaatctttccgtcgttgatgatataccggagttcaaggacctcgacgagaagtcgaggcaggccaagctggaagagctcgtttgggcaatcgggaagcttaccgatattgcaagacacgtgcgcgcaaaacgcgacggatgtggggccctcgaactcgagggggtcgaggtttgcgtgcagcttgacgacaagaaaaatatccatgatttaatccccaagcagccgttggaggtgcacgaaacggtggcagaatgcatgatcctggcaaatcattgggtagccaaaaaaatctgggaatcttttccccatcaggccttactacggcagcaccccccaccccaccaggagttcttttcagaattgcgagaatgcgccaaggccaaaggtttctttattgacactagaagcaataagacattagcagatagcctggataatgctaacgatccccacgatccaatcgttaaccgactgttacggtccatggcgacgcaggctatgtccaacgccctctatttcagcaccggcagttgcgcagaagaggagttccaccactatggacttgctcttgataagtacacccacttcacatccccaattcggaggtatagcgatatagtggtacacagacttttaatggccgctatctctaaagacaagaaaatggagatcaagggcaacctcttctcaaacaaggatttggaagagttatgcagacatattaacaaccgcaaccaggcagcccagcatagccagaaacagtcaaccgagctcttccaatgtatgtacttcaaggacaaggaccctgccacagaggaacgatgcatatccgacggcgttatttattctatacgcaccaacggggtgctcctctttatcccacgctttgggattaaaggagccgcgtacctgaagaataaggatggattggtcatctcttgcggaccagactcatgttctgagtggaagcctgggagcctgcaacgtttccagaacaaaattaccagtactaccacagacggagaatctgtgaccttccacctctttgatcacgttactgtaaggatttccatccaggcctcccgatgtcattctgatacaatccgcctggaaatcattagtaataaaccgtacaagatacccaacacagaactgatacaccaatcatctcctttactcaagtcagagctggttaaagaggtcacgaagtctgtcgaggaagctcagctggcacaggaggtaaaagttaacattattcaagaagagtaccaggaatatcgacagaccaaaggcagaagtctgtataccctgctggaggagatacgagatctggcactgcttgatgtctcaaataactatggtatttag

SEQ ID NO: 185508 - DNA, 762 bp, synthetic construct
  misc_feature 1..762: note = Description of Artificial Sequence: Synthetic coding sequence
  source 1..762: mol_type = other DNA
atggagaagtggcagacccggagcatctacaacgccgccgtgtggtattatcatcactgtcaggatcgcatgcctatcgtcatggtcactgaggacgaagaagcaatccagcagtacgggagcgaaaccgagggagtgttcgtcattaccttcaagaactacctcgacaacttctggccagacttgaaggcagcccatgaactgtgcgattcgattctccagtctcgcagagagagagaaaatgaatcacaggaaagccatgggaaggaatatcctgagcatctgccactggaggttctggaggcgggcataaaatcagggcgttatattcaggggatccttaacgtgaataagcacagggcccagatcgaggcttttgtgaggttgcagggtgccagttccaaggatagcgatctggtatccgatatactcattcatggcatgaaagcgcgaaatagatcgatccacggcgatgttgtggtggtggagcttctcccaaaaaatgaatggaaaggcaggacagtggctttgtgtgagaatgattgcgacgacaaggcaagtggagagagcccaagcgagcctatgcctactggactgcagggaggcagagcgcaccggtttcttggagtcaacatttgcgttagcaagtggacgttctgtgcatgttttcgaaagaacaggagatcagggagagggaattgcaaccatcctggtggcaagcagtacttttcgtatagcttcttacggtccagcgacgtgtag

SEQ ID NO: 185509 - DNA, 453 bp, synthetic construct
  misc_feature 1..453: note = Description of Artificial Sequence: Synthetic coding sequence
  source 1..453: mol_type = other DNA
atggagaagtggcagacccggagcatctacaacgccgccgtgtggtactaccaccattgccaggataggatgcctatcgtgatggtgaccgaggacgaagaagctatccaacagtacgggagcgagacagaaggtgtatttgtcatcacctttaaaaactacctggataatttttggcccgacttaaaagccgcccatgagttgtgtgatagtatcctgcagtcgcggcgtgaacgggaaaatgagagccaggagtctcacggaaaggagtaccctgagcacttgcctctcgaagtgttggaggctggcattaagtctggtcggtatatacagggaatcttgaacgtaaataaacacagagctcaaatcgaagcctttgtccgtctccagggagcaagctccaaggattccgatctggtcagcgatatactaatccacggaatgaaggcctag

SEQ ID NO: 185510 - DNA, 174 bp, synthetic construct
  misc_feature 1..174: note = Description of Artificial Sequence: Synthetic coding sequence
  source 1..174: mol_type = other DNA
atgcagaccgcctgccaggccgtgcagcaccagcggggccggcggcagtataataagctgcgaaacttactgaaggatgcacgtcatgactgtatcttgtttgccaatgagtttcagcagtgttgttatcttcccagagaacgcggagagagtatggagaaatggcaaacatag

SEQ ID NO: 185511 - DNA, 294 bp, synthetic construct
  misc_feature 1..294: note = Description of Artificial Sequence: Synthetic coding sequence
  source 1..294: mol_type = other DNA
atgcagaccgcctgccaggccgtgcagcaccagcggggccggcggcagtacaataagcttagaaatctcctgaaagatgcgcggcatgattgtatcctgtttgccaacgagttccagcaatgctgctatctcccccgagagcgcggggaaagcatggagaaatggcagaccaggtcgatttacaatgccgctgtgtggtactaccatcattgtcaggacaggatgcctatcgtcatggtgacagaggacgaagaagccatccaacagtacggttccgaaactgagggcgtgtag

SEQ ID NO: 185512 - DNA, 312 bp, synthetic construct
  misc_feature 1..312: note = Description of Artificial Sequence: Synthetic coding sequence
  source 1..312: mol_type = other DNA
atgcagaccgcctgccaggccgtgcagcaccagcggggccggcggcaatacaacaagctgcgaaacctgttaaaagatgctcgtcatgactgtatcctgtttgcaaacgagtttcagcagtgctgctacctgccacgagaaaggggagaatcgatggagaagtggcagacacggtccatatacaacgctgccgtgtggtattatcatcattgtcaagaccggatgcctatcgtcatggtgacagaagacgaggaagccatccagcagtacgggtctgaaactgagggtgtgtttgtcatcacgtttaaatag

SEQ ID NO: 185513 - DNA, 1812 bp, synthetic construct
  misc_feature 1..1812: note = Description of Artificial Sequence: Synthetic coding sequence
  source 1..1812: mol_type = other DNA
atgagccaccccgactaccggatgaacctgcggcccctgggcaccccaagaggcgtgtcagcagttgcagggccccatgacattggcgccagtccaggggataagaaatccaagaatcggagtacgcgggggaagaagaagtccatcttcgagacatatatgtcgaaagaggatgtatccgaaggcttgaaaagaggcaccctgatccagggtgtgctacggatcaatccaaagaaattccacgaagcttttatcccatcacccgatggagatcgcgatattttcatcgacggcgtcgtggctcgcaatcgagccctgaatggagatctagtggtggttaaactgctcccggaagaacattggaaggttgtcaagccagagtccaacgacaaggaaactgaggctgcgtatgaatccgatatccccgaagaactctgtgggcatcacctgccccagcagagcctaaaatcctacaatgacagcccagatgtgatcgttgaggcacaatttgacgggtcagactccgaagacggacatggcatcacacagaatgttttggttgatggcgtgaagaagctcagcgtgtgtgtctctgaaaagggaagagaggacggcgacgctccagttactaaggatgagaccacttgcatatcacaggacactcgcgcactcagcgaaaaatctctccaacggtccgccaaggttgtgtatatcctggaaaaaaaacactcgagggctgccacggggttcttgaagttgcttgccgataaaaatagcgagctgtttaggaaatacgccctcttctcaccttccgatcatcgcgtcccgagaatctatgtgcctctgaaggattgtcctcaagacttcgtggctaggccaaaggactatgcgaataccctgtttatttgccgtatcgtagactggaaggaggattgcaacttcgccctcggccagcttgcgaagtctctgggacaagccggagaaatcgagcctgagacggagggcattctgactgagtacggcgtggatttctcagatttcagctccgaggttctcgagtgcttaccacaggggctgccttggaccattccgcccgaagagttctcgaagaggagggaccttagaaaagactgtatatttactatcgatccttctactgcgagagatctggatgatgcactgtcatgtaaaccattagcagatggaaatttcaaagttggagtgcacatcgcagacgtgtcctattttgtcccagaaggcagcgacttagacaaggttgcagctgagagggcgacgtcagtctacctggtacaaaaagtcgtgcctatgttgcccaggcttctctgcgaagagctgtgctctctgaatccgatgtctgataagctgacattctctgttatctggacattaactccagaaggcaagattctagatgagtggtttgggagaaccattatacgatcgtgcacaaaattaagctatgaacacgcacagagtatgatcgagagccccacggaaaaaatcccggctaaggaactcccgccaatttcccctgagcacagtagtgaggaggttcaccaacagaatgctgacaaggatggtgccgcacacttgcaggctagtcacagccccagcgctgaggatgcagaggcccaaccttccacagaagagcgcctcccggaaacacgcggcatttgcgaccgtgaccccgacacccgactgttttttctccagcagcagagtcgggtactggaggcaaagccccagaacacaattcgagtggaggaacagactacacagctgcaaatttag

SEQ ID NO: 185514 - DNA, 2658 bp, synthetic construct
  misc_feature 1..2658: note = Description of Artificial Sequence: Synthetic coding sequence
  source 1..2658: mol_type = other DNA
atgagccaccccgactaccggatgaacctgcggcccctgggcaccccacgtggcgtttccgcagtggctggcccccacgacatcggagcttctccaggagacaagaagtccaagaataggtccacccggggaaagaaaaagtcaatctttgagacctatatgagcaaggaggatgtttctgaggggctgaaacggggcacactaattcagggagtgctgcgtattaatcctaaaaagtttcatgaggccttcattccttctcccgacggcgacagggacattttcatcgatggagttgtagccaggaatcgggcactgaatggcgacctcgttgtggtgaaattgttgccagaggagcactggaaagtagttaaacccgaatccaacgataaagaaacagaggcggcttatgagtcagatatccccgaggagctgtgtgggcatcacctgcctcaacagtctctcaagagttacaatgactcccccgatgtcattgtagaggcacagtttgatggaagcgattctgaggacgggcacgggataacccagaatgtgctcgtggatggtgttaagaagttgtcagtatgtgtatctgaaaaagggagagaggacggcgatgcccctgttacaaaggatgagacgacttgtattagtcaggacacccgagcactgtcagaaaaatcgcttcagcgcagtgctaaagtggtgtacatcttagagaagaaacattcaagggccgctacagggttccttaagctacttgcagataaaaatagcgaacttttccgaaaatatgcactgttctcacccagcgaccacagggttccaagaatatacgtgccccttaaggactgcccccaggactttgtggctagacccaaagactatgcaaacactctttttatctgccgaattgtggattggaaagaggactgtaacttcgctctaggacagctggctaaatcccttgggcaggcaggagaaatcgagcctgagaccgaaggaatcctcacagaatacggcgtagacttttccgacttctcatctgaagtgctggagtgtctcccgcagggcctgccttggaccatcccgccagaagagtttagcaaacggagggatttgaggaaggattgcatctttactattgacccgagtacagctcgggatctggatgacgccctgtcttgtaagccactcgcagacgggaacttcaaagttggcgtgcacattgcggatgtctcctattttgtgcccgaggggagcgatctcgataaggtggcagccgagagagccacaagcgtctatctggtgcagaaggtggtgcccatgcttccaagactcctctgcgaagagctgtgcagtctgaaccccatgtctgacaaacttactttttccgtgatttggactctgactcctgagggaaagattcttgacgagtggtttggacggacgatcatccgttcctgtactaaattatcctacgagcacgcacagtccatgatcgagtctcctactgaaaagatcccggctaaagagctcccccctatatccccagagcatagctcagaagaagttcaccaggctgttctgaatctccacgggatcgcaaagcaactgcggcagcagcggtttgtagatggcgctttacgcctcgaccagctcaaattggcgttcaccctagatcacgagaccgggctgcctcaagggtgccacatttacgagtaccgcgagtccaataagttagtagaggagtttatgttgctggcaaacatggctgttgcacacaagattcatagggctttccccgagcaagctctgctgcgaagacatccaccaccccagacaaggatgctatcagatctagtggagttttgtgatcagatgggattgcccgtggattttagctctgccggtgccctgaataagagcctgactcagacctttggggatgacaagtacagcctagcgaggaaggaggtactcacaaatatgtgctcccgcccaatgcagatggctctatacttttgttcgggtttactgcaggaccccgcccagtttcgccattacgctcttaatgtaccactgtacacgcacttcacctcaccaatcagacgcttcgcggacgttctcgtgcacaggctgctcgccgcagcgctggggtaccgggagcgtctagacatggcacccgacacattgcaaaaacaggcggaccactgtaacgaccggcgcatggctagcaaacgcgtgcaggagttaagtacctccttgttcttcgccgtgctggttaaggagtccgggcccctggagtccgaggccatggtgatgggcatcctcaagcaggcctttgacgtgctggttctgcggtacggggttcaaaagaggatctactgtaatgctttagctctgcgatcccatcactttcaaaaagtcgggaaaaagcccgagttgacactggtttgggagcctgaggacatggagcaagagcccgcacagcaggtgatcactattttctcacttgtcgaggtggtgctgcaggctgaatctacagctctcaaatacagtgcgatcctgaagcggccggggacccagggccatttaggacccgaaaaggaagaggaagagtctgatggcgaaccagaggacagctcgactagctag

SEQ ID NO: 185515 - DNA, 1071 bp, synthetic construct
  misc_feature 1..1071: note = Description of Artificial Sequence: Synthetic coding sequence
  source 1..1071: mol_type = other DNA
atgagccaccccgactaccggatgaacctgcggcccctgggcaccccaaggggtgtttccgcggtcgccggacctcacgacatcggggcctccccgggagataaaaaaagtaagaacagaagtactcgcggaaaaaaaaagagtatcttcgaaacatacatgtccaaagaagatgtgtcagaggggcttaaaaggggcacactgattcagggggtcctcagaatcaacccaaagaagtttcacgaggccttcatcccatcgccagatggcgatagggatatcttcattgatggagtagtcgccagaaacagagccctgaacggcgatttggttgtcgtcaagcttctaccagaagaacattggaaggtcgtgaaaccagagagcaacgataaagaaacggaagcagcgtatgaatctgacattccagaggaactgtgcggccatcacttacctcaacaaagcctgaagtcttacaacgactctcccgacgtcatcgtggaagctcaatttgatggatcagactctgaggacggccatgggatcactcagaacgttctggttgatggagttaagaagctgagcgtgtgtgtctccgagaaggataacgagattgaagcacagaggagctcttgggcttatccagtgagtcacaggaagagcgaagagcgcatggtgatgcacaggctgcagaagatgcggccacccgctttccacaagactcaggaactgtatcggaggaatccttgtaaggaccagcaaaggtggttcacctcttggaggaaaaatatactagagcagcagcctgcaagctcaaacagctggctgatccgtaccgctaactgcctcgggaacacaccttgtttcttgccacagacaaccgaatgcttagagttcatgtgtttgtctaggaccgtgccacgtacgctttggcatggattaaagatcatgcctactcattgctccagcgctgcgctgtggaccggaagaaggacagcgatcttaccttggggctcttggctgcgggttttaggtcggctcgttaagcttagcttaaaacagaaggagtattag

SEQ ID NO: 185516 - DNA, 2658 bp, synthetic construct
  misc_feature 1..2658: note = Description of Artificial Sequence: Synthetic coding sequence
  source 1..2658: mol_type = other DNA
atgagccaccccgactaccggatgaacctgcggcccctgggcaccccaaggggcgtttcagccgtggctggcccccacgacattggagcctcaccaggtgacaaaaaaagtaagaaccgctctacgagaggaaaaaaaaagagcatcttcgagacttacatgtcgaaggaggatgtctccgaaggactcaagcgcggaacactcattcagggggtattaagaatcaaccctaagaagttccacgaagctttcattccttctccggacggtgacagagatattttcattgatggcgttgtcgccaggaacagagctctgaacggcgacttagtcgtggttaagctgcttccagaggaacattggaaggtcgtcaaacctgagtctaacgacaaggagacagaagctgcctacgagagcgacatccctgaggaattgtgtggccaccacttacctcagcaatctctcaagtcatataacgatagcccagacgtaatcgtagaagcccagttcgatggaagtgacagcgaggatgggcacggaatcacacagaatgtcctggtcgacggcgttaaaaagctgtcagtatgcgtgtccgaaaagggccgagaggatggcgacgcccctgtgaccaaagacgaaactacctgcatatcacaggacacccgagccctgtccgagaagtccctacaacggagcgctaaggtggtgtatatcctggagaagaaacacagtagggccgcaacaggctttttgaagctgcttgcagacaagaatagtgagctttttagaaagtacgctcttttcagccctagcgaccatagggtgccccggatttacgttcccctgaaggattgccctcaggatttcgtagcacggcctaaggattacgcaaacaccttgtttatttgcagaattgtggactggaaggaagattgtaacttcgctctgggacaactggccaaaagccttggacaggcaggcgaaatcgagcctgaaaccgagggaattctcaccgaatatggggtggacttcagcgacttttcaagtgaagtgctagagtgtctccctcagggattgccctggacaatccctccagaggaattttccaagaggagagacctccgcaaagattgtatttttactatcgatccatctaccgctagagacctggatgacgcgctgtcatgcaagccactggccgacggaaacttcaaagttggggttcacatcgccgatgtatcctattttgtccctgagggcagtgaccttgacaaagttgctgctgagagagcgacttctgtgtatctggtgcagaaagtggtgccaatgttgccccggttactgtgcgaggaactgtgtagtttgaacccaatgagcgacaagttaacattcagcgtcatttggacacttactcccgagggcaaaattctggacgaatggtttgggcggacaatcatccgatcttgtacaaagctgtcttatgaacatgcccaatctatgattgaaagccctactgaaaagatcccagctaaggagcttcccccaatttcccctgagcattcttccgaggaagtgcatcaggcagtgctgaatcttcacggcatcgctaaacagcttagacagcaacgcttcgtggatggagctctccgactggatcagctgaagctggccttcactctggatcatgaaactggactgccacagggctgccacatctacgaatatcgagagagtaacaagttggtcgaggagtttatgctgctagctaacatggccgtggcccataaaatacaccgcgcgttccctgagcaggctctgctgcggaggcatccacccccacaaacaagaatgctctcggatctcgtggagttctgcgaccaaatggggcttccggttgacttctcttctgctggggctttaaacaagtccctgacccagacgtttggggacgacaagtactcacttgcccggaaggaggtgctgactaatatgtgctctaggccgatgcagatggcattatatttttgcagcggcctgttacaggacccagcccaatttcgacactatgccctgaacgttcctctctatacgcatttcacaagcccgatccgccggttcgccgacgtgctagtgcataggttgctcgcagcggctcttggatatagggaaagacttgatatggcgcccgataccctccagaagcaggctgaccactgtaacgatcgccggatggcctctaaaagggttcaggagctctctacatctctattcttcgctgtacttgttaaagagagcgggcctctggaatctgaagccatggtaatgggaattttaaagcaggcctttgatgtgctcgtgctaagatacggtgttcagaagaggatctattgcaacgctctcgccctacgctcccatcactttcagaaggtgggcaaaaagccagagctgactctggtgtgggaacctgaagacatggagcaagagccagcacagcaggtgattaccatttttagtttagtggaggtggttttgcaagccgaaagcacagcactgaaatatagtgccatcctcaagcggcctggtacccagggtcacctgggtcccgagaaggaggaggaagaaagcgatggggaaccagaggacagcagtacttcctag

SEQ ID NO: 185517 - DNA, 750 bp, synthetic construct
  misc_feature 1..750: note = Description of Artificial Sequence: Synthetic coding sequence
  source 1..750: mol_type = other DNA
atgagccaccccgactaccggatgaacctgcggcccctgggcaccccccgtggagtgagcgctgtagcgggaccccacgatataggcgcttcccctggtgacaagaaatccaagaacagatctactcgcggtaaaaagaagtctattttcgagacatatatgagcaaagaggacgtcagcgaagggctcaagcggggcacactcatccagggggtattgagaattaaccccaagaaatttcacgaagcctttattcctagtccagacggcgacagagacatattcattgatggtgttgtcgcccgtaatagagctctgaacggcgatctggttgtcgtgaagctgttgccagaagaacactggaaagtcgtgaagcccgagtccaacgataaggaaaccgaggcggcttacgagtccgacattcctgaggagctctgcgggcaccatctccctcaacagtccctcaagtcttataacgatagcccggacgtgattgtcgaggctcagtttgatgggagcgattccgaagatggccatggaatcacccagaatgtgctagtggacggcgttaaaaagctgtccgtctgtgttagcgagaaggggcgggaggacggagatgcacctgtgactaaagacgagacgacatgcatatcccaagatacccgcgctctgagcgaaaagagcctacagaggtcagccaaggtgatcgcttataggttttctccaagagtgcagatggccttcacatag

SEQ ID NO: 185518 - DNA, 2028 bp, synthetic construct
  misc_feature 1..2028: note = Description of Artificial Sequence: Synthetic coding sequence
  source 1..2028: mol_type = other DNA
atgagccaccccgactaccggatgaacctgcggcccctgggcaccccaaggggggtgtctgctgtggctggcccacacgacatcggcgcctcccctggggataagaagtccaagaacagatcaacacgcggtaagaagaagtccatcttcgagacttatatgtccaaagaggatgtgtcagagggactcaagagaggaaccctgatccaaggagtgcttcgtattaacccgaaaaagttccacgaagcctttattcctagccccgacggagatcgggacatcttcatcgacggcgtcgtcgcccgcaatcgcgcattgaatggcgatctggtggtggtaaaattgctcccagaagagcactggaaggtcgtcaagccagaaagcaatgataaggaaacagaagctgcttatgagtcagacattccagaggagctctgcggtcaccacttgccacaacagtccctgaagtcgtacaatgactcgcccgatgttattgttgaagcccagtttgatgggtccgatagtgaagatggtcacgggatcacccagaatgtactggtcgacggagtcaagaagctctccgtgtgtgtgtctgagaaggggagggaagacggggacgctcctgtgaccaaggacgagacgacatgcatatcgcaggatacccgggctctgagcgaaaaaagcctgcagcgaagcgctaaggtcgtgtacatactggaaaagaagcactctcgagccgccaccgggtttctcaagctgctggctgacaagaactccgagctgttccggaaatatgcactcttttcaccatccgatcatcgggtcccacgcatctacgtgcccttaaaagactgtccccaggacttcgtggctcgccccaaagattacgctaacaccctgttcatctgcaggattgtggattggaaggaggattgcaatttcgcactcgggcagctagctaagtcactgggtcaggctggagagatagagcctgagaccgaggggatcctgacagaatacggcgtggacttttcggatttcagttcagaggtgctggagtgtcttccacagggccttccctggactatcccgcccgaagaattcagcaaacggcgcgaccttcgtaaggattgcattttcacaattgatccctctacagcaagggatttggacgatgccctcagctgcaagcccctagccgacgggaattttaaggttggagtccacatcgcggatgtgtcctacttcgtccctgaggggtcagacttggacaaggtggcagcggagcgggctacctccgtttatctcgtgcagaaggtggtcccaatgttgcctagactgctttgtgaagaactctgctcactcaatcctatgtccgataaacttacatttagcgtgatatggaccctgactcccgagggaaaaatccttgatgagtggttcgggagaaccattatccgctcctgcacgaaactttcatacgaacacgcccagtccatgattgagtccccaaccgagaagatcccagccaaggagctgcctcctatttcacccgagcattcttccgaagaagtccaccaagccgtcctgaatctacatgggattgccaaacagttgcgccagcaacgcttcgtggatggcgccctgcggctggatcagttaaaactggcattcacgcttgatcatgagaccggacttccacagggctgtcacatttacgaatatcgggagagtaataaactggtggaagagtttatgttattagctaatatggccgtcgcccacaaaatccaccgtgcctttcccgagcaagccctactaagacgacacccgcccccacagacacgcatgctgtccgaccttgttgagttctgcgaccagatggggctgcccgtggacttctccagtgccggagccctaaacaagtcacttactcagacgtttggtgatgacaagtatagcctggctagaaaggaggttctgaccaatatgtgtagtagactccccgttccaccacattggctgtag

SEQ ID NO: 185519 - DNA, 435 bp, synthetic construct
  misc_feature 1..435: note = Description of Artificial Sequence: Synthetic coding sequence
  source 1..435: mol_type = other DNA
atgagccaccccgactaccggatgaacctgcggcccctgggcacccctagaggggtgagtgccgtggccgggccacatgacataggagcaagcccaggggacaaaaaatctaagaaccgatctaccaggggcaagaagaagtccatttttgaaacatacatgtctaaggaagacgttagtgagggcctgaaaaggggcacgttgattcaaggcgtcctacgaattaacccaaagaaatttcatgaagcatttatcccatcccctgacggggaccgggacatcttcatcgatggcgtggtggctcgaaacagggctctgaatggcgacctggtggttgtcaaactgctaccagaagaacactggaaggtcgttaagcctgagtcaaacgataaggagactgaagcggcctacgagagtgatattcccgaggaatag

SEQ ID NO: 185520 - DNA, 1860 bp, synthetic construct
  misc_feature 1..1860: note = Description of Artificial Sequence: Synthetic coding sequence
  source 1..1860: mol_type = other DNA
atgagccaccccgactaccggatgaacctgcggcccctgggcaccccccgcggcgtgagtgccgtggcaggcccacacgacatcggagcctcacctggggacaagaagagcaagaacagatctacacgcggaaaaaagaaaagcatcttcgagacctatatgtctaaggaagacgtgagtgaaggactgaaacgcggaacgcttatccagggagtgctgagaatcaatcccaaaaagtttcatgaggcttttatcccctcaccggatggcgacagagacatttttatcgatggagtcgtggcacgaaatcgagccctgaatggcgatctcgtcgtcgtaaagttactccctgaggaacactggaaagtagtcaagccagaaagtaatgataaggagacagaggctgcgtatgagagtgacattcctgaggaactatgtggacaccacctaccccagcagtctctgaagagctataacgactccccagacgtcattgtggaggcccaatttgatggatcagacagcgaagacggtcatggcataacccaaaatgtactcgtggacggagtgaagaaactgagcgtgtgcgtctccgagaagggacgagaggatggcgacgctcctgtcacaaaggatgaaacaacctgtatttcacaggatactcgtgccctctccgagaaatctttgcagaggtccgcgaaggtggtgtatattcttgagaaaaagcatagccgcgcagccacaggtttcctgaagctgctggcagacaagaacagcgaactgttcaggaagtatgccctgttcagcccctccgatcatagagtgccccggatatacgtccctttgaaagattgccctcaggacttcgtcgcacgccccaaggactacgccaatacactgttcatttgtaggatcgtggattggaaggaggattgcaactttgcgctcgggcagcttgctaaatctctggggcaggccggggaaatcgagcccgagacagaaggtattctcaccgagtatggtgtagacttctccgacttttcatcagaggtgctagaatgtctccctcagggactgccctggacgattcccccggaggagttcagcaagcgccgggacctgagaaaggattgcatttttacaatagatccaagtactgcaagagatcttgatgacgctttgtcctgtaaacccctggctgatgggaactttaaggtcggggtgcacattgccgacgtgtcctatttcgtccccgagggctcggacctggacaaggtggccgctgagcgagccacctccgtttacctagtgcagaaagtggttccgatgctgccccgattgctgtgtgaggagctttgcagcctgaacccaatgtccgataaattgaccttttcagtgatctggactctgacaccagagggcaaaattctagatgaatggttcgggagaaccataattcgtagttgtactaaactgtcatacgagcatgcccagagcatgatagagtctcccacggaaaagataccagctaaggagctgccccctatttcacccgagcattctagtgaggaagtgcatcaagccgtgcttaacctccacgggatcgccaaacaactgagacaacagagattcgtggacggagctctgcgcctcgaccaactcaagttggcgtttactctggaccacgagaccgggctgccccagggctgtcatatctacgagtaccgggaatcaaacaagccgtgttgcgccgggacacctaggcccaaacagggttgttcagtcacgtggtggaactccgcaaccagatgggggtgcccatggacaagcgcccctcaggaaccaagcatgaaggcctag

SEQ ID NO: 185521 - DNA, 615 bp, synthetic construct
  misc_feature 1..615: note = Description of Artificial Sequence: Synthetic coding sequence
  source 1..615: mol_type = other DNA
atgagcaccgagaccgagctgcaggtggccgtgaagaccagcgccaagaaagactctcgaaagaaagggcaggatcggtccgaagcgacccttatcaagagatttaaaggcgaaggcgtgagatataaagctaagttaatcggcattgacgaagtgagcgccgctcgaggggacaaattgtgccaggactctatgatgaaattgaagggagttgtcgccggggcccgctccaagggtgagcacaaacaaaagattttcctgacaattagcttcggaggcatcaaaattttcgatgagaaaaccggtgccctgcaacaccaccacgcggtccacgagattagttacatcgcaaaggacattaccgatcaccgggccttcggatacgtgtgtggtaaagaggggaaccacagattcgtcgcaatcaaaactgcacaggccgcggagccagttatcctcgaccttagagacctttttcaacttatttacgagttgaaacagagagaggaacttgaaaaaaaagcacagaaagataaacagtgtgagcaggctgtgtaccaggtgcccacgtcacagaagaaggagggagtctatgacgtgccaaagagccagccatag

SEQ ID NO: 185522 - DNA, 642 bp, synthetic construct
  misc_feature 1..642: note = Description of Artificial Sequence: Synthetic coding sequence
  source 1..642: mol_type = other DNA
atgagcaccgagaccgagctgcaggtggccgtgaagaccagcgccaaaaaggactccaggaaaaaggggcaggacagaagtgaggcaacccttatcaaaaggttcaagggcgaaggcgtgcggtacaaagccaaattgatcgggatcgatgaggtcagtgctgcaagaggggacaaactgtgccaggattcaatgatgaagctcaagggcgtggtggccggtgcaaggtctaaaggagagcataagcaaaagattttcctgacgatctcgttcggcggtattaagatctttgacgagaagacaggcgcactgcagcaccatcacgccgtgcacgagatctcctacattgcaaaagacatcaccgatcaccgggccttcggctatgtgtgcgggaaggaagggaaccaccggttcgtggcaataaagaccgctcaggcagcggagccagtaatcctggatttaagagatctctttcagttgatttatgagctgaaacagcgggaggagctggagaaaaaggcccagaaggacaagcagtgtgagcaagccgtctaccaaaccatcctcgaggaggacgtggaagaccctgtgtatcaggttattagtgaaacaagcagaggtttccggtttaaaagcgattag

SEQ ID NO: 185523 - DNA, 1767 bp, synthetic construct
  misc_feature 1..1767: note = Description of Artificial Sequence: Synthetic coding sequence
  source 1..1767: mol_type = other DNA
atgagcaccgagaccgagctgcaggtggccgtgaagaccagcgccaagaaagattctcgcaagaaagggcaggataggtcagaggcaacactcatcaagagattcaaaggagaaggagtccggtacaaagctaagctgattggcatcgatgaggtttctgccgcccgcggagataagttgtgccaggatagcatgatgaaactgaagggtgtcgttgcaggtgcccgctcaaagggagaacataagcagaagatctttttgaccatcagctttggcgggataaaaatctttgatgaaaagaccggagccttgcaacaccaccatgctgtccacgagattagctacatcgccaaagacatcacagatcatagagcctttggatacgtttgtggcaaggaggggaaccacagatttgttgcaatcaagacagctcaagccgccgagcccgtgatcctggatctccgcgacctgtttcagctaatctacgagttgaagcagagggaagaattggaaaagaaggcgcaaaaagacaagcagtgcgaacaggctgtgtatcagacaattcttgaggaagatgtggaagacccggtgtaccagtacatcgtctttgaggcaggccatgagccaattcgcgatcctgaaacagaggagaatatttatcaagttcctactagtcagaagaaggagggagtttacgatgttcccaagtcgcagccagtctcaaacggatactctttcgaagactttgaagaacggttcgccgccgctactccgaacaggaatttgccaacagactttgacgaaatttttgaagctaccaaggctgtcacccagcttgaactgtttggtgatatgagcacccctcctgatatcacatctccacctacccccgccacaccaggggatgccttcatcccctccagtagccagaccctccccgccagcgcagacgtgtttagctctgttccttttgggaccgcagctgtaccgagcggctacgtagcgatgggcgctgtgcttccctcattctggggacagcagccgctggtacagcaacagatggttatgggagcccaaccccctgtggctcaagtgatgcccggcgcacagcccatcgcttggggccagcctggtctgtttcccgccacccagcagccctggccaactgtcgcaggccagttccccccagctgcctttatgccgacacagacagtcatgcctcttcctgccgccatgttccaagggcctctgactccactagccacggttcccggcacctcagacagtactcggtcgtcccctcaaacagacaaaccgcggcaaaaaatggggaaggagacttttaaggacttccagatggctcagccccccccagttccttctagaaaacccgaccagccaagcctaacttgtacatctgaagccttctcctcatattttaataaagttggtgtggctcaggatactgacgattgcgacgatttcgatatctcacagttgaatctgacacccgtgacatctacaactccatctaccaatagtcctccgacccccgccccccggcagtcgtctccttccaagtcctctgcttcccacgcatccgatcctactaccgatgacatttttgaggagggctttgagtccccttccaaaagcgaagaacaggaggctccggacggtagccaggcctcttccaatagcgatcctttcggggaacccagcggcgagcctagcggagacaatattagcccccaggccgggagttag

SEQ ID NO: 185524 - DNA, 720 bp, synthetic construct
  misc_feature 1..720: note = Description of Artificial Sequence: Synthetic coding sequence
  source 1..720: mol_type = other DNA
atgagcaccgagaccgagctgcaggtggccgtgaagaccagcgccaaaaaggactcacgcaaaaaaggccaggataggtctgaggcaacactgatcaagagattcaagggcgaaggagtaagatacaaagcaaaactgatcggaattgacgaagtgagcgccgcgcgtggagataagctgtgccaagattctatgatgaaactaaagggcgtggtcgccggtgcgagatctaagggggaacacaaacagaaaatattcctgacaattagctttggtggtattaagatattcgacgagaagaccggtgtgcctacctcacagaagaaagagggagtttatgacgtgccaaagagccagcctgtttccaacgggtattcgttcgaagactttgaggaacggtttgccgccgctaccccaaaccgaaacttgcctactgactttgatgaaattttcgaagcgacaaaagccgtgacccagctggagctgttcggggacatgtctacacctccagatattacctcacccccaacaccagcaaccccaggagacgcctttattccatccagctcccagaccctgccggcatccgcagatgtcttcagttcagtcccctttggcaccgcagcggttccttccggatacgtcgccatgggtgctgttctgccttcgttctggggtcagcagcctcttgtccagcagcaaatggtgatgggcgcttag

SEQ ID NO: 185525 - DNA, 1668 bp, synthetic construct
  misc_feature 1..1668: note = Description of Artificial Sequence: Synthetic coding sequence
  source 1..1668: mol_type = other DNA
atgagcaccgagaccgagctgcaggtggccgtgaagaccagcgccaagaaggactccaggaaaaaaggacaggatcgctcggaagccaccctcatcaagcgtttcaagggcgagggggtgcgctacaaagctaaactgatcgggatcgacgaagtctctgcagctcggggggataaattgtgtcaagactcgatgatgaagctgaaaggcgtggtggccggagcacggagtaaaggagaacacaagcagaaaatattcctcacaataagctttggagggattaaaatcttcgacgagaagacgggcgccctacagcaccaccatgccgttcacgagatcagctatatcgccaaagacatcacagaccacagggcatttggatacgtttgcggaaaggaggggaatcatagattcgttgccattaagactgctcaggccgctgaaccagttatcctggatctgcgcgacctgtttcagctcatctatgaacttaagcagcgtgaggagcttgagaagaaggcacagaaggataaacaatgtgaacaagccgtttatcagactatacttgaggaggacgtggaggaccccgtctaccaatacatcgttttcgaggccgggcatgagcctatccgtgatccagaaactgaggagaacatttaccaggttcccacaagccagaagaaagagggagtctacgacgtccccaagagtcaacctgtgagcgctgttacccaactggagttgttcggcgacatgtccacaccacccgacattacctctccccccactccagccactcccggcgacgcctttatcccatcttcttcccaaaccctcccagcctccgcagatgtcttttctagtgttccattcggcacagccgctgtcccgtcaggatacgttgctatgggcgccgtcttgccaagtttttgggggcagcagcctctggtgcagcagcagatggtgatgggagcccagcctcctgtggctcaggtcatgcccggggctcagccaatcgcctggggtcagcctggtctatttcccgcaacccagcaaccgtggcctactgtggctggccagttcccccctgcggcatttatgcctacacagaccgtgatgcccctccctgctgcgatgttccaggggcctctcactcctctggccacagtacctggtacctctgactctaccagaagttctccacagacagacaagcctcggcagaaaatgggcaaggagacgtttaaggacttccagatggcccagccacccccagtgcccagcagaaagccggaccagccctctcttacttgcacctccgaagcgttttccagttacttcaataaggtaggagtagcccaggacacggacgattgcgacgattttgacatcagtcaattaaatctcacccccgtcacatccacaaccccatccaccaattctccccctactccagcgccccgtcagagctcccctagtaagagctcagccagccatgcctcggaccctacaacagacgatatcttcgaggaaggctttgaaagcccgtccaagagtgaagagcaggaggctcctgatggttctcaggcatcttctaactccgacccgtttggagagccctctggtgagccatcaggtgacaacatcagtccccaggccgggagctag

SEQ ID NO: 185526 - DNA, 1668 bp, synthetic construct
  misc_feature 1..1668: note = Description of Artificial Sequence: Synthetic coding sequence
  source 1..1668: mol_type = other DNA
atgagcaccgagaccgagctgcaggtggccgtgaagaccagcgccaaaaaggactccagaaaaaaaggccaggatcggtctgaagccaccctcatcaagagatttaagggagagggtgtcagatataaggcgaagcttatcgggattgatgaggtttccgccgcaaggggggacaaattgtgtcaggacagcatgatgaaactgaaaggcgtagtcgcaggcgcacgctcaaaaggcgagcacaagcaaaaaattttcctgacaataagtttcggcggtataaagatcttcgatgagaagaccggagccctgcagcatcatcatgctgtgcatgaaatatcttatatcgccaaggacatcacggaccatagggctttcggctatgtgtgcgggaaggagggcaaccataggttcgtcgcaattaagactgctcaggccgccgaacctgtaattctggacctcagggatctattccagctgatatacgaactgaaacagcgagaggaattagaaaagaaagcacaaaaggataagcagtgtgaacaggcagtgtatcagaccatactcgaagaagacgtagaggacccagtgtatcaatatatcgttttcgaggccggccacgagcctattcgagaccccgagaccgaggagaatatctaccaggtgccgacatcccagaagaaggagggggtttacgatgtacctaagagtcagcccgtgtcagctgttacacaactcgaactgttcggggacatgtctacccctcccgatatcaccagcccacctacaccagccacgccaggggatgccttcatcccttcttcttctcagacgctccccgcctcagcggacgtgtttagctcggtaccattcggcacggccgctgttccttcaggatatgtggctatgggggcagtgctgccctcattttggggccagcagcctctggtgcagcagcagatggtgatgggcgcccagcctcctgtggctcaggtgatgcccggtgcacaaccgatagcctggggacagcccgggctgtttcctgcaacccaacagccgtggccaactgtcgcaggtcagttcccccctgcggccttcatgccaacgcagacagtgatgccactgccagctgcgatgtttcaggggcctctcactcccttggctacggtgccgggtactagcgatagcactagatcttccccacagaccgataagcccagacagaaaatgggaaaggaaacatttaaagactttcagatggctcagccaccgcctgtccccagccgtaaacccgatcagccaagcttgacgtgtacctccgaggctttctcctcatactttaataaggtcggtgtcgcccaggataccgacgattgtgacgacttcgatatttcccagctgaatctaacaccagtgactagcaccactcccagtactaacagccccccaacccctgccccgcgccaatcctccccgtccaagagttccgcctcacacgcttcagaccccaccacagacgacatcttcgaggagggctttgagtccccctccaaaagtgaggagcaggaagctccagatggtagccaggctagtagcaatagtgacccattcggtgagccttctggcgagcctagcggggataatatcagcccgcaagctggatcctag

SEQ ID NO: 185527 - DNA, 1668 bp, synthetic construct
  misc_feature 1..1668: note = Description of Artificial Sequence: Synthetic coding sequence
  source 1..1668: mol_type = other DNA
atgagcaccgagaccgagctgcaggtggccgtgaagaccagcgccaaaaaagattctaggaagaaggggcaggaccggagcgaagcaaccctgattaaacgcttcaagggagagggggtacgctacaaggccaaacttattggaatcgacgaagtgagcgccgcccgaggcgataaattgtgtcaggacagcatgatgaaattaaagggtgtcgttgccggcgccaggagcaagggagagcacaaacagaagatcttcttgactatttcatttgggggaatcaaaatatttgatgaaaaaacaggagccctacagcatcatcacgctgtgcatgaaatttcatatatcgccaaggacataactgatcatagggccttcgggtatgtttgcggaaaggaggggaatcaccggttcgttgcaatcaaaactgcccaagctgctgaacctgttattcttgacttgagagatctatttcagctgatctatgaacttaagcagcgtgaggagttggaaaaaaaggcacagaaggacaaacagtgtgaacaggcagtgtaccagactattttggaggaagatgtggaagaccctgtgtatcaatacatagtgttcgaagcagggcacgaacccatcagggacccagaaaccgaagaaaacatctaccaggtgcccacaagtcagaagaaagagggcgtctatgatgtgcctaagtctcagccggtgtctgccgttacacagctagaactgttcggggacatgagcacacctcccgacatcacttcgcctcccacacccgccaccccaggggatgccttcatcccatcatcctctcaaacgctcccagcgagtgcagatgtgtttagctccgtcccattcggaactgccgccgttccaagcggctacgtggccatgggtgcagtcctgccttccttctggggacaacagccactggtgcagcaacagatggtcatgggcgcacagccacctgttgctcaggtcatgccaggcgcgcaacctatcgcgtggggccagcctgggctcttcccagccacgcaacaaccttggcctaccgtggcaggtcagtttccacccgccgcttttatgcctacccaaactgtgatgcctctgccagccgccatgttccagggaccgctgaccccactggccactgttcctggtacttcagacagtacgcggtcttctccacagaccgataaaccgcggcagaaaatggggaaggagacttttaaagatttccagatggctcaaccaccacccgtgccctcccggaagcccgatcaacccagcttgacatgcacatccgaagctttcagctcgtactttaacaaagttggcgttgcccaggacacagatgactgtgacgactttgacattagccagttaaacctgacgcccgtcactagcaccacgcccagtaccaacagcccccctactcccgcgccaagacagtcatcaccaagtaagtctagcgccagtcatgccagcgatcctaccaccgatgacatttttgaggaaggatttgagagcccctccaagtctgaggagcaggaagctccagacggatcacaggccagctccaatagtgatccttttggggaaccctcaggagagccaagcggggacaacatatctccccaggctggcagctag

SEQ ID NO: 185528 - DNA, 1614 bp, synthetic construct
  misc_feature 1..1614: note = Description of Artificial Sequence: Synthetic coding sequence
  source 1..1614: mol_type = other DNA
atgagcaccgagaccgagctgcaggtggccgtgaagaccagcgccaaaaaggattctcggaagaaaggacaggatcgcagcgaggcgacactcataaagagattcaagggagagggggtcagatataaagccaaactcatcgggattgacgaggtttctgctgcccggggcgacaaactctgtcaggattccatgatgaaactcaagggtgtagtggctggggcaagaagtaagggcgagcacaaacagaaaatctttttgacgatctccttcggcggaattaaaatattcgatgagaaaacaggagccctgcagcatcaccatgccgtgcatgagatttcatatatagcgaaagatatcacagaccatcgcgctttcgggtacgtatgcggtaaggaggggaaccacagattcgtcgccatcaagactgctcaggctgccgaaccggtcatcctggacctaagagatctgtttcagctgatatacgagctgaaacagcgcgaggagttagaaaagaaggcgcagaaagacaaacaatgtgaacaagccgtgtatcaagtcccaacatcgcagaagaaggagggagtctacgatgtgccaaaatctcagcctgtctcaaacggatattcatttgaggactttgaagagcgcttcgcggccgcaacccctgccgtgacgcagctcgagttattcggtgacatgagcacgccgcctgatatcacatcccccccaacacccgccacccccggagacgccttcattccttctagcagtcagaccctgcctgcctccgccgacgtcttctcctcggtgcccttcggcaccgcagccgttccatctggatatgttgcgatgggggcagtgctgccctccttctggggacagcagcctcttgtccagcagcagatggtgatgggtgcccagccgcccgtggcccaggtaatgcccggggcccagcccatagcatggggtcagcccggactgtttcccgcaacccagcagccatggcccaccgtggctgggcagttcccccccgccgctttcatgccgacacagacggtcatgcctttgccagctgctatgttccagggaccactgacaccgctagccactgtgcccggcacgtcagacagtactcgtagcagtccccagacagataagccaaggcaaaagatgggcaaggaaactttcaaagattttcagatggctcagcctccccccgtgcccagtaggaaacccgaccagccgtcacttacttgtacgagtgaagcctttagttcttactttaataaggtcggagtggctcaagacacagacgactgcgacgactttgatatttcccaactgaatttaaccccagtcacatccaccacaccttccacgaattcacccccaacgcctgccccacggcagagcagcccttccaagtccagtgcctcccatgcttccgatcccacgactgatgacattttcgaagaaggctttgaaagcccttcaaaaagcgaggagcaagaggctccagacgggtcccaagcatcttcaaactcagatcctttcggcgagccttccggagaacccagcggcgacaacatctctccacaggccggcagttag

SEQ ID NO: 185529 - DNA, 1662 bp, synthetic construct
  misc_feature 1..1662: note = Description of Artificial Sequence: Synthetic coding sequence
  source 1..1662: mol_type = other DNA
atgagcaccgagaccgagctgcaggtggccgtgaagaccagcgccaagaaagatagcagaaagaagggccaggatcgatccgaagcaacactcattaaacggttcaagggcgagggtgttcgctacaaagcgaaactcattggcatcgatgaagtctcggcagcccggggtgataagctctgtcaagactccatgatgaaactgaaaggtgtggtggcaggggccaggagcaaaggcgagcacaagcaaaagatctttctcaccatcagttttggcggaattaagatctttgacgagaagacgggcgcgcttcaacatcaccatgccgtccacgaaatctcatatatagctaaggatatcacagatcacagagctttcggatacgtctgcggtaaagaagggaatcaccggtttgtcgcgatcaagactgcccaggcggccgaaccggttatccttgatttgagagacctcttccagctgatatatgagctgaaacagcgcgaggagctggaaaagaaagcccaaaaggataagcagtgtgaacaggccgtgtaccaggtccctacctcccagaagaaggagggagtatatgatgtgcctaaatctcagcctgtatccaacgggtacagtttcgaggattttgaagagcgctttgctgccgccactccgaaccggaatttgcccacagacttcgacgaaatcttcgaggcgacaaaggctgtgacacagcttgaactgttcggagatatgagcacaccccctgacatcacatccccacccacacccgcaacccctggtgacgctttcatcccctccagcagccagacccttccggcctcagccgatgtgttttcatctgtgcctttcggaaccgcggccgtaccctctgggtacgttgctatgggagccgtactaccaagcttctggggacaacagcccttggtccagcagcagatggttatgggagcccagccccctgtggcccaggttatgccgggtgctcaacccatcgcttggggacagccaggtttatttcccgccacacagcaaccgtggccgacagtagccggccagtttcctcccgcagcctttatgccaacgcagactgtaatgcccttacccgctgctatgttccagggcccgctgacaccacttgccacggtacccggcacttcagatagcactcgcagctcccctcagaccgacaaacctcgtcagaagatgggcaaggagacttttaaggatttccaaatggcacagccgccgcctgtgccttcccgaaaacctgaccagccatcgctcacatgcacatccgaagccttttcgtcctactttaacaaagttggcgttgcccaggacactgatgattgcgacgactttgacatctcgcaactaaatctcacacctgtgaccagtaccacaccaagtactaattctcctcccacacctgcgccaaggcagagttctccctctaaatcctcagcatctcatgcatccgaccccacaactgatgatatctttgaagagggcttcgagtccccttcaaagagcgaagagcaagaagctccggacggtagccaggctagctctaatagcgacccttttggcgaaccttccggcgaacccagcggcgataatatctctcctcaggcggggagctag

SEQ ID NO: 185530 - DNA, 1410 bp, synthetic construct
  misc_feature 1..1410: note = Description of Artificial Sequence: Synthetic coding sequence
  source 1..1410: mol_type = other DNA
atgagcaccgagaccgagctgcaggtggccgtgaagaccagcgccaaaaaagattcaagaaaaaagggacaggacagaagcgaggctacactgatcaagagatttaaaggggaaggagtgcggtacaaggccaagctgataggaatcgacgaagtctccgcagctcgcggagacaagctttgccaagacagtatgatgaaactcaaaggcgtggtcgccggagcccggtccaagggcgaacacaagcagaagattttcttaaccatcagtttcggcggcattaagatctttgatgagaaaacaggcgtacccactagtcagaaaaaggaaggggtttatgacgttccaaaatcacagcctgtgtccaatggatacagttttgaggactttgaggagcgtttcgctgccgctacgcctaaccggaatctacctacagactttgacgagattttcgaggctaccaaggccgttacccagctggagctgttcggggacatgtctacaccacccgatattacttccccacctacgccggccactccgggcgacgcattcattccctctagttcccagaccctgcctgcaagtgcagatgtcttctcatctgtcccctttggaactgctgccgtccccagcggctacgtggccatgggggccgtgctccccagcttctggggtcagcagccactagtgcaacagcaaatggtgatgggcgcacagcctcccgtggcacaggtgatgccaggagctcagccgatcgcttggggccagcctggattgttcccggccacccaacagccatggcctaccgttgctgggcagttccctcccgctgctttcatgccaacgcagactgtcatgcccttgccagccgccatgtttcagggtcctctgacccccctggctactgtgccaggaacttcagacagcacgaggtcttcccctcagacagacaagcctaggcagaaaatgggcaaggagacattcaaagactttcaaatggctcaaccccctccagtgccttcaagaaagccagatcagcccagtttgacatgtacatccgaagcctttagctcatacttcaataaggtcggggtcgcacaggacactgatgattgtgatgacttcgacatatcccaacttaaccttacccctgtgacttctacaacaccctctactaacagcccccctacaccggcccctcgacagagctcgccctctaaatcgtctgcttcacatgcatccgacccaacaaccgatgacatcttcgaagaaggattcgaatccccttcaaaatccgaggaacaggaggctcccgatggatctcaagcttcttcaaattccgacccgttcggcgagccgagcggcgagccaagtggagataacatctctccacaagctgggtcctag

SEQ ID NO: 185531 - DNA, 2313 bp, synthetic construct
  misc_feature 1..2313: note = Description of Artificial Sequence: Synthetic coding sequence
  source 1..2313: mol_type = other DNA
atgagcaacgaggtggagaccagcgccaccaacggccagcccgaccagcaggccgcccctaaagctccatccaaaaaagaaaaaaaaaaggggcctgaaaagacagacgaatacctcttagcaaggtttaaaggagatggcgtgaagtacaaggccaagctcattggaatagacgatgtccccgatgccagaggagacaaaatgtcacaggactctatgatgaagctcaagggcatggctgccgctgggaggtctcaggggcagcacaagcagaggatctgggtgaacatcagtctctctggtataaagatcatcgacgaaaagactggggtgatagagcacgagcaccccgtgaacaaaatctccttcattgcgcgagatgttactgataacagggctttcgggtacgtctgcggcggcgagggacagcaccaattctttgcaatcaagactggccagcaggctgagcctcttgttgttgacttaaaagatctatttcaggtaatttacaacgtcaaaaaaaaagaagaggaaaagaagaaaattgaagaggctagcaaggcagtggagaacggctcagaagcactgatgatattagatgaccagacaaataagctaaagagcggggtcgaccagatggacctctttggagatatgtctaccccccccgacctgaactctcccacagaaagtaaagacattctcctggtagatctgaactcggagatcgacacgaatcagaatagtcttcgagaaaacccattcctgacaaacggcatcacgagttgctcacttcctaggccgacccctcaagcttcttttctgccagaaaatgctttcagtgccaacttgaatttctttcccactcccaacccagatccgttccgagacgatcctttcacccagcctgatcaatccacacctagcagctttgatagtttaaaatcaccagatcaaaagaaggaaaatagtagttcctcttctacgcctctctccaacgggcctcttaacggcgatgtggactattttgggcagcagttcgaccaaatctctaaccgaacgggaaagcaggaagcccaggccgggccctggccattttcctcctctcaaacacagcctgcagtgagaacacaaaatggagttagcgaacgggaacaaaacgggtttagtgtgaagtctagtcccaaccccttcgtgggctcaccacctaagggcctcagcatccaaaatggggtcaaacaggatcttgagtcaagcgtccagagcagtccccatgacagcatagcgatcatccccccgcctcaatccaccaagccaggtcggggacggcgcacagccaagagctcagcaaatgacctgcttgcctcagatattttcgcaccacccgttagtgaaccctcaggccaggcctctcctactggtcagcccactgctctacagccgaaccccctcgacttattcaagacgtccgcaccggcccctgtggggccacttgttggcctgggtggagtgactgtgaccctgcctcaggcaggaccatggaatacagcatctctcgtgtttaatcagtccccaagtatggcccccggcgccatgatgggcggccaaccttctggatttagtcaacccgtgattttcggtactagccctgccgtctccggctggaaccagccctccccattcgcagcatccacaccaccacccgtccctgtcgtgtgggggccttcggcttcagtggccccaaacgcatggtcaacgaccagtccactggggaatccatttcagtctaacatttttccggccccagccgtcagtacccagccccccagcatgcactcttcacttctggtgacacctccgcagcctcccccccgagccgggccacccaaggacatttcctccgacgcctttaccgcattagatcccttgggcgacaaggagataaaagacgtaaaggaaatgtttaaagacttccagctgagacagcctccagctgtgccagccagaaaaggcgaacagacatcttctggcaccctgagtgctttcgctagttacttcaatagtaaggtcggtattccacaggagaatgcggatcatgatgacttcgatgcaaaccaattacttaacaagattaatgagccgcctaagccagccccaaggcaggtgagccttccagtgactaagagcacagataatgcgttcgagaaccccttttttaaggattcatttggatcctcccaggcctctgtcgcatcctctcaacctgtgagctctgaaatgtacagagacccctttggaaacccctttgcgtag

SEQ ID NO: 185532 - DNA, 1659 bp, synthetic construct
  misc_feature 1..1659: note = Description of Artificial Sequence: Synthetic coding sequence
  source 1..1659: mol_type = other DNA
atgagcaacgaggtggagaccagcgccaccaacggccagcccgaccagcaggctgcccccaaagcgcctagtaagaaagagaaaaaaaagggccccgagaagactgacgagtatctgttggcaagattcaagggagatggagtcaaatataaggccaagctgattggcattgatgatgtgcccgatgcacggggcgacaaaatgtcacaggattctatgatgaagctcaagggaatggccgccgcagggaggagccaggggcagcacaagcagcgcatctgggtcaacattagcctgtccggaatcaagattatcgatgagaagacaggagtaattgagcacgagcaccccgtcaataagatttcctttatcgcaagagatgtcaccgacaatagagccttcggttatgtatgtggcggtgaaggccaacatcagttctttgctattaagacgggtcaacaggctgagccactcgtggtcgacctgaaggatttgttccaagttatttataatgtgaaaaagaaggaagaggaaaagaagaaaatagaggaggcgagtaaggctgttgagaatggctccgaagccctgatgatactcgatgaccagactaacaaactgaagtcaggcgtcgaccaaatggacctttttggggatatgtccactcctcccgatcttaattcgcccacctctagcgcaaacgacctgctggcttccgacatctttgccccccccgtctccgagcccagcggccaggcatcccccacagggcagcctactgctctgcaaccaaatccgctggatctatttaaaacttccgctccagctccagtcggcccattggtgggtctaggaggtgttaccgtgaccctccctcaggcggggccatggaacactgcgtcattggtttttaaccaaagcccctcaatggcgcctggagccatgatgggggggcaaccttcagggtttagtcagccggttatcttcgggacctctccggcagtgtccgggtggaatcaaccaagccctttcgctgccagtacccctccccccgtgcccgttgtgtggggtccgtctgcgtctgtcgcaccgaacgcctggtccaccacatctcctctcggaaatccctttcagtccaacatttttccagcacccgccgtgtccacccagccaccttcaatgcattcttcacttctggtgactcccccccaaccgcctccccgagctggcccccctaaggatatcagtagtgatgccttcaccgccctggatccattgggggacaaggaaatcaaggacgttaaagaaatgtttaaggactttcagctccgacagccgcctgcggtacctgcccgaaagggagaacagacatcatctgggactctctccgctttcgccagctatttcaatagcaaagtcggcattccacaggagaacgctgatcatgatgactttgacgccaaccagttgctcaataagatcaatgagccaccaaagcccgcccctcgccaggtgtctctgccggtgacaaagagtactgataatgcttttgaaaacccctttttcaaggacagtttcggctccagtcaggcctcggtagcgagttcccagcctgtgagcagtgagatgtaccgtgatccttttggcaatccgtttgcatag

SEQ ID NO: 185533 - DNA, 204 bp, synthetic construct
  misc_feature 1..204: note = Description of Artificial Sequence: Synthetic coding sequence
  source 1..204: mol_type = other DNA
atgagcaacgaggtggagaccagcgccaccaacggccagcccgaccagcaagctgccccgaaagccccctccaaaaaagagaagaagaaggggccggagaaaaccgacgaatacttattggctagatttaaaggtgacggcgtgaagtacaaggctaaactgatagggattgacgatgtgcccgacgctagaggtgacaaatag

SEQ ID NO: 185534 - DNA, 231 bp, synthetic construct
  misc_feature 1..231: note = Description of Artificial Sequence: Synthetic coding sequence
  source 1..231: mol_type = other DNA
atgagcaacgaggtggagaccagcgccaccaacggccagcccgaccaacaggccgcaccaaaggccccatctaaaaaggagaagaagaaagggcccgagaagaccgacgagtatctcctggcgaggttcaaaggggacggggtgaaatacaaggcaaagctgattggaatagacgacgtgcccgatgccaggggggataaaatgtctcaggattcgatgatgaaactgtag

SEQ ID NO: 185535 - DNA, 120 bp, synthetic construct
  misc_feature 1..120: note = Description of Artificial Sequence: Synthetic coding sequence
  source 1..120: mol_type = other DNA
atgagcaacgaggtggagaccagcgccaccaacggccagcccgaccagcaggcagccccgaaggcccctagtaaaaaggaaaagaaaaaaggacccgaaaagaccgacgagtacttgtag

SEQ ID NO: 185536 - DNA, 2250 bp, synthetic construct
  misc_feature 1..2250: note = Description of Artificial Sequence: Synthetic coding sequence
  source 1..2250: mol_type = other DNA
atgagcaacgaggtggagaccagcgccaccaacggccagcccgaccagcaggcagcccctaaggctcccagtaagaaggagaaaaaaaaaggtccagaaaagactgacgagtatttgctggccaggtttaagggcgacggggtaaagtacaaggccaagctgattggtatcgacgacgtgcccgatgccaggggtgacaagatgtctcaggattcaatgatgaagctgaaaggaatggcagccgcagggaggtctcagggccaacacaaacagcggatctgggttaatatcagtctctccggtatcaagatcattgacgagaagaccggcgttattgaacacgaacaccccgtaaacaagatcagctttattgcacgagatgttaccgataatcgagcctttgggtatgtttgcggaggggaagggcagcatcagttctttgccatcaagacggggcagcaggcagaacctctggtggtcgatctcaaggatctcttccaggtaatctataacgtcaagaagaaagaagaagaaaagaagaaaatcgaggaggcgagcaaggcggtggagaatgggtccgaggcattaatgatacttgacgatcagactaacaagcttaagtcggagtccaaagacattctgctggtcgacctgaattcagagatcgacacgaaccagaactcactacgcgagaaccctttcctgaccaacggcatcacgtcctgctctctaccccgccctacgccccaagcgagcttcctccccgaaaatgccttttcagccaatctgaacttttttccaactcccaatcccgaccctttccgggatgatccattcacccagcctgatcagagtacgccctcatccttcgatagcctgaaatctcctgatcagaagaaagagaattcaagttcgagtagcacacctctctccaatggaccgcttaatggggatgtggactattttggccagcaatttgatcagatttcaaaccgcacaggcaagcaggaggcccaggccggaccatggccattttctagcagtcagacacagcctgccgtgaggacgcagaatggtgtctccgaacgggagcagaacggtttttccgttaaatcctctcccaatccattcgtgggaagccctccaaagggactgtctatccagaacggagttaagcaggatctagaatcatctgtacaatcctcaccgcacgacagcattgcaatcatccccccaccccagagcacaaaaccgggacgcggcagaaggacagccaagagcagcgccaatgatcttctggcctctgacatctttgcacctccagtctcagagccttcaggccaggcgtcccctacaggccagcctacagctctgcagcccaaccctttagatttgttcaaaacctccgcccccgctcctgtgggtccattagtcggattgggtggtgtgacagttacactcccacaggcaggaccttggaatacggcctcattagtgtttaaccagtctcctagcatggccccaggcgccatgatgggtggccagcctagtggattctctcagcctgtaattttcggaacttctccggccgtgtctggatggaaccagcccagcccttttgccgcaagtacaccaccaccagtcccagtggtctggggtccatccgcctcggtcgcacctaacgcgtggagcaccaccagtcccctgggcaacccgttccaaagtaatatcttccccgcacctgccgtgtctacacaacctccctccatgcatagtagtctactggttactcctcctcagccaccaccgcgggcaggacctcccaaggacatcagcagcgacgcatttacggctctggatccgcttggcgataaagagataaaagacgttaaggagatgttcaaggacttccaacttcggcagccccccgccgtccctgccaggaagggggagcaaacctcttcaggaaccttgtccgcttttgcatcttatttcaattcgaaagtgggtatcccacaagaaaatgccgaccacgacgattttgacgcgaaccagctgttaaataaaataaacgagcctcccaagcctgcgccaagacaggtgagcctgcccgtgaccaaaagcactgacaatgccttcgagaaccccttcttcaaggatagctttggatcctcccaggcgagcgtagcgtcttcccagcctgtgagttctgagatgtacagggaccctttcggaaacccgttcgcctag

SEQ ID NO: 185537 - DNA, 2568 bp, synthetic construct
  misc_feature 1..2568: note = Description of Artificial Sequence: Synthetic coding sequence
  source 1..2568: mol_type = other DNA
atgatcctgatcccccggatgctgctggtgctgttcctgctgctgccgatcctttcaagtgcgaaggcccaggtgaaccccgcaatttgccgctaccccctcggtatgagtggaggccaaatccctgatgaagatattacagctagtagccagtggtctgaatctaccgcggccaagtatggacgcttggactctgaggaaggagacggggcttggtgtcccgagatccctgtcgagcccgacgatttaaaagagtttttgcagatcgacttgcatacactacacttcatcaccctggtcggaacccaaggtcgacacgctggtgggcacgggatagagttcgcccccatgtataaaatcaattactcaagggatggaacccggtggatttcttggagaaatcgtcacgggaagcaggtgctggatggcaactccaacccatatgacattttcctcaaagatctggagccaccaatagtggctcggttcgttaggttcattcctgtgacggatcattcaatgaacgtctgtatgcgcgtggaactgtacggatgtgtctggctggacggacttgtctcctataatgcaccggccggacagcaatttgtgctccccggaggaagcattatctacctcaatgacagcgtttatgacggcgccgtcggttattccatgacagagggactgggacagcttacggacggcgtcagtggccttgacgattttacccagacacatgagtaccatgtgtggcccggttatgattacgttggctggcggaatgagtccgccactaatggctatatagagattatgtttgagtttgacaggatcaggaacttcaccacaatgaaagttcattgcaacaacatgtttgccaaaggcgtaaagatatttaaagaagttcagtgttacttccgttccgaagcatccgagtgggaaccaaatgccattagttttccgctagtgttggatgatgtgaacccttccgctaggttcgtgacggtccctcttcatcatagaatggctagcgcaattaaatgtcaataccacttcgcagacacctggatgatgttctccgagattacatttcagtcggacgcggcgatgtataataattccgaggccttaccaacctctccgatggcgcctactacatatgatcctatgctgaaggtggacgacagcaatacgcggatcctaattggctgcctggtagccataatttttatcctactagcaattatagttatcatactctggcgccagttctggcagaagatgctggagaaagccagccggcggatgcttgacgacgaaatgactgtaagcttgtccttacccagcgattcatccatgttcaataacaaccgctcctccagtccctctgagcaggggtctaattccacatacgaccgtatctttccccttcgacctgactatcaggagccttcacggctgatccgcaagcttcccgagttcgctccaggtgaagaagagagtgggtgcagtggcgttgtaaagccggttcagcctagtggcccggagggcgtaccacattacgccgaagcagatattgtgaatcttcagggagtaaccggtggcaatacgtattctgttccagccgtcacaatggacctcctttcagggaaggatgtcgcagtagaggaatttccccggaaacttctgacattcaaggagaagcttggagagggccaatttggtgaagtacacctgtgcgaggttgaaggcatggagaaattcaaggacaaggatttcgccctggacgtgtcagccaatcagcccgttctggtggccgtcaaaatgctgagggccgatgcaaacaagaatgcccggaatgacttcctcaaggaaataaagataatgtctcgccttaaggacccgaatataatccacctcctggccgtctgcattacggacgaccccctgtgcatgattactgaatatatggagaacggcgatttaaatcagtttctttcacggcacgagccacccaacagttcctcttcagatgtcagaactgtaagttacacaaatctaaaattcatggcaacccagatcgcatcaggcatgaaatacctcagctcgcttaattttgttcaccgcgatttggcgactcgcaactgcttagtggggaagaactacaccatcaagatcgctgacttcggcatgagccgcaatctgtatagtggcgattactatcgaatccagggccgcgcggtcctgcccatcagatggatgagctgggagtctattttgctgggaaaatttaccacagcgtccgatgtatgggccttcggtgtgacgttgtgggagacctttaccttttgtcaggagcagccatactcgcagcttagtgatgagcaggtaatcgagaatacgggagaatttttcagagaccaagggaggcagacctatttgccgcagccagcaatctgtccagactctgtctacaaattgatgcttagttgctggaggagggataccaagaataggccttcctttcaggagatccatttactgctgttacagcagggggatgaatag

SEQ ID NO: 185538 - DNA, 2568 bp, synthetic construct
  misc_feature 1..2568: note = Description of Artificial Sequence: Synthetic coding sequence
  source 1..2568: mol_type = other DNA
atgatcctgatcccccggatgctgctggtgctgttcctgctgctgcccatcctctcttccgccaaggcgcaggtgaatcccgctatttgccggtatccgctgggtatgagcgggggccaaatacccgatgaagacattaccgcctcctctcagtggagtgagagtacagctgctaagtacggccggttggattccgaagagggagatggggcatggtgcccagaaattcctgtagagccagatgacctgaaagagtttctgcagattgacttgcacactctacacttcataacccttgtggggacccaggggcgacacgccggaggacacggcattgaatttgcaccaatgtacaagatcaactacagcagggatggtacccgttggattagctggagaaatagacacgggaaacaggtgctcgacgggaacagcaatccttacgatatcttcctgaaggatctagagccccctatcgttgccaggttcgtaaggtttatccccgtcactgaccacagcatgaatgtgtgcatgcgagtagaactatacgggtgcgtgtggcttgacggcctggtgtcatacaacgcacccgccggccagcagtttgtccttcccgggggcagtataatctacctcaatgactctgtgtacgacggggccgtgggttactcgatgacggaggggttgggtcagctgactgacggcgtgtccgggcttgatgacttcacccagactcatgagtaccatgtatggcctggctacgattacgttgggtggcgcaatgagtctgcgaccaacggctacatcgaaattatgtttgagttcgatcggatccgaaacttcacaacaatgaaagtgcactgcaacaatatgttcgccaaaggggtcaagatctttaaggaagttcagtgttactttcgctccgaggccagcgagtgggagccgaatgctatatcctttcctctggttctcgacgatgttaacccaagcgcacggtttgtcacggtgcccctccatcatcgcatggccagtgcgattaagtgtcagtaccactttgctgacacttggatgatgttttccgaaattacatttcagtctgacgctgccatgtacaacaattcggaagcccttcccacaagcccgatggcccccacaacttacgaccctatgctaaaggtcgacgattctaatacccgcattctgattggctgtctggttgccatcatctttattctgctagctatcattgtgattattctgtggaggcagttttggcagaagatgctggagaaagcctcacgtcggatgcttgatgacgaaatgacagtgtccctgtctttacctagtgactcctctatgttcaataataatcggagcagcagcccatcggagcaaggctcgaactctacctacgaccggatatttcccctccgacctgattaccaggagccatctagactcattcgcaaactgccagagttcgcccctggagaggaagaatccggctgcagcggtgtcgtgaaaccggtccaaccttccggtcctgagggggtcccccactatgccgaggccgacattgtcaatctgcagggcgttaccggggggaatacttactctgtgccagcagtcaccatggacctgttgtccggaaaggacgtggctgtggaagaattcccacgaaagctgctgacattcaaggagaagcttggcgaagggcagttcggcgaagtgcatctttgcgaagtggaagggatggaaaaatttaaagacaaagacttcgcgctggacgtttcagcaaaccagcctgttctggttgctgtgaagatgctacgcgcagatgcaaataaaaacgccagaaacgattttctaaaagagattaaaataatgagtagattgaaggatcccaacattattcatctcttagccgtttgcatcactgatgaccccttgtgtatgatcacagaatatatggaaaatggggacctcaatcagtttctgagtaggcatgagccacccaactctagttcatctgacgtgcgtactgtgtcatataccaatctgaagtttatggccactcaaatcgcatctggtatgaaatacctgagttctcttaattttgtccaccgggatcttgccacaagaaattgtctcgtgggcaagaactacacaataaaaattgcagacttcggaatgtctcgcaatctgtactcgggcgattactatcgcatccagggccgcgctgtcttgcctatcaggtggatgtcttgggagtccatactcctcggcaaattcactactgctagtgacgtgtgggcttttggcgtaaccctgtgggagactttcacgttctgtcaagaacaaccatattctcagctatcagacgagcaagtaattgagaatactggtgaattcttccgggatcagggccggcaaacgtacctgccccaaccagcaatttgtcctgactccgtgtataagttgatgctctcatgctggagacgcgacaccaagaatcgtccatcttttcaagagatccatctcctgttgttgcaacaaggtgatgagtag

SEQ ID NO: 185539 - DNA, 447 bp, synthetic construct
  misc_feature 1..447: note = Description of Artificial Sequence: Synthetic coding sequence
  source 1..447: mol_type = other DNA
atgatcctgatcccccggatgctgctggtgctgttcctgctgctgcctatcctgtctagcgcaaaagctcaggtgaacccagccatctgtaggtacccactgggcatgtctggaggacagatcccagacgaggacatcaccgcctctagtcagtggagtgaatctaccgcagctaagtacgggcgactcgactccgaggagggggacggggcttggtgtcccgagatcccggttgaacccgacgatctgaaagaatttttacaaatcgatttgcacactttgcatttcattaccctcgtagggactcaggggcgacacgcaggggggcacggaatcgaatttgcgcccatgtataagatcaactatagcagggatgggactcgttggatttcctggcgaaaccgccatggtaagcaggtcctcgatggtaattctaatccgtattag

SEQ ID NO: 185540 - DNA, 516 bp, synthetic construct
  misc_feature 1..516: note = Description of Artificial Sequence: Synthetic coding sequence
  source 1..516: mol_type = other DNA
tgaatcttcatcctgctggccatcatcgtgatcatcctgtggcggcagttctggcaaaagatgctggagaaagcctctcgcagaatgttagatgacgaaatgaccgtatcactttctctgccatcagatagcagcatgttcaacaataaccgttccagctcacccagcgaacagggttctaacagtacctacgaccggatttttccattacggccggactaccaggaacctagccgtctgattagaaagttgccagagtttgcacccggtgaagaggagtcagggtgctcaggtgtggttaaaccagtgcaaccttctggcccagaaggggtgccacactacgcagaggctgatatcgtgaatcttcaaggggtgacgggaggaaatacttacagcgttcccgcagtgaccatggatctcttatcagggaaggacgtcgccgtggaggaattcccccgcaagcttctgaccttcaaagagaaacttggggaaggtcagtttggagaggtctcttag

SEQ ID NO: 185541 - DNA, 393 bp, synthetic construct
  misc_feature 1..393: note = Description of Artificial Sequence: Synthetic coding sequence
  source 1..393: mol_type = other DNA
atgatcctgatcccccggatgctgctggtgctgttcctgctgctgcccatcctgagctctgccaaagctcaagtaaatcctgctatatgtcgctatcctctcggaatgagtggaggccagatcccagacgaggatattactgccagctcgcagtggtcagagagcactgccgcaaagtatggtagacttgattcagaggaaggagacggtgcctggtgcccagaaatccccgttgagcctgacgatctgaaagagtttcttcagatcgacctacacaccctacactttattactctggtgggtacccagggaaggcatgccggaggccacgggatcgaatttgcccctatgtataaaattaactacagccgggatggaacgcggtggatttag

SEQ ID NO: 185542 - DNA, 501 bp, synthetic construct
  misc_feature 1..501: note = Description of Artificial Sequence: Synthetic coding sequence
  source 1..501: mol_type = other DNA
ctgaaggtggacgacagcaacacccggatcctgatcggctgcctggtcgccattatcttcattcttctggctatcatcgtcattatcctctggagacagttttggcagaaaatgcttgagaaagcatcacgccggatgctagatgacgaaatgacggtgagcctttcactcccaagcgactcaagcatgttcaacaataatcgcagttcatccccctcagaacagggatctaattctacgtacgaccggatcttccccctgcgcccagactatcaggaaccatcccgcctcatcaggaaactccccgagtttgcccctggcgaagaggaatcaggcgaggacgatgtcgtgggaagagttagcagagaaaaaccccagcaggcaagcgggagatatgatactcctgctccctcatccctccatctgtttctcgtgagcgctaatctactcagaagtccccatagcctatccaggttcgggcttccattattgttggcttag

SEQ ID NO: 185543 - DNA, 447 bp, synthetic construct
  misc_feature 1..447: note = Description of Artificial Sequence: Synthetic coding sequence
  source 1..447: mol_type = other DNA
atgatcctgatcccccggatgctgctggtgctgttcctgctgctgccaatcctgtcttcagccaaagctcaggtcaatcccgccatttgcagataccccctgggtatgtcagggggacaaattcccgatgaggacatcacggcgagtagtcaatggtctgaatccaccgctgctaagtacggacgactcgactccgaagagggcgacggtgcttggtgtcccgagatccccgtggagcccgacgatctgaaagaatttttacaaatcgatctccatactctgcacttcatcaccttagtgggcacccagggccgtcacgccggcgggcatggcattgagtttgctccaatgtacaaaattaattactcccgagatggaaccaggtggatctcatggcggaacagacatggaaagcaagtgctggatggtaattctaatccatattag

SEQ ID NO: 185544 - DNA, 2403 bp, synthetic construct
  misc_feature 1..2403: note = Description of Artificial Sequence: Synthetic coding sequence
  source 1..2403: mol_type = other DNA
atgaactacatcttcggcaacaacaccctgctgtacagccggggctcaagaggaggtaacacttcttcttcccatggctcagcgggccccaagcagaaacactgggctaagaagggatcttccgatgaactgcaggcggagcccgagcccagtaggtggcagcagatagtggcgttttttactcgtcggcattccttcattgattgcattagtgtcgccacctcttccacccaggctaatccaccccccgttctggtcaacactgattccctggaaacccccacctatgtgaacggcaccgatgcggactacgaatatgaggaaataacccttgagcgaggaaatagcgggctgggcttctctatcgctggcggtacggacaaccctcatatcggcgatgacagctcaattttcattaccaaaattatcaccgggggagctgctgcccaagacggtagactgagagtaaatgattgcatcctgagggtaaacgaggtggacgttagagacgttacgcactccaaagccgttgaagcactgaaggaggctggaagtattgtcaggctttatgtcaaaagacggaagccagtgtctgagaagattatggaaataaagttgattaagggccctaaaggacttggcttcagtatagctggcggcgtgggcaaccagcacatccccggagataattccatttacgtgactaagattatcgagggcggcgctgctcacaaggacggcaagctgcaaatcggcgataagctcttggctgttaacaatgtgtgcctggaggaggtgacccatgaagaggctgtgacagctttgaaaaatacttccgattttgtgtacctgaaagtggccaagccaacgagtatgtatatgaatgatgggtatgccccccctgacattacaaattcttccagtcagccagtagacaaccacgtgagcccttcatcctttctgggtcagacaccggcatcaccggctaggtacagccccgtgtccaaagcagttctgggcgacgacgaaatcacacgagagccacgcaaagtggttttgcatagagggtctaccggtctggggttcaacattgtgggaggcgaggatggggaaggaatattcatctctttcattctggctgggggacccgccgatttgagtggcgaactcaggaaaggagatcgcataattagcgttaattctgtcgacttgcgtgccgcctcccacgagcaggccgccgcagccctaaagaatgccggccaagcagtgactatcgttgcccagtacagacccgaggaatactccaggtttgaggccaaaattcacgacctgcgggagcaaatgatgaactcatcgatctctagtgggtcagggagtttgaggactagccagaaaagaagcctctatgtacgggctctgttcgactacgacaagacgaaagatagcggtcttccatctcagggcttgaattttaagtttggagacattcttcatgtgatcaacgccagtgatgacgagtggtggcaagcgagacaggtgacccctgacggggagtcagacgaagttggggtgattcctagcaagcggcgcgtggagaagaaagagcgggccagactgaaaaccgtcaaattcaatagtaaaaccagggacaaaggggagatacctgacgacatgggatcgaaaggtcttaagcacgtgacatccaacgctagtgattccgagtcaagctatctgatcctgatcacagacgaatatggctgctccaaaggtggccaggaggaatatgtcctgtcctacgaacccgtcaaccagcaagaggtcaattatacacgtccagtgataatactgggccccatgaaagataggataaatgacgacctcatatccgaattcccggacaaattcggttcctgcgtccctcacactacaaggcctaagcgcgactatgaggtagacggacgcgattatcacttcgtgacatctagggaacagatggagaaggatatacaagagcacaagttcattgaagctgggcaatacaacaaccacctgtacgggacatcagtacagtccgtgcgggaggtagctgagaaaggaaagcactgtatccttgacgtgagtggcaacgccatcaaaagactgcagatcgcgcaactttaccccatatcaatttttataaaacccaaatcaatggaaaatattatggagatgaacaagagattgaccgaggaacaggcaagaaaaacattcgagcgtgctatgaaactggagcaggaattcaccgagcattttaccgcgatagtccagggagacacactcgaggacatctataaccaggttaagcagattatcgaggaacagtcgggtagctatatatgggtacccgcaaaagagaaactatag

SEQ ID NO: 185545 - DNA, 2367 bp, synthetic construct
  misc_feature 1..2367: note = Description of Artificial Sequence: Synthetic coding sequence
  source 1..2367: mol_type = other DNA
atgaactacatcttcggcaacaacaccctgctgtacagccggggcagccgaggcggcaacacatcgagcagccatgggtccgctggtccgaagcagaagcattgggctaagaaaggcagtagtgatgagctgcaagctgagccagaaccatcaaggtggcaacagattgttgctttctttacacgacgccatagttttattgattgtatctcagtcgctacatcaagcacccaggcgaacccaccacccgtgcttgtgaatactgatagtttggaaactcccacatatgtgaatgggaccgacgccgactacgagtacgaagagatcaccctcgaaagaggcaactccgggctgggcttcagcatcgccggtgggaccgacaacccccacattggggacgacagttccatttttatcaccaagatcatcaccggtggagctgccgcacaggacggcagattacgagtaaacgactgcatactcagagtcaacgaagtagatgttagagacgtgacacatagtaaagcggtcgaggcactgaaggaggctgggtcaattgtacgtttgtatgtgaaacggaggaagcctgttagtgagaagatcatggagatcaaattgataaagggccctaaaggactcggcttcagtatcgcggggggagttggtaatcagcatatacccggcgacaactctatttacgtgaccaagatcattgaggggggcgcagctcacaaggatgggaaacttcagataggggacaagcttctagccgtgaacaacgtgtgcctggaagaagttacacacgaagaggccgtcaccgctctgaaaaacacttccgactttgtgtacctgaaagtggccaagcccaccagtatgtacatgaatgatgggtacgcaccaccggatatcacgaatagttcatcccaacccgttgacaatcacgtatctccttcaagtttcttgggacagacccctgcttcaccagcacgatattcccctgtgagtaaggcggtgctgggagacgatgagatcacccgggagccaagaaaggtggtcttgcaccggggatccaccgggctgggattcaacatcgtaggaggcgaagatggcgaaggcatcttcattagctttattctagcaggcgggcccgccgatctctcaggtgagctcaggaagggtgatcggatcataagcgtgaactcagtcgatctgcgggcagctagccatgaacaggctgccgcggccctaaaaaacgcgggccaggccgtcactattgttgcccaatacaggccagaggaatactcccgcttcgaggctaagatccatgatctgcgcgagcagatgatgaattcttctatatcctctggttctgggagtctgaggacgtcccaaaaacggagtttgtatgttcgggctctcttcgattatgacaaaaccaaggacagtggcctcccatcccagggcctgaacttcaaatttggcgacatattgcacgtgataaatgcaagtgacgacgaatggtggcaggctcggcaagttacccccgatggcgaatccgacgaagtaggtgtgataccatccaaaagacgcgtggagaagaaagagagggcacgattgaagaccgttaagtttaactccaagacccgggacaagggtgagatcccagacgacatgggttccaaggggcttaaacatgttacgagcaacgcgagtgattctgaaagctcttaccggggccaggaagagtatgtgctctcatacgagcccgtgaatcagcaagaagtgaattatactagacctgtgatcatccttggccctatgaaggatcggatcaatgatgacctgatttcagagttcccggacaaatttggatcttgcgtgccccacaccacgagaccgaaacgggattacgaagtagatggccgggactatcactttgtgaccagtagggagcagatggagaaagatattcaggaacataagtttattgaggcaggtcaatacaataaccacttgtatggcacaagtgtccaaagcgtccgcgaggtcgccgaaaaaggaaaacactgcatcctggacgtttctggtaatgctattaagcgcctccagatagcccaactctatccaatttcaatctttatcaaacccaagtcgatggagaatataatggaaatgaataagagactgaccgaagagcaggcccggaaaaccttcgaaagggccatgaaattggagcaagagttcacggaacatttcacagccatcgttcagggagacaccttggaagacatttataatcaggttaagcagattatcgaggaacagtctggatcatacatctgggtgccggctaaggagaagctgtag

SEQ ID NO: 185546 - DNA, 1539 bp, synthetic construct
  misc_feature 1..1539: note = Description of Artificial Sequence: Synthetic coding sequence
  source 1..1539: mol_type = other DNA
atggagcgggcccggaagttcagcggcagcggcctggccatgggcctcggatctgcgagcgccagcgcttggagacgggccagccaaaggtgggcctggccgttgcgcagcctaagaccaggcggcgacgccagggagccacggaaaatcatcctgcacaagggatcaactggcttagggttcaatatagtgggtggcgaagatggggagggcatcttcgtttcgttcatactggccggcggtccagctgacctctcaggagagctcagacgcggggacagaatcctgtctgttaacggggtcaacctccggaatgctacgcacgagcaggccgccgcagcactgaagcgggcaggccaatccgtaactatcgtcgcacagtatcgcccagaggaatactcccgtttcgaaagcaaaattcacgaccttagggagcagatgatgaattcttcaatgagcagtgggtccggaagccttaggacttcggagaagagatccttatacgtgcgtgccttatttgactatgatcgaacgcgcgactcctgtctcccttcccagggcctgtccttcagttacggggacattctccacgtcattaatgcctctgacgacgagtggtggcaggcgcgactcgtgactccccatggcgaatccgaacagataggggtgatcccttccaaaaagcgggtagaaaaaaaggagagggcacgtctgaagaccgttaaatttcatgcgaggaccggaatgattgagtccaatagatccatcaagactaagaggaagaaatctttcagactcagcaggaagtttcctttttacaaatccaaagagaacatggcgcaggaaagttccattcaggagcagggggtaactagtaacacttcagattcagaaagctcttcaaagggtcaggaggatgctatcttgtcttatgagccagtgacaagacaggagatccactatgcccgtcccgtgatcatactgggccctatgaaggatcgggtgaacgatgaccttatatccgagtttcctcataaattcgggagttgtgttcctcacacaacaaggccacggcgtgataacgaagtggacggacaggactaccatttcgttgtaagccgcgagcagatggaaaaagacattcaggacaacaaatttattgaagccggccagttcaatgataatctctacggtacatccatacagagcgtcagagcggtggccgaaaggggcaagcactgtatcctggatgtgagtggcaacgctatcaaacggctgcagcaggcccagctttaccccatcgccatttttattaagcccaagtcaatagaagccctgatggaaatgaatcgccgccagacttatgagcaggcaaataaaatttatgacaaagcaatgaaactggaacaagaatttggggagtacttcacagctatcgtccaaggggattcactggaagaaatttataacaagattaagcaaataatagaagatcagtccgggcattatatttgggtgccgtccccagagaagctctag

SEQ ID NO: 185547 - DNA, 3021 bp, synthetic construct
  misc_feature 1..3021: note = Description of Artificial Sequence: Synthetic coding sequence
  source 1..3021: mol_type = other DNA
gaggaggaggccggcgacctggtgcagcccggcatcagcttccccggccctgcagaggaggacctagacccccagtatagttggagccctactcagcacttcaatgaggagagatatagcccagcacctaggtccatgaaaggcttgagtggaagtagaacgcaaccgcctttatgcagcggccacacatgtggcttggccccacctgaggactgcgaacacctacatcatggcccagacgcccgccctccctatctcctcagtccagctgattcatgccctggcggcaggcatcggtgcagcccgaggtccagtgtgcactccgagtgcgttatgatgccagtggtactgggcgaccacgtgagctcttccaccttcccacgcatgcactatagctcgcattatgataccagagacgattgtgccgtggcccatgcaggggcaaaaatcaacagaatccctgcaaacctgctggatcaatttgaaaagcaattacctctgcaccgcgatgggtttcacactttacagtatcagagaacaagcgccgcagccgagcagcgttcagagtcacctgggagaatccggcatctcgtgcactctgtgcagaaattgttcactaaatcccacagcctggaagggagttccaagagcaatgctaacgggaccaaagccgacggccgggctgacgaccaccaccacgcccaccatgccaagcatagcaaacgctccaagagtaaagaaaggaagcccgagggtaagccccgacccggcatgtctagctggtggtcgagcgacgacaatctggactctgactccacctatcgaacaccttcagtgcttaacagacaccatttaggtccagttgcgcactgctaccccgatgctctccaaagccccttcggagacctctctctgaagacaagtaaatctaataacgacgtgaaatgttccgcatgcgagggtttggccctgaccccagacgccaagtacttaaagagatcttcctggtccacccttaccgtttcccaggcaaaggaggcttaccgcaagtcatccctcaacttggacaagccccttctacatcaggatgctaagccagcccttcgtccctgtcattacctccaagtgccacaggacgagtgggggggctatcccaccggaggaaaagatgaagaaattccatgtagaagaatgcggtcgggctcatacattaaggccatgggagacgaggagagcggcgaaagtgacagcagtccaaaaacatcaccaaaaagcgctatcttgccagaacctctgctgaaaagcatcggacagcggcctctgggagagcaccagacccagacctatctgcaggccgcttccgacgtgcctgttggccatagtcttgacccggccgccaactacaatagccccaagttccggtccaggaatcagtcttatatgagagctgtttcaaccctctcacaagctagctgcgttagtcaggtctcagaggcagagatcaacgggcagttcgaatcggtgtgtgaatcagtgttcagtgaggtggagtcacaggctatggatgcgttggatctgcccggttgcttccgcacacgatctcactcttacctcagagctatacaggccggctatagccaagacgatgagtgtatccctatgatgacgcctagcgatatcactagcaccatccggagtacagctgccgtctcttacaccaactacaagaagactcctcctcctgtgcctcctcgtaccacctccaagccgctgatctcggtcacagcacaaagtagcacagagtcaactcaagacgcctatcaggattctcgcgctcagagaatgtcgccttggcctcaagatagccgcggtctgtacaattcaacagactccctcgatagcaacaaggcgatgaatcttgctctggaaaccgccgccgcgcaacgccacctgccagagagccagtccagctctgtccggaccagcgataaggctatcctggtctcaaaggcagaggaattgcttaaaagccgttgttccagcatcggtattcaagtcgaaactgccaccgactcagacacagagagcagaggactcagggagtatcattccgtgggcgtgcaggtggaggacgaaaaacgtcatggtaggtttaaaaggagtaatagcgtgaccgccgcagtacaggccgacctggagcttgagggatttcccggccatatcacaacagaagataagggcttacagtttggttcctcatttcagcggcattcggagccttccactccaactcaatacagcgcggtaaggactgtacgtacacagggtctgttctcttaccgagaagattatagaactcaagttgacacctctaccctgcctccccctgatccctggttggagcccgccatcgataccgtggaaactggtcgcatgtcaccttgcaggcgggacggaagctggtttttgaagcttctccatgcagaaacaaagcggatggagggatggtgtaaagaaatggaaagagaggcagaggagaatgatttatcagaggaaatcctggggaaaatcaggagcgccgtaggttccgcccaactcctgatgtcacagaaatttcaacaattttattggctgtgtcaacagaacatggaccccagtgccatgcctcgccccacatctcaggatctggcaggttattgggacatgctgcagctttctattgaagacgtgagcatgaagtttgatgagctccagagactgcgtctgaacgactggaaaatgatggaatccccagaacgcaaggaagaacgaaaggtccctcccccaatccctaagaagcctccaaagggtaaattcccgatcacacgcgagaaatccctcgacctacctgataggcagcggcaggaggcccgcagaagactcatggccgccaagagggctgctagttttaggcaaaatagcgcctccgagcgcgctgactcaatcgaaatatacattcctgaagcgcagaccagactctag

SEQ ID NO: 185548 - DNA, 2928 bp, synthetic construct
  misc_feature 1..2928: note = Description of Artificial Sequence: Synthetic coding sequence
  source 1..2928: mol_type = other DNA
atgaagggcctgagcggcagccggacccagccccccctgtgcagcggccacacctgtggactggccccaccagaggactgtgagcacctgcaccatggaccggacgctagacccccctatctcctgagccccgcagacagttgtcccggcggccgccatcgttgttccccaagaagtagcgtacactctgagtgtgttatgatgcccgtcgtgcttggggatcacgtttcttcatctacttttcctagaatgcattatagctcccactacgacaccagagatgactgcgctgtagctcacgccggagccaagatcaacaggatccccgctaacctactggatcagttcgagaaacagctgcctctccatcgcgacggtttccacaccttgcagtatcagcgtacctccgccgccgctgaacaaaggtccgagtctcctgggcgcattagacacttggtgcattcagtccagaagctgtttactaagtctcacagcctcgagggcagctccaaaagtaatgcgaacggcaccaaggccgatggacgcgctgacgaccaccaccacgcccatcatgctaagcattccaagcgcagcaagtccaaggagagaaaacctgagggcaaaccgagacccgggatgtcgagctggtggagctccgacgacaacctggatagcgattcgacttatagaacccccagcgtgctgaacaggcaccacttgggccccgtagcacactgctacccggatgccctgcagtcccccttcggggacctgtcactgaagacttctaagtctaataatgatgtgaaatgctcagcatgtgaaggactggccttgaccccagacgccaagtacttgaaacgcagttcatggagcaccctcaccgtgtcgcaggcaaaagaggcctacagaaagtccagtttgaacttagataagccactgctccaccaggacgcaaagccagctctgaggccttgccactacctgcaggtcccgcaggacgagtggggtggataccccacaggcgggaaagatgaggaaatcccgtgcaggaggatgcgatctggctcttatatcaaggcaatgggtgatgaggaatcaggtgagtccgattcttcacccaaaacatcacccaaatccgcgattctcccagagccactccttaagtccattgggcagcggcctttaggagagcatcagacccagacataccttcaggccgccagcgacgtgccagtagggcatagtcttgatcctgcggccaactacaattcacccaaattccgatcaagaaatcagtcatatatgagagccgtgtctacccttagccaggccagttgtgtctcccaagtgtctgaagccgagatcaacggtcaattcgagagcgtctgtgagagcgtgtttagcgaagtcgagagccaggcaatggacgccctggaccttcccgggtgctttcgtactcgatcacacagctaccttagggctatccaggccggctattcccaggatgacgagtgtataccaatgatgacacccagcgatataacaagcacaataaggagtacagccgccgtctcctataccaactataagaagacccctccccctgtgccacccagaactacttctaagccgttaatcagcgtaacagctcagtcatctactgagtcaacacaggatgcgtatcaggattctcgggcccagcgcatgagcccttggcctcaggattccagggggctatataattctaccgactccctggacagtaacaaagctatgaacctggcactggaaacagcagccgcacagagacatttaccagaaagtcagtctagctccgtaaggacctcggataaagcgattctggtgagcaaagccgaggagcttctgaagtctcgctgcagcagcataggcattcaggacagcgagttcccagagcaccaaccataccctcgcagcgatgtggagacggccactgattcagacaccgaaagtaggggcctacgcgaataccattccgtcggggtccaggttgaagatgagaaaagacacggccgatttaagcgcagcaactctgtgacggctgcagtgcaggccgatcttgagttggagggatttcccgggcatatcaccacagaggacaagggattacagttcggaagtagcttccagcgccactctgagccgagtacacccactcagtacagtgcagtgcggaccgttagaacccagggcctttttagttatcgggaggattacagaacccaagtcgacacatccactctgccaccaccagacccttggcttgaaccagcaatcgacactgttgaaactggccgtatgagtccttgccggagggacgggagttggtttcttaaactgcttcatgctgaaaccaaaaggatggaaggttggtgcaaggagatggaacgagaagcggaagaaaacgacttatccgaagaaattctgggcaagattcgctcggccgtgggatccgcgcagctgctgatgagtcagaaatttcaacagttctactggctttgtcagcagaatatggaccccagcgccatgccacgaccaacctcccaggatctggcgggctactgggatatgctgcaattatctattgaggatgtgagcatgaagttcgacgagctacagcggctgcgcttgaatgactggaaaatgatggaatctccagaacggaaggaggagagaaaggtgcctccaccaatacccaagaagccccccaagggaaagttccctatcactcgagagaagtcgttggatctccccgaccggcagagacaggaggctaggcggcgcctgatggcagctaagcgagcagcgtcgttccgccagaacagcgcgagtgagagagccgactccatcgagatttacatccccgaggcccaaactcgcctgtag

SEQ ID NO: 185549 - DNA, 2937 bp, synthetic construct
  misc_feature 1..2937: note = Description of Artificial Sequence: Synthetic coding sequence
  source 1..2937: mol_type = other DNA
tgacccacccagcacttcaacgaggagcggtacagccccgccccccggagcatgaaaggactctccgggtcccgtactcaacctcctctgtgctccggccacacatgcggcttggcacctccggaggactgcgagcatttacatcatggaccagacgcaaggccaccgtatctgctgagccctgctgactcatgccctgggggacggcaccgatgcagccctaggagtagcgtgcattcagagtgcgtgatgatgccagtggtgttaggagaccatgtgagctcctcgaccttcccacgtatgcactactcatctcactacgacacccgtgacgattgcgccgttgcccatgcgggcgcaaaaataaacagaataccagccaacctgttagatcagtttgagaaacagctgccgcttcatcgggatggtttccatacactacaatatcagcggactagtgccgccgctgagcagcgtagcgagagccccggacgcatccgccacttggtccatagcgttcagaagctcttcacaaaaagtcattctttggaaggaagctcaaagtctaatgcaaacgggaccaaggccgacggcagggctgatgaccatcatcacgcccatcacgcgaagcattcaaaaagaagcaagagcaaagagcgaaagcccgaaggaaagccaagacctggtatgagttcttggtggtcgagcgatgacaacctggactcagacagtacatatagaactcctagcgtcttgaatcgccaccacctggggcccgtggctcactgttacccagatgctctccagtctccgtttggagacctttcgctgaaaacaagcaaaagtaacaatgatgtaaagtgttctgcctgtgaaggcctcgcattgacaccagatgccaaatacttgaaaaggagctcatggtctacactgactgtcagccaggctaaagaggcctaccggaagagctcacttaatcttgacaagccacttctgcaccaggacgccaagcctgccctgcgaccctgtcattatctgcaggtgccccaggatgaatggggcggctatccaactggggggaaagatgaagaaatcccttgccggagaatgagaagcgggagttacatcaaagctatgggagacgaagagagcggtgagagcgattcgtctcctaaaaccagtcccaagtccgctattttgcccgaacctctcttgaaaagtatcgggcagagaccactgggggaacatcagactcagacatacctacaagctgccagtgatgtccctgtgggccatagccttgatccagcagcaaattacaactcacccaagttccgcagtcgcaaccagagctacatgcgtgccgttagtaccctgagtcaggcctcctgtgtctctcaggtttccgaggccgagatcaatggacagttcgagtccgtctgcgaaagcgtgttctctgaggttgagtcacaggctatggacgcactggacctgccaggatgtttcaggactcggagccacagttacctgcgagcaatccaggcggggtactcccaggacgacgaatgtatccccatgatgactccaagcgacatcacaagtactatccgttctaccgctgccgtgtcgtacactaactataagaagacccccccgcccgtacctccccgtaccaccagcaaaccacttatttccgtgaccgcacagtcttccacagaatctacccaggacgcatatcaggactctcgcgcacaacgtatgtctccttggccacaggatagccgcggtctgtataactctacagattctttggattcaaacaaagctatgaatcttgccttggagacggccgcggctcaacggcacctgccggaaagtcagtccagtagcgtgaggacctcagataaggccatcttggtgtcaaaggcagaagaactgctgaagagccgctgttcctccataggtattcaggtggaaactgcaactgactcggacaccgagtcacgaggactgcgcgagtaccattccgtgggggtgcaggtcgaagacgaaaagagacatggtcgtttcaaacgaagtaattcagtgaccgccgccgtgcaggctgacctggagctcgagggatttccagggcatattacaactgaggataagggtctccaatttggtagttcattccagaggcattccgagccttctacacctacccagtattccgctgtgaggacagtcaggactcagggccttttcagttacagggaagactacagaacgcaggttgacacttcaacccttccccctccagacccgtggctggagcccgccattgatacagtggagaccgggcggatgagcccttgcaggagagatggaagttggttcctgaagctgctgcacgcggagaccaaaaggatggagggctggtgcaaggagatggaacgagaagccgaggagaacgacctgtccgaggagattctcgggaaaattagaagcgccgtcgggtccgcccagctcctgatgtcacaaaagtttcaacagttctactggctgtgtcagcagaatatggatccatccgccatgccaaggcccacctcgcaggatctcgcagggtactgggacatgctgcagttatcaatcgaggacgtgagcatgaagttcgacgagctgcagagattgaggctgaatgactggaagatgatggagtcacccgaaagaaaagaagagagaaaagtaccacctccgatcccaaagaagccacccaagggtaagttcccaattactagagagaagagtttggaccttcctgaccggcagagacaagaagctagaagacgtctgatggcggccaagagggcagccagtttcaggcaaaactcagcctctgagagagccgatagcattgagatctatattcccgaagcacagacacggctgtag

SEQ ID NO: 185550 - DNA, 2562 bp, synthetic construct
  misc_feature 1..2562: note = Description of Artificial Sequence: Synthetic coding sequence
  source 1..2562: mol_type = other DNA
atgcccgtgcggaagcaggacacccagcgggccctgcacctgctggaggaatataggagtaaactgtctcaaacagaggaccggcagctgagatctagcattgagagggtcatcaatatatttcagtccaacctgttccaggctctcatcgacattcaggaattttacgaagtgacacttctagataatccaaagtgtatcgatcgcagcaaaccttcggagcctatacagccggtgaacacctgggaaatctccagcctgccctcttcgactgttacttccgagaccctccctagctccctctcaccttctgtggagaagtacagataccaggatgaggataccccacctcaggaacacataagccctcagattaccaacgaggtcatcggaccagaactggttcatgtatcggaaaaaaacctttctgagatagaaaacgtgcatgggtttgtgtcccatagccatatctctcccatcaaagtgaacgggacagacgcagattatgaatacgaggagatcacactggagagagggaacagtgggctgggcttctctattgccggagggacagacaatccacacataggcgacgactcatcaatttttatcaccaaaataataaccggcggggctgcggcccaggacgggcgcctgcgagtcaacgattgcatcctccgagtgaacgaagtggacgtgcgcgacgtcacccattcaaaggcagtggaagccctgaaggaggccggcagcatcgtgcgtctgtacgtcaaacgccgcaaacccgtaagcgagaaaatcatggagattaagctcattaaagggccaaaggggctcgggttttctatcgctgggggcgtgggcaaccagcacattccaggggacaacagcatttacgtgacaaagattattgaaggcggtgccgcacataaggacggcaagctgcagatcggggacaagttgctcgccgtcaataatgtgtgtctcgaagaagtgacccacgaggaggccgtgacagctctcaagaacacctccgatttcgtgtacctgaaagtcgccaagcctacatctatgtacatgaacgacggctacgctcccccggatatcactaatagctcttctcagccagtagataatcacgtctcaccttccagctttctgggacaaactcccgcatcccctgctcgctacagcccggtgagcaaagccgtgctgggggacgacgaaattacccgggaaccacgtaaagtggtgctgcatagagggtcaacgggcctcggcttcaacatcgtggggggcgaggatggcgaggggatcttcatcagctttatcttggctgggggcccagcagacctatccggtgagctcagaaaaggggacagaatcattagcgtgaattcggtggacctaagagcggctagccacgagcaagccgcagccgcactgaaaaatgcagggcaagctgtcaccatcgttgcccaatatagaccagaagagtactcacggttcgaggctaaaattcacgacctgcgggaacaaatgatgaattcttctatttctagcggttccggctctttgaggacctcacagaagcgatcgctgtacgtcagggcccttttcgattatgataagactaaggactcgggcctgccctctcagggtctaaattttaaattcggagacatcctgcacgtgattaacgcttcggacgacgagtggtggcaagctagacaggtgactcccgatggtgaatcagatgaggtgggcgtaataccctctaaacggcgggtggagaagaaggaaagagcccgcctgaaaaccgtcaaatttaactccaagactagggataagggggaaatacctgatgacatgggtagtaaagggctgaaacacgtgacctctaatgcgtctgattcagagtccagctacagagggcaggaagagtacgtgctatcatacgagcctgtcaaccagcaggaagtcaattacactcgcccagtgatcatcctgggacctatgaaggatcgtattaacgacgatttaatctcggagttcccagacaaatttggttcctgtgtgccccataccactcggcccaagagagattatgaggtggatggacgtgactaccacttcgtgacgtctagggagcagatggagaaggacattcaggaacacaagttcatcgaagcagggcagtacaacaaccacctttacgggaccagcgtccagtctgttagagaggtagctgaaaagggcaagcactgcattttggacgtcagcggtaacgctatcaagcggttgcagatcgcccaactatatccaatctccatcttcatcaagcctaagtccatggaaaacatcatggagatgaataaacgacttacagaagagcaggcccgtaagacgtttgagagagccatgaagttggaacaggaatttactgagcattttactgcaatcgttcagggcgacactcttgaggacatctacaaccaggtgaagcagatcattgaagagcagtctggaagttacatttgggtaccagctaaagagaagctgtag

SEQ ID NO: 185551 - DNA, 2781 bp, synthetic construct
  misc_feature 1..2781: note = Description of Artificial Sequence: Synthetic coding sequence
  source 1..2781: mol_type = other DNA
atgcccgtgcggaagcaggacacccagcgggccctgcacctgctggaggagtacagatcaaaactttctcaaactgaggaccgccaactccgctccagtatcgaacgagtgattaatatttttcaatctaacctatttcaagcactgatcgacatccaggagttctacgaggtgacattgctggacaaccccaagtgcatagaccgttcaaagccgagtgaaccgatccagcctgttaatacttgggaaatctcatcacttcctagttccactgtcacctccgagaccctgccatcatccctgtcaccatcggtggaaaagtaccgctatcaggatgaggacacacctccgcaagaacatatctctccccagatcactaatgaagtcatcggacctgaactggttcatgtcagcgaaaagaacttgagcgaaatagagaacgtgcatggctttgtctcccactcacacatcagtcccatcaagccaacagaggcagtgctcccctccccacccaccgtcccagtgattcctgttctgcccgtgcccgctgaaaataccgtgattctccctacaattccacaggcaaatccacctcctgtgttggtcaacaccgactctctggaaacccccacttacgtaaatggaactgatgcagattatgagtatgaggagatcactctggagcgtgggaacagtggactgggattctcaatcgccgggggaacggataatccccatatcggcgacgactccagtatcttcattaccaagattataaccggtggcgccgcagctcaagacggacgcttgcgggtcaatgactgcatcctgagagttaacgaagttgatgtgagagatgttacccactcaaaagccgtcgaggcccttaaggaggctgggagtatcgttcgtctttacgtgaaacggcgcaaacccgtcagtgagaaaattatggagatcaaactgatcaaggggcctaaggggctggggttctcaattgcaggtggggtcggaaaccagcatattcctggcgataactccatctacgttaccaaaattattgaaggtggggcagcccataaggacggcaagcttcaaattggtgacaaactcctcgctgtgaataacgtttgtttggaagaggtgacgcatgaggaggccgtgacagctctaaaaaacacttccgacttcgtgtacctgaaggtagccaagcctacttctatgtatatgaatgatggatatgccccacccgacattacaaactcttcttcccaacctgtcgataatcacgtctctcctagtagtttcttgggccagacccccgcttcaccggccaggtatagtcccgtgagtaaggcagttctcggagacgacgaaataaccagagagccacgcaaagtcgtgttgcatcgtggctcaaccggactgggcttcaatatcgtgggtggggaagacggcgagggcatatttattagcttcatactggccgggggcccagcggatctgtctggcgaactgcgaaaaggcgacagaattatttctgtgaattctgtggacctccgggccgcatcacatgagcaagcggccgcagcgttgaagaatgctggacaggccgtgaccatcgtggcccagtacaggccagaagagtattcccgtttcgaagcaaaaatccacgatttgcgcgagcaaatgatgaacagtagcattagcagcggcagtggctctctccgcacatctcagaaacgaagcctgtacgtgagggcgctgtttgactatgacaaaaccaaagactctgggcttccctctcagggactcaactttaagttcggggacattctgcatgttataaacgcctccgatgatgagtggtggcaggcaagacaagtgacacccgacggcgaatcagacgaagtcggtgtcatcccgtccaaacggagggtagagaagaaagaacgtgcccgattgaaaacagtcaagttcaacagtaaaactagagacaaggggcagagctttaacgacaaaagaaagaagaacttgtttagtcgaaaattccccttctataagaataaagaccagagtgagcaggaaactagtgatgccgaccaacacgtgacatccaacgcttcagactccgagagctcctaccgtgggcaggaagagtatgtcctgtcatacgaacctgtgaatcagcaggaggttaactatacaagacctgtcataattttgggacccatgaaagaccggatcaatgacgacctcatatccgagttccctgataaatttgggagctgcgttccacacaccaccagacctaagagagattacgaagtggacggtagggactatcacttcgtaacaagcagggagcagatggagaaggacatccaggagcacaaattcatagaagctggacagtataacaaccacctgtacggcacatctgttcaatccgttcgggaggtggccgagaaggggaagcactgtatcttggatgtctcaggcaatgccattaagagactccagatagcacagctctaccccatcagtatttttatcaagccaaaatccatggagaacatcatggagatgaacaagcggctgactgaagagcaagcacggaaaaccttcgagcgcgccatgaagttggagcaggaatttaccgaacactttaccgccattgtgcagggtgataccctcgaagacatctataatcaggttaagcaaatcattgaagagcaatcaggttcctacatttgggtccctgccaaagaaaaactgtag

SEQ ID NO: 185552 - DNA, 2682 bp, synthetic construct
  misc_feature 1..2682: note = Description of Artificial Sequence: Synthetic coding sequence
  source 1..2682: mol_type = other DNA
atgcccgtgcggaagcaggacacccagcgggccctgcacctgctggaagagtatagaagtaagctgtcacaaaccgaagacaggcagctgcggagtagtatcgaaagagtcattaatatttttcagagtaatctgtttcaggctctcattgacatccaggagttctatgaggttacgctactggataatcccaaatgtatcgacaggtcaaagccctccgaacctatccagcccgtcaacacttgggaaatcagttctttgcctagtagcactgtcacctccgagacactgcccagcagcctaagccctagcgtggaaaaataccggtaccaagacgaggatacacctccacaggagcatatcagccctcaaatcactaacgaagtcattgggcctgaattggtgcacgtgagcgagaaaaatcttagcgaaattgagaatgtccacggcttcgtaagtcatagccatatctcccccatcaaggctaaccctccgcctgtactcgttaatacagactcactggagactcctacctatgtgaatgggacagatgcagactacgaatatgaggaaataacgttagagcggggaaattctggcctcggcttctctattgccggaggcaccgacaatccacacatcggggatgactctagtatcttcattacaaaaataatcaccggtggagccgccgctcaggacggcagacttcgagtcaatgactgtattcttagggtgaatgaagttgacgttcgggacgtaacgcactccaaggctgtcgaggcgttaaaagaggcgggctctatcgtccggctttacgtcaagaggcgcaagcccgtttccgagaagataatggagattaagttgatcaagggaccaaagggacttgggttcagtatcgccggaggcgtgggcaaccagcatattccaggcgataacagcatttacgttacaaaaataattgagggcggcgctgctcacaaggatggtaagctccagattggcgacaagctgttagcggtcaataatgtgtgtctcgaggaggtgacacatgaggaggccgtgaccgcactgaagaacacgtcagatttcgtctacttgaaggtcgcaaagcctactagtatgtatatgaacgacggctacgccccaccagacattacaaactcctcaagccaacccgttgacaaccatgtgagtcctagcagcttcctgggccagactcccgctagccctgcccgctattccccggtgtctaaggccgttctcggcgacgatgaaataacgagggagcctcgtaaagtggttctacaccgcggatctaccggtttggggttcaatatagtaggcggagaggacggggaagggatcttcatctcttttattttggccggcgggcctgcagacctttccggtgaactcaggaagggggacagaatcataagcgttaattcagttgacttgcgggcggcctcccatgaacaggctgccgcagccctgaaaaatgcaggccaagccgtgaccatcgtcgcccagtatcggccagaagaatatagccgatttgaggcgaaaatccacgacctgagagagcagatgatgaactcaagcatatcatcaggctccggcagtcttaggacctctcaaaagcgaagtctgtacgtacgggctttgttcgattatgacaagaccaaggattccgggctgccgtcacagggcctgaacttcaaattcggtgacatactgcacgtgattaacgcctctgacgacgaatggtggcaggcccgacaggtcactccagatggggagtccgatgaggtaggagtgattcctagcaaacgtcgggtggagaaaaaggaaagggcaagattgaagaccgtgaaattcaattctaaaacaagagataagggtcagagcttcaatgataagagaaaaaagaacctgttttcaaggaaatttcctttttataaaaacaaagaccaaagcgaacaagaaacgtccgacgccgatcagcatgtgacctcgaacgccagtgattccgaaagtagctaccgtgggcaagaggaatacgtgctgtcctatgaacccgtgaatcagcaggaagtgaattacacccgccctgtcatcatcctgggccctatgaaagacaggatcaacgatgatttgatttctgaattccccgataaatttggtagttgtgtgccccatacaacgcgacccaagcgggattacgaagtcgacggccgcgattaccactttgtcacatcgagggagcagatggagaaggatattcaggagcacaagtttatcgaggccggccagtataataaccacttgtacggtacaagcgttcaatccgttcgagaagtggcggaaaaggggaagcactgtatcctggatgtaagtgggaatgcaataaagcgcttacagattgcgcagctctaccccatcagcattttcataaagcccaaatctatggaaaatattatggagatgaataaaaggctcacagaggagcaggccagaaagaccttcgaacgggctatgaaactggagcaggagtttactgagcacttcactgctatcgtgcaaggagataccttagaagacatctataatcaggtaaagcagatcatcgaagagcagtccggcagctacatctgggtccccgctaaagagaaactgtag

SEQ ID NO: 185553 - DNA, 2754 bp, synthetic construct
  misc_feature 1..2754: note = Description of Artificial Sequence: Synthetic coding sequence
  source 1..2754: mol_type = other DNA
atgcccgtgcggaagcaggacacccagcgggccctgcacctgctggaagagtaccgctccaagctgagccaaacggaagatagacagctccgatcctctatcgaacgcgtaatcaatatctttcagagtaacttgtttcaagcactcattgatatccaggagttctatgaggtcactctgctggataatcccaagtgcatcgataggtctaagccctccgagccgatacaacctgtgaacacatgggagatctccagcctcccctcttctaccgtgacctcagaaacacttccttcatctcttagcccttcagtcgaaaagtaccgataccaggacgaggacacaccaccccaggaacatataagcccacagattacgaatgaggtgatcggtccagaactggttcacgtgtctgagaagaacctgtccgagatagagaatgtccatgggtttgtgtcccattcccacattagtccaataaagccgaccgaggcagtcctcccctctccacctacggtccccgttataccagtcttgcccgtgcccgccgaaaatactgtcatcctcccaaccatcccccaggcaaaccccccgcccgtgctggtcaacaccgattccttggagacacctacttacgtgaatggaaccgatgccgactatgaatatgaggagatcacactggagagggggaacagcgggctcggctttagcatcgctggcggaacggacaacccccacattggagatgattctagtattttcataacaaagattataactggcggcgccgcggcccaggacggcagactgcgcgtaaatgattgcatcctgcgggtaaacgaagtggacgtacgcgacgtcacacacagcaaggcggtggaggctcttaaggaggctggaagcattgtgcggttgtatgtgaaaagacgaaaaccggtgagcgagaagatcatggagatcaagcttataaaaggaccgaaaggcctcggtttttcaatcgcggggggcgtggggaatcagcacatacctggagacaatagcatctatgtcacaaaaataatagagggaggagctgcccataaggacggcaagctgcagattggagacaagctcctggcagtgaacaatgtgtgcctcgaggaggttacacatgaggaagccgtgacggccttaaagaacacatccgactttgtatacctcaaagtagctaagcctacttctatgtacatgaatgatgggtatgcaccaccagatataacgaatagctcctcccagcccgtggataaccatgtgtctccatccagctttcttggccagacgcccgcaagccccgcccgatacagccccgtctctaaggcagtgctcggggacgacgaaattacccgtgagccgaggaaagtggtgctccatagaggtagcacaggtctgggatttaatatcgtgggaggggaggacggagagggcatattcattagttttattctagccggaggtcccgcagacctgtctggagaactgcggaagggggatcggatcattagcgtgaactctgtggacctgagggcggcttctcatgaacaggcagcagctgccttgaagaacgccggccaagccgtaacaatcgtggctcagtatcgccctgaggaatactcaaggttcgaagctaagatacatgatctgagagagcagatgatgaatagttcaatatcaagcgggagtggttccttgagaacatctcagaaaaggagcttatatgtgagagcccttttcgactacgataagacaaaggacagcggacttccttctcagggattgaactttaagtttggtgacattttacatgtaataaacgcatcggacgatgagtggtggcaggccagacaagtaacccctgacggcgagagcgacgaggtgggagtcattccttctaaacgtagggtagagaaaaaggaaagagcaagactgaaaaccgtgaagtttaactccaagacacgggataaaggcgagataccagatgatatgggttccaaaggcctgaaacacgtgacaagtaatgcgagcgactcagagagcagttatctcatcctaatcacagacgagtacggttgttccaaaggtagaggacaggaggagtatgtgttatcatatgagcccgtgaaccagcaagaggtgaattacacgagaccagttatcattctcggccctatgaaagaccgcattaatgacgatctgatctctgagttccccgacaagtttggcagctgcgtgccccacaccacacgacccaagagagactatgaggtggacgggcgcgattatcatttcgtgacttctagagaacaaatggaaaaggacattcaggagcataagtttatcgaagctggccagtacaataaccatctctatggaacgtcagtgcagtcagttcgtgaagttgcggaaaagggtaaacattgtattctggacgtttctggtaatgcgatcaagcgactgcagatagcgcagctctaccctatatccatttttatcaagcctaagtctatggagaacataatggagatgaacaagaggctgactgaagagcaggcacgtaagaccttcgagagagccatgaaactcgaacaggagttcaccgagcacttcaccgcaatagtgcaaggagatacactcgaggatatttataaccaggtgaaacagattatcgaagagcaatctggttcatatatatgggtcccagccaaggagaagctgtag

SEQ ID NO: 185554 - DNA, 2676 bp, synthetic construct
  misc_feature 1..2676: note = Description of Artificial Sequence: Synthetic coding sequence
  source 1..2676: mol_type = other DNA
atgcccgtgcggaagcaggacacccagcgggccctgcacctgctggaggagtatcggtccaaactgtcacaaactgaagataggcagttgagatcctcaatcgaacgcgttatcaacatattccagtccaatctctttcaggccctgatcgacattcaagagttttatgaggtcaccttgttggataaccccaagtgtatcgatcgctccaaaccctctgagcccatccaacctgtcaatacatgggagatctcgagccttccgagctcaaccgtgacgtccgagactttgccgtcctctttatccccctccgtggaaaagtatcggtatcaggacgaggatactccaccacaggagcacatctcaccacagataaccaacgaggtcatcggccccgaactggttcatgtatctgaaaagaatctgtccgaaattgaaaatgtccacggattcgttagtcattctcacatttcaccaatcaaacccaccgaggcagtgttgccttcaccgcctacggtccccgtcattcccgttctaccagtgccggctgagaacacagtgatactccccaccattccgcaggccaacccccctcccgttctggtgaacaccgattctctcgagacgcctacatacgtaaatggcaccgatgctgattatgaatatgaagagatcactctcgaacgaggaaattccggcctgggattctcaatcgccggcggcactgacaatcctcacataggcgacgacagcagcatttttatcaccaaaatcatcaccggtggggccgccgcccaagacgggaggctgcgtgtcaatgactgcattttacgtgtgaatgaagtggacgtgcgtgacgtcacccattctaaggccgtggaggcactaaaagaagccggatccattgttcggctgtatgtgaaacgtcggaagccggtgtcagaaaaaattatggaaatcaagctgatcaaaggaccaaagggactggggtttagtattgccggcggtgtgggtaatcagcatataccaggtgacaacagcatatacgttaccaagatcatcgagggcggggcagcgcataaagatggaaagctgcagattggagataaactgctagccgtgaacaatgtgtgtctggaggaggttactcacgaagaggctgtgactgcgcttaaaaacacctcagattttgtgtatcttaaagttgccaagcccacaagcatgtacatgaacgacggttacgctccccctgatattacaaactcctcctcccagcccgtggataatcacgtttctccatccagtttcctgggccagactcccgcaagtcccgctcggtacagcccggtttccaaggccgtgctcggcgacgatgagatcactagagagcctcgcaaagtagtcctgcatcggggctcgaccggcttaggctttaacatcgtcggcggggaagacggggagggcattttcattagtttcattttggccgggggtcctgcagacctgagcggagaactccggaaaggcgatagaattatcagtgtgaactcggtagatctgcgggcagcatcccatgaacaagctgcagctgcactgaaaaatgctggacaggccgtgacaatagtagcccagtataggcccgaggagtattcgaggttcgaggctaaaatccatgatcttcgcgagcagatgatgaactctagtatttccagtggctcaggatctcttcgtacgtcacagaaacgaagtctgtacgtccgcgctctattcgactacgacaaaactaaggatagcgggttgcctagccagggacttaatttcaagttcggcgacatcttgcacgtgataaatgccagtgatgacgagtggtggcaggccaggcaggttacgcctgatggagagagcgacgaggttggcgtgattccatcaaagcgccgagtcgaaaaaaaggaacgcgcaagactgaaaactgtgaaatttaactccaagactcgtgataagggcgagattccagacgatatgggttcaaagggactgattggcggccaggaagaatatgtgctttcctatgaaccagtgaaccagcaggaggtgaattatacaagacctgtgatcatcctcgggcccatgaaggaccgcattaacgatgatctgataagcgagtttcctgacaaattcgggagttgcgtcccgcacaccacccggcctaagcgggattacgaggtcgatggccgggactaccattttgtgacttctcgtgagcagatggagaaagatatccaggagcataagtttattgaggccggacagtacaataatcatctttacggaacgtctgtccagagtgtgcgcgaggttgcggaaaaaggcaagcattgcattcttgatgtgtcagggaatgccatcaagagacttcagatcgctcaactgtacccaatttccattttcatcaagccaaaaagcatggagaacataatggaaatgaacaaaagactgaccgaggagcaggctcggaagacattcgaacgggcaatgaagctggaacaggagttcactgaacactttacagccattgtgcagggggacactctggaagatatctacaatcaggtgaagcaaatcatagaggagcaatctggcagctatatttgggttcccgccaaggaaaaactgtag

SEQ ID NO: 185555 - DNA, 627 bp, synthetic construct
  misc_feature 1..627: note = Description of Artificial Sequence: Synthetic coding sequence
  source 1..627: mol_type = other DNA
atgcccgtgcggaagcaggacacccagcgggccctgcacctgctggaagagtatagaagcaagctctcccagactgaagatagacaactgagatcaagcattgagcgggtcatcaacatttttcagagcaatttatttcaggcccttattgatatacaggagttttatgaggtgacactcctcgacaatcccaagtgcatagacaggagtaagcccagcgagcctatacaaccagtaaatacatgggagatctcttcgttgcccagcagcacggtgactagcgagactttaccttcttcactgtccccctctgttgagaaatacaggtatcaggatgaggacacacctccccaggagcatatttctccccagataacaaacgaggtgataggccccgaactggtgcatgtttcagaaaagaacctctcagagatagagaatgtgcacgggttcgtcagccactcacatattagtccaatcaaacctacagaggctgtgctcccaagtccacctacagtccctgtcatccccgtgctgcccgtgcccgctgagaacacggtcattttgcctaccatcccacaggctaatccgcctcctgtgctagtcaacacagattctctggaatag

SEQ ID NO: 185556 - DNA, 2616 bp, synthetic construct
  misc_feature 1..2616: note = Description of Artificial Sequence: Synthetic coding sequence
  source 1..2616: mol_type = other DNA
atgcccgtgcggaagcaggacacccagcgggccctgcacctgctggaggagtacaggtctaagctgtcccagactgaggataggcaactgcggagtagcatagaaagagttatcaatatctttcagtccaatttgttccaagcccttatcgatatccaggaattttacgaagtaaccctcctcgataacccaaaatgcattgatcggtcaaagcccagcgaacctatccaacctgtgaacacatgggagatatcatctctcccttcctctactgtcacctccgagacactgccgtcaagcctgtcaccatctgtagagaagtataggtatcaggatgaagacacccctccgcaggagcatatctctccccagatcaccaacgaggtcattggaccggagcttgtacacgtatccgaaaaaaatttatccgagatcgagaatgtgcacgggttcgtctctcactctcatattagccctattaaagccaatccccctcctgtgctcgtcaacacagactcgctcgagactccaacatatgtgaatggcactgatgccgattacgagtacgaggagattacgctggaacgcggtaattctggcctgggcttttccatcgccggaggaacggacaatccgcatatcggcgatgatagctccattttcatcactaaaattattacaggtggggctgcagcccaagacggtaggctgagggtgaacgattgtatcttaagggtgaacgaagtggacgtgcgcgacgttacccactccaaagcggtggaggctctaaaggaagccggatcaatcgtgaggttgtatgttaaacgtcgcaagccggtcagcgagaagattatggaaatcaaattgattaaaggccctaagggacttgggttctccatcgccggcggggttggcaaccagcatattccaggtgataactctatctacgtgaccaaaattatcgaaggcggggctgcgcacaaggatggaaaacttcagatcggcgacaaacttcttgctgtgaacaatgtttgtctggaggaagtgactcacgaggaggccgtaacagccctcaaaaatacgtccgacttcgtctacctgaaggtcgccaagcctacgagcatgtacatgaatgatggatatgcccccccagacatcacaaacagcagctctcagccagtcgataatcatgtttcgccctcgtcattcctgggccagacgcccgccagccccgctagatactcacctgtgtccaaggccgtactgggggacgatgaaattacacgcgaacctcgtaaggtggtgctgcatcgaggctccactggactgggtttcaacatcgtgggaggcgaagacggcgaggggatctttatttccttcattctggccgggggaccagccgacttgagtggagaactgaggaagggggaccgcatcatatctgttaattcagtcgatttacgtgctgctagtcacgaacaggcagctgccgccttaaagaacgccggacaggcagtgaccatagtagctcagtaccgacctgaggagtacagtcggttcgaggctaaaattcacgacctgagggaacagatgatgaactcgagcatcagtagcggctctgggtcactgcgtacgtcacagaagcggagcctatacgttagagcgctgtttgattatgataagacaaaggattccgggctgccgagtcaaggacttaattttaaatttggagatatccttcatgtcatcaacgcttctgacgatgagtggtggcaggcccggcaggtaacaccggacggagagagcgacgaggtcggtgtcatcccctcgaaaaggcgagtcgagaagaaagagcgcgctcggctgaagacagtcaaatttaactccaagacccgggacaaaggcgagattcccgacgacatggggagcaagggcctgaaacacgtcacgtccaacgcgtcagacagtgaatcctcttaccgcggccaggaagaatatgtcctatcctacgagcccgtcaatcaacaggaagtcaattatactcgcccagtgattattttaggacctatgaaggatagaatcaacgatgacctgatatccgaatttcccgacaaattcggaagttgcgttccacacaccacgcgtcctaagcgagattatgaagttgacggacgcgattatcatttcgtgacctctcgggagcagatggaaaaagatatacaggagcataaatttattgaagcaggtcagtacaacaaccacctgtacggcacaagcgtgcagtcggtcagggaggtggcagagaaggggaaacactgtattctcgatgtatccggaaatgcaattaagcgccttcagatcgctcagctgtaccccatttcaatatttatcaagccgaaatctatggagaacatcatggagatgaataagcggcttactgaggagcaagctcgcaagactttcgagcgggctatgaagcttgaacaagagtttactgaacactttactgccatagtgcaaggagacacactggaggatatttacaaccaggtgaagcagataatagaggagcagtctggaagttatatttgggtgccggctaaagaaaaactgtag

SEQ ID NO: 185557 - DNA, 321 bp, synthetic construct
  misc_feature 1..321: note = Description of Artificial Sequence: Synthetic coding sequence
  source 1..321: mol_type = other DNA
atgcccgtgcggaagcaggacacccagcgggccctgcacctgctggaggaatatcgttccaagctgtctcagacagaagaccgacagctgcgctcttcgattgaacgagtgatcaacatattccagagtaatttgtttcaggcccttatcgatatccaggagttctatgaggtgactctcctcgataatccaaagtgtattgacagaagcaagccttctgagcctatccagcccgtgaacacttgggagattagcagtctgccctctagcaccgtaacatcagaaacactgccttcatctctgtcaccaagcgtggagtag

SEQ ID NO: 185558 - DNA, 1113 bp, synthetic construct
  misc_feature 1..1113: note = Description of Artificial Sequence: Synthetic coding sequence
  source 1..1113: mol_type = other DNA
atgcccgtgcggaagcaggacacccagcgggccctgcacctgctggaagagtaccggagcaaactaagccagacagaggaccggcagttgcgcagttccatcgagcgtgtaatcaatattttccagtcaaacttattccaggccctgatcgatatccaggaattctacgaggtgactttgctggacaaccctaagtgcatagacagaagcaaaccttctgagccaatccagccagtcaacacctgggaaatatcatcgttaccctcctctacggtcacttccgaaacgttacccagcagcctgagcccctccgtggaaaagtacagatatcaagacgaggacacgcccccgcaggaacacatctctcctcaaattactaacgaggttataggcccggagctggtgcacgtctccgaaaaaaatctgtcagagatcgagaacgtccacggctttgtcagccattctcacatcagcccaattaaagtgaacggtacggatgctgattacgagtatgaggagattacactcgaacgaggaaactcgggcctggggttcagcattgcgggtggtaccgacaatccgcacataggagatgattcttcaatcttcattacaaagattattactggtggcgcagcagcccaagatggccggctcagggtcaacgattgtatactgagggtgaacgaagtagacgtccgcgatgtcacacacagtaaagctgtcgaggccctgaaagaggctggttctatcgttcgcctgtacgtcaagagacgaaagcccgttagcgagaagatcatggaaatcaaactcatcaagggccctaaggggctgggattttccatagcagggggagttggaaaccagcatataccaggtgataacagtatttatgtgactaagatcatagagggcggagcagcccacaaggatggaaagctgcagattggcgacaaactgctggccgtaaacaacgtttgcttggaagaggtgacacacgaagaagccgtcaccgcgttaaagaacacctccgactttgtgtacctcaaagtagccaagccaacaagcatgtacatgaacgacggctatgctcctccagacatcaccaactag

SEQ ID NO: 185559 - DNA, 2715 bp, synthetic construct
  misc_feature 1..2715: note = Description of Artificial Sequence: Synthetic coding sequence
  source 1..2715: mol_type = other DNA
atgcccgtgcggaagcaggacacccagcgggccctgcacctgctggaagagtaccgcagtaagcttagccagaccgaggaccgccaactgcgctccagtatcgagagggtcattaatatcttccagagtaatctgtttcaggcactgatcgatattcaggagttctatgaagtgaccctcctcgataatcctaaatgtatcgacagatctaagccaagcgagccgatccaacctgtgaatacttgggaaatctcctcgttgccctcctctaccgttacatccgaaaccctcccttcatcactgagtccatcagtggaaaagtatagataccaagacgaagataccccaccccaagagcacatctccccacagatcacaaacgaggtgatcggccctgagcttgtccacgtttccgagaagaacctcagtgagatagagaacgtgcatggttttgtgagccactcccacatcagtccaatcaagcccacggaggccgtacttccgagtccaccaactgtccctgtcatccccgtattaccggtccctgcagaaaacacggtgatcctgcctacaattcctcaagctaatccaccccccgtcttagtcaacaccgacagcctggagaccccaacctacgtaaacggaacggacgcagattacgaatacgaagagattaccttagagcgtggaaactccggcctggggtttagtatcgctgggggcacagacaacccccacatcggcgatgactcctccatctttattaccaagattatcaccggtggtgcagccgcgcaggacggtcgcctcagagtgaatgattgtattctaagagtgaacgaagttgacgtcagggacgtgacacattcaaaagccgtggaggcactcaaggaagccggcagcattgttcgcttatatgtcaagagaagaaagcctgtcagtgagaagattatggagatcaagctcataaaaggcccaaagggactggggttcagtatcgccgggggagtcgggaaccagcatatcccgggggacaacagcatatatgtgaccaagatcattgaggggggcgctgcgcataaggacggcaaactgcagatcggagataagcttcttgctgttaacaatgtgtgcctggaagaggtgactcatgaggaagcagtaacagcattgaaaaacacgtctgatttcgtctatctgaaggtagcaaaacccactagcatgtatatgaatgatgggtatgccccaccagacataaccaactcgtccagccagcccgtcgataaccatgtttccccatcgtctttcctgggccagacacccgcctcaccggctagatatagtccagtgagtaaggcggtactaggagatgatgagattacgagggagcctagaaaggtggtccttcaccggggttctacaggtttaggattcaacattgtcggtggggaggatggagaagggattttcatctcctttatcctcgcgggggggcccgccgatctctctggtgaactgcggaagggagatagaatcatctccgttaatagcgtcgacctgcgggctgcctcacacgaacaggctgctgccgctctcaagaatgctggacaggcagtgacgatagtggcccagtatcgccctgaggaatattcacgttttgaggctaagatccacgatctgcgcgagcagatgatgaactcctctattagctctggatccggtagcctgaggactagtcagaagcggagtctatacgtcagggccctgttcgactatgacaagaccaaggattctggcctgccaagccagggcctcaactttaaattcggagatatcttacacgtaatcaatgcatcagatgacgaatggtggcaggctcggcaggttacccctgacggggagagtgacgaggtgggtgtgattccttcgaagcggcgggtcgagaaaaaagagcgagccaggctgaagacagttaagttcaactctaaaactagggacaaaggcgagatccctgacgacatgggcagtaaaggcctgaaacatgtcacttctaacgcaagcgactccgagtcgagttatagaggacaggaggagtacgtgctaagttatgaacctgtgaaccagcaggaagttaactacacccgaccagtgattatccttggccccatgaaggacagaatcaacgacgacttgatttcagagttccccgacaagtttggctcttgcgtccctcacacaacccggcccaaacgggactacgaggttgacgggagggattaccactttgttacaagtcgcgagcagatggagaaggatatccaggaacataagttcatcgaggcagggcaatacaacaaccatctctacggtacttcagtccagagcgtgagagaagtggcggagaaaggaaagcactgcatcctagatgtgagtggaaacgctattaaacggcttcagatcgctcagctgtatcccatttctattttcattaagccgaagagcatggaaaatattatggagatgaataagcggctgaccgaggaacaggctcggaaaaccttcgagagagccatgaagctggagcaggagtttaccgagcactttaccgcgatagtgcaaggcgatacactagaggacatctacaaccaggttaagcagatcattgaagagcagtcagggtcttatatctgggtccccgcaaaggagaagttatag

SEQ ID NO: 185560 - DNA, 465 bp, synthetic construct
  misc_feature 1..465: note = Description of Artificial Sequence: Synthetic coding sequence
  source 1..465: mol_type = other DNA
atgcccgtgcggaagcaggacacccagcgggccctgcacctgctggaggaatacagatctaaactgtcccaaactgaggacagacaactcaggtcttcaatcgagcgcgtcatcaatatttttcagagcaatctcttccaagcccttatcgacattcaagaattctacgaggtcactctgctggataacccaaagtgcattgaccggtccaagccttcagagcccattcagcctgtgaacacatgggaaatcagtagtctccctagcagcacagtgacatccgagaccttaccctcgagcctatccccatccgttgagaagtatcgctaccaagacgaggatacccccccgcaagagcacatctccccccagatcaccaacgaagtgatcggcccagagctcgtccatgttagcgaaaaaaatctttccgaaattgagaatgtccacggattcgtgtctcactag

SEQ ID NO: 185561 - DNA, 2562 bp, synthetic construct
  misc_feature 1..2562: note = Description of Artificial Sequence: Synthetic coding sequence
  source 1..2562: mol_type = other DNA
atgcccgtgcggaagcaggacacccagcgggccctgcacctgctggaagaataccgctccaagcttagccagacagaggacaggcagctacgatcatctatcgagcgcgtgataaacatctttcagagcaacctgttccaggccctgatcgacattcaggagttttacgaggttactcttctcgataatccgaagtgtatcgaccgttcaaagccatctgaacccatccagcccgtaaatacatgggagatctcgagcctgccttctagcacggttacatctgagaccctcccgtcaagcctgtccccaagcgtcgagaagtacaggtaccaggacgaagataccccgcctcaagaacatatcagtcctcaaatcacgaacgaagtaatcggccctgagctcgtacatgtaagcgaaaaaaaccttagcgagatagaaaacgtacacgggttcgtgtcccacagccacatctctcctatcaaagtgaacggcacagatgcggattacgagtatgaggagatcacgctggagaggggaaacagtggtctgggattcagtatagccggcggtacagacaatcctcacatcggcgatgatagctccatttttattactaagatcattactgggggagcagccgcccaagacggtagactccgggtgaatgattgcatcctgcgagtgaatgaagtggacgtgcgcgacgtgacccattcaaaggcagttgaggcgctgaaagaggccggttctattgtgcggctgtatgttaaacggcgcaagccggtgtccgagaagattatggagatcaagttaattaaaggccctaaaggtttgggattttccatcgcgggcggcgtcggcaaccaacacatccctggggataatagcatttatgtgactaagataatcgagggtggagccgcccacaaagacggcaaactgcagatcggcgataaacttcttgcagtgaacaatgtttgtctggaggaagtcacgcacgaggaggctgtgaccgccctgaaaaatacgagtgactttgtgtacctgaaggttgccaagccaacctccatgtacatgaacgacggctatgcacctcccgacatcaccaatagttcctcccaaccagtcgataaccacgtgagcccatcctctttcctcgggcagactcctgcgtctcccgcccgctattcaccagtgagcaaggcagttctgggagacgatgaaatcacgagggagcctcggaaggtggtcctgcaccgcgggagtacgggccttggcttcaatattgtaggcggggaggacggtgagggcatttttatcagtttcatcctggctggaggtcccgccgatctctctggagagctgagaaagggggatcgcatcatcagcgtgaactctgtggacttgcgtgctgcttctcacgagcaggcagcagcagctctgaagaacgccggacaggccgtcaccattgtggcccaataccgacccgaagaatactccaggttcgaggcaaaaatccatgacctgcgcgagcagatgatgaacagctcaatctctagtggctcgggaagcttaaggactagtcaaaagaggtctctctacgtgagggctctatttgactatgataagactaaggacagtggactgcctagccaaggactgaattttaagttcggggatatactccacgtgatcaatgcatctgatgatgagtggtggcaggcaagacaggtgacaccggacggcgaaagcgacgaggtaggagtgatcccttcaaaaagacgtgtagaaaagaaggaacgagctcgcctgaagaccgtgaagttcaattcgaagacccgtgacaaaggggagataccagacgacatgggctccaaagggctcaagcacgtaacaagcaatgcatctgattctgaaagttcctaccgaggacaggaggagtatgtgctttcctacgagccggtaaatcaacaggaagtgaactatactagaccagtaattatactgggtccaatgaaggatagaatcaacgatgatctaatttccgaattcccggacaagttcgggagctgcgtgccccataccacccgacctaagcgcgactacgaggtggatgggcgggattatcattttgtgacaagccgagaacaaatggaaaaggatatccaggagcacaaattcatcgaggccgggcagtataataaccacctgtatggcacatccgttcagtctgtgagggaagtggccgagaaaggcaaacactgtattcttgatgtatcaggcaatgcaattaagcggctccaaattgcgcagttgtaccccatctccatctttatcaagcctaaatccatggagaatataatggagatgaacaagcggctgactgaggaacaggcaagaaaaaccttcgaacgggccatgaagctcgagcaggagttcaccgagcactttactgcaatagtgcagggagatactttagaggatatatacaaccaggtgaagcagattattgaagagcaatccggcagttacatatgggtcccagccaaggaaaagctgtag

SEQ ID NO: 185562 - DNA, 111 bp, synthetic construct
  misc_feature 1..111: note = Description of Artificial Sequence: Synthetic coding sequence
  source 1..111: mol_type = other DNA
atgcccgtgcggaagcaggacacccagcgggccctgcacctgctggaggaataccgatcaaaactgtctcagactgaagatcgccagctgagatcttccatcgaacggtag

SEQ ID NO: 185563 - DNA, 372 bp, synthetic construct
  misc_feature 1..372: note = Description of Artificial Sequence: Synthetic coding sequence
  source 1..372: mol_type = other DNA
atgcccgtgcggaagcaggacacccagcgggccctgcacctgctggaagagtacaggtctaaactttcccagacagaagatcgacaactacgctctagtattgaacgcgtaatcaatatctttcagagcaacttatttcaggctctcattgacatccaggagttctatgaggtgactttgctcgacaacccaaaatgtatcgaccggagcaagcctagtgagccgatccagcctgttaatacttgggagatatcctctctgccatcgtcaaccgtgacatcagagaccttgcccagttcattgagccctagtgtggagaagtatcggtatcaggacgaggatactccaccgcaggagcacatttctccttag

SEQ ID NO: 185564 - DNA, 2715 bp, synthetic construct
  misc_feature 1..2715: note = Description of Artificial Sequence: Synthetic coding sequence
  source 1..2715: mol_type = other DNA
atgcccgtgcggaagcaggacacccagcgggccctgcacctgctggaggaatacaggtctaaattatcacaaacagaggacagacagctccggtcatcaattgaacgcgtcatcaatattttccagagcaaccttttccaagccctgatcgatattcaagaattctatgaagttaccttgctggataatccaaagtgcatcgatcgctccaaacccagcgaacccatccaaccagttaacacctgggaaatatctagtttgccatccagcaccgttactagcgaaaccctgccttcctctctgagccctagtgtcgagaaatacagataccaagatgaggacacacccccacaggagcacatatctccacaaatcaccaacgaggtgatcggacccgaactcgtgcatgtaagtgaaaaaaacctaagcgagatcgagaatgtacacgggtttgtttcccatagccatattagcccaatcaagccaacagaggcggtcctgccttctccccccacagtgccagtcattccagtactgcctgtgcccgcagagaacaccgtaattctgccgacaattccccaggcaaaccctcctcccgttctcgtgaatactgattcgctggagactcctacatacgtcaacggaaccgacgctgattacgagtacgaggaaataaccctagagcgcggaaattccggtctgggattctccatcgccggagggacagataacccccatattggtgatgatagctctatttttataaccaagattattaccggcggcgcagccgctcaggacggcagattacgcgtgaatgactgtattctccgagtcaatgaagtcgatgtgcgcgatgtaacgcactcaaaggccgtcgaagctctcaaagaagccggatctatagtccgcctttatgtgaagaggagaaagccggtttcggagaagatcatggaaattaagttaattaagggtccgaagggcctggggttcagcatcgccgggggtgttgggaaccagcatatacctggtgacaacagcatatatgttacaaaaatcattgagggcggcgctgcccacaaggacggtaaattgcagattggagacaagcttctggcagtaaacaacgtgtgcctcgaggaggttacgcacgaggaagctgtaacagccctgaagaacacaagcgatttcgtttatctaaaagtggctaagcctacaagtatgtacatgaatgatggatacgctcctcccgacatcacaaattcctctagtcaaccggtcgataaccacgtgtcgcctagttcattcctgggacagaccccagcatcacccgctcggtatagcccagtaagcaaggccgttctcggagacgacgagattactagagaacctagaaaggtcgtccttcaccggggaagcacaggcttgggattcaacatcgtgggcggagaagacggagagggcattttcataagctttatccttgcaggtgggccagccgatctgagcggagaactgcgcaaaggtgacagaattatctccgtcaactcggtcgacctgagagccgccagccacgagcaggcagccgccgcacttaagaacgcaggccaagccgtgaccattgtcgctcagtaccgacccgaggagtacagcagatttgaggccaagatccacgatctccgagagcaaatgatgaattcaagtatttcatccggatctgggagtctccgaacatcccaaaagcgctcactgtacgttcgagcccttttcgattacgataaaacaaaggattccggcctcccctctcagggtttaaacttcaaatttggggacatactgcacgttattaatgcttctgacgacgagtggtggcaggccaggcaggtcaccccagacggcgagagtgatgaggtgggggtgatcccatcgaagcggagggtggagaagaaagagcgggcacgccttaagaccgtgaagtttaatagtaaaactcgcgataaaggcgagatccccgacgacatgggctccaagggcctaaaacatgtaacttctaacgctagtgattctgaatccagttaccgcggacaggaggagtatgtgttatcttacgaacctgtaaatcagcaggaagtgaattacactcggccggtcattattctcggcccaatgaaggataggatcaatgatgatctcattagtgagtttccggacaagtttgggtcgtgcgtaccacacaccacccgacctaagagggattacgaagtggacggacgggattatcacttcgtgacttcgagggaacagatggagaaggacattcaggagcacaagttcatcgaggcggggcagtacaacaaccacctgtatgggaccagcgtgcaaagcgttcgggaggtcgcggagaaaggaaagcactgtattcttgatgtaagtggtaatgctataaaaaggctgcaaatagcccaactgtatcctatctctatttttatcaagcctaaatctatggagaatattatggaaatgaacaagcggctaactgaggagcaagcccgtaaaactttcgagcgggcgatgaaattggagcaagaatttaccgagcactttacagcaattgtgcaaggcgatacgctggaggatatatataaccaggtgaaacagattattgaagagcagagtggatcctacatatgggtgcctgcaaaggaaaagctctag

SEQ ID NO: 185565 - DNA, 2682 bp, synthetic construct
  misc_feature 1..2682: note = Description of Artificial Sequence: Synthetic coding sequence
  source 1..2682: mol_type = other DNA
atgcccgtgcggaagcaggacacccagcgggccctgcacctgctggaagagtatcgaagcaaactgagtcagacggaagatcggcagttgagatcatctatcgagcgcgtgatcaacatatttcagagcaacctttttcaggcacttatcgacattcaggagttctacgaagtaacactccttgacaacccaaaatgcatcgatagatctaaaccatctgagccgatccagccagttaacacctgggaaatatcttcactgccatccagcaccgtgacatccgaaacactgccatcatcattaagcccctcagtcgaaaagtacagataccaggacgaagacacccctccccaggaacacatttctcctcagattaccaatgaagtcatcggaccggaactggtccacgtgtccgaaaagaacctgagtgaaatcgaaaatgtgcacggattcgtctcacactcccatatttcacctatcaaagccaatcctccccccgtactggttaacacggattcactggagacccctacatatgtcaacggcactgatgccgactacgaatacgaggagatcactcttgagcgaggaaatagtggtttgggctttagtattgccggcgggacagacaatccccacatcggagacgactcttccatatttatcacaaaaatcatcactggcggagccgcggctcaagatgggcgcttgcgtgtgaacgattgtatacttcgagtgaacgaagtggacgtaagggacgtgacacatagtaaagctgtggaggccctgaaagaagccggctctattgttagactgtatgtgaagagacggaaacctgtgagcgagaagatcatggagatcaagctcatcaaaggccctaaaggcctcgggtttagcatagctggcggcgttggaaatcagcacattcccggagacaatagcatctacgttacgaaaataatcgagggcggtgccgctcataaggatgggaagctccagataggcgacaagctgctcgctgtcaataacgtgtgcttggaggaagtgactcacgaggaagcagtgacagccctcaagaacacatccgattttgtctacctgaaggtggccaagcctacatccatgtacatgaatgacggctacgcaccaccggacatcactaatagctctagccagcccgtggacaaccatgtgtccccctcctcgttccttggacagaccccagcctcacctgcccgctactcacccgtgagcaaggccgtcctcggcgacgatgagatcaccagagaaccacggaaagttgttctccatcgcggaagtacggggctgggattcaatatcgtgggtggcgaagatggggaggggatttttataagctttatcctagccggagggccagccgacctcagtggggagctgaggaagggcgacagaatcattagcgttaactctgtagatcttagggccgcgtctcatgaacaagcagcagccgctcttaagaacgctggtcaggcagtcactatcgtggcacagtataggccagaagaatactctagatttgaggctaagattcacgatctgagagagcagatgatgaattcctccatttcctcaggaagtggctccctgcgcacctctcagaagaggtcgctttacgtacgggcactatttgattacgataagacaaaggactcaggccttccctcacagggactcaactttaagtttggggatattctgcatgtgatcaacgccagcgacgatgaatggtggcaggcacggcaggttacgccggatggggagagtgacgaggtgggcgtgatacctagtaaacggcgggtggagaagaaagagcgcgctagattaaagacagtaaaatttaactctaaaacccgggataaaggccagtcattcaacgataaacgaaagaagaacctgttctcccgtaagttccccttctataagaataaagaccagtcagagcaggaaaccagcgacgccgatcaacacgtgacaagtaatgccagcgattcggagtctagttaccgcggtcaagaagagtatgtcctatcttatgagccagtcaatcagcaggaggtgaattatacccggccggtgatcatattggggcctatgaaagatcgaataaatgacgacctgatctcagaattcccagataagttcggcagctgtgtcccacacaccactcgacctaaaagagattacgaagtcgatggcagagactaccattttgtcacaagccgcgaacagatggaaaaagatattcaagaacacaagtttatcgaagccggccagtacaacaatcatttgtatggaacctccgtacagtctgtgagagaggtcgccgagaagggcaagcattgcatcttagacgtgagtgggaatgcaataaagaggctccagatcgctcaattatatcctattagcattttcatcaaacccaagagcatggagaatattatggaaatgaataagaggctgactgaggagcaggcgcgcaagacgttcgagcgggctatgaaactggagcaggagtttacagagcatttcaccgcaatcgtgcagggagataccctggaagacatctacaaccaggttaaacagatcattgaggagcagtctggcagctacatatgggtgcccgccaaggaaaagttgtag

SEQ ID NO: 185566 - DNA, 2730 bp, synthetic construct
  misc_feature 1..2730: note = Description of Artificial Sequence: Synthetic coding sequence
  source 1..2730: mol_type = other DNA
atgaacgcctacctgaccaagcagcacagctgcagccggggcagcgacgggatggacgccgtaagatccgctcctacactcattcgagacgcccattgcgcctgcggttggcagcgcaactgtcagggactgggctattcctcacaaaccatgccttcctctgggcccggcgggccagcctcaaaccgtaccgggggatcctcttttaataggaccctgtgggacagtgtccgcaaatctccccacaagacaagcaccaagggcaaggggacgtgcggggagcactgtacttgcccacacggctggttttccccagcacaagcatcaccagctcccatcattgttaatacagacaccctcgatacaataccctacgttaatggaactgaaatcgagtacgagttcgaggaaattaccttggagcgcggaaactcgggcctgggcttctcgatcgctggcgggactgataacccccacataggagatgatcccgggattttcattactaagatcatccctgggggcgcggctgctgaggacggccgcttgagagtgaatgactgcatcctccgcgtgaacgaggttgatgtgagcgaagtatcacattctaaagccgtggaggccctgaaagaagcagggtcgatcgtgcgactctacgtccgcagaagaagacccattcttgaaacagtcgtagaaatcaagctgttcaagggtcctaagggacttggattcagcattgccggcggcgttggtaatcaacatatccccggggataacagcatctacgtgacgaaaattatcgatggaggggcggcacagaaggacggccgcctacaggtgggggaccggctgctgatggtaaacaactatagcctggaagaggtgacacacgaggaagctgttgccatactgaagaacacctccgaagtggtgtatctcaaagttggaaagccaactaccatctatatgactgatccttacgggccacctgacatcacacacagttattctcccccgatggaaaatcacctcttgtccgggaataacggcaccctggagtataagaccagcctcccaccaatctcccccgggagatactcacctatccctaagcatatgttggtggatgatgattatactaggccacctgagcctgtgtacagcacagtaaataagctgtgtgacaaacctgcatcacccaggcactatagtcccgtcgagtgtgacaaatctttcctgttgagcgctccttactctcactaccacctggggcttttgccagactcggaaatgacatctcacagtcaacacagcacggccacacggcagccaagcatgaccctgcagagggctgtgtcactggagggggagcctaggaaggttgtccttcacaagggctcgaccggcttaggttttaatatcgtcgggggagaagatggcgagggcatcttcgtgagtttcattctcgctggaggacctgcggacctatctggagagctgcaacgaggagatcagatcctctcagtgaatggcatcgatctccgcggtgcctcccatgagcaagcggctgcagccctcaaaggggcggggcagacggtgaccatcattgcccagtatcagccggaagattacgcacggttcgaggccaagatccacgacctcagagagcaaatgatgaatcattcaatgagctccggtagcgggtctctgcgcactaaccaaaagcgcagcctgtatgtgagagcaatgttcgattatgacaagagcaaagattctggcctcccatcccagggcctgagcttcaaatatggtgatattctacacgttattaatgcttcagacgacgaatggtggcaagctagaagagtgatgctcgaaggtgactcagaagaaatgggggtgattccctcgaagaggagagtagaaaggaaagagcgggcaagactgaagactgtcaagtttaacgcaaaacctggggtgattgacagcaaggggtcctttaacgataagcgaaagaagtcattcatattctcgcgcaaattcccattctataagaataaggagcagtcagaacaggagacctctgaccctgaacgtggacaagaggatcttatacttagctacgagcctgttactcgccaggagatcaactatacccgacccgtgataatcctggggcccatgaaggatcgaataaacgatgaccttatctcggaattccccgataagttcggatcgtgtgtgccacacaccacaaggcctaagagggactacgaagtcgacggtagagactaccactttgtgatatctcgtgaacagatggagaaagatatccaggaacataagttcatcgaagccgggcagtacaatgataatctctacggcacctcggtacagtcagttcgattcgtcgcggagagaggcaaacattgcatactagatgtaagtggcaatgcaattaaacgactgcaagtcgcgcagctttatcccattgccatctttattaagccacgctctttggagcctctgatggagatgaacaagaggctgactgaggagcaagccaaaaaaacttacgaccgcgccataaagctggaacaagaattcggagaatacttcactgctatagttcagggggatactcttgaggacatctacaaccagtgcaagctggttatcgaggagcagtcagggcctttcatttggataccaagcaaggagaagctgtag

SEQ ID NO: 185567 - DNA, 2376 bp, synthetic construct
  misc_feature 1..2376: note = Description of Artificial Sequence: Synthetic coding sequence
  source 1..2376: mol_type = other DNA
atgcagcacgccttcatccccgccagccccgcccccatcatcgtgaataccgacaccctggataccattccctatgttaatggaactgaaatcgagtacgaattcgaagagataacactggaacggggtaatagcggcctgggtttctctatagctggaggcaccgacaatcctcacattggagacgatcccggcattttcataaccaaaattatccctggcggcgccgctgcagaggatgggagactcagggtaaacgattgtatcctccgcgtgaacgaagtggatgtgagtgaggtgagccatagcaaggcagtggaggcactcaaggaggccggttcaatcgttcggctctacgtgagaagacggagaccaatcttggagacagtggtggagattaagcttttcaagggccccaagggccttggcttctctattgccggcggcgtaggcaatcagcacattcccggagacaatagcatctatgtgaccaaaattatagacggaggggcggcacagaaagatggcagacttcaggtgggagaccgtctacttatggttaacaattattcactggaggaagtcacacacgaggaggcggtggctattctcaagaatacaagcgaggttgtgtacttgaaggtcgggaagcccacgactatctatatgacagacccctatggacctcccgacataacacacagctatagtcccccaatggagaaccacctgctctctggaaacaatgggacgctggagtacaagacctccttacctcccattagccccggacgttacagccctatcccgaagcatatgttggttgacgacgactatacacggccacctgagcctgtgtactccacagtcaataagctctgcgataaacctgcatcgcctcggcactacagtcccgtggagtgtgataagtcttttttgctgagcgcaccttacagccattaccacctgggcttgctccctgactcggaaatgacatcgcactctcagcacagtaccgcgaccaggcaaccaagcatgacgctacagagggcagtcagccttgaaggagagccgagaaaggttgtgttacacaagggctctactggcctcggtttcaatatcgtggggggcgaagacggcgagggaattttcgtgtcattcattctggcaggcgggccagccgatttgagtggagaactgcaacggggagaccagattctttctgtgaatggaattgatcttagaggcgcctcccatgagcaagcagccgcagcactcaagggcgccggacagacagtcactatcatagcccagtaccagcctgaggattatgccagatttgaagcaaagatccacgatcttcgtgaacagatgatgaatcattcaatgagttcaggaagcgggtcactcagaactaatcaaaagcggtcactttatgtgcgagctatgttcgattatgacaagtcgaaggacagcggccttccctcgcaggggctcagttttaagtatggggatatccttcacgtaattaacgcctcagacgacgaatggtggcaggctagaagagtgatgctggaaggtgatagcgaggaaatgggggtgatcccatccaagcgccgggtggagaggaaagaaagagcaagactgaaaacggtcaaatttaacgccaagccaggagtcatcgactccaagggagacatccccggccttggggacgacggctacgggaccaagacccttcgagggcaggaggatctcatcctttcctatgagcctgttacccgccaggagatcaactacacaaggcccgtcatcatacttggaccaatgaaagataggatcaatgatgatcttatcagtgagttccctgataagtttggctcttgcgtgcctcacacaaccaggcctaagcgtgactacgaggtcgatggccgggactatcattttgtaatcagtagggaacagatggagaaagacatacaggaacataagtttatcgaggctggccagtataatgacaacctgtatggaacatcagtgcagagcgttaggtttgtggccgagcggggcaagcattgtatcctggatgtgtcaggcaacgcaattaaaagactacaggtggcgcagctgtacccaatcgccatctttatcaagcctcggtccctggagccgctgatggagatgaataaacggcttaccgaagagcaggccaagaaaacttatgaccgcgctattaaactggagcaagagttcggtgaatacttcacggctatagtgcagggggatactttggaagacatctacaaccagtgtaaactcgtgatcgaggaacagagcggcccctttatctggatccctagcaaggagaagctctag

SEQ ID NO: 185568 - DNA, 2928 bp, synthetic construct
  misc_feature 1..2928: note = Description of Artificial Sequence: Synthetic coding sequence
  source 1..2928: mol_type = other DNA
atgggcatcttcaagagcagcctgttccaggccctgctggacatccaggagttctacgaagttaccctgctgaacagtcagaagtcgtgtgagcagaagatcgaggaggccaatcaggtgctgcagaaatgggagaagacctctttgttagcaccctgtcacgacagactccaaaaatctagtgaactgactgactgtagtggaagcaaggaaaatgcttcctgtattgagcaaaacaaggagaaccagtccttcgagaacgagacagatgaaacgactacgcaaaaccagggtcgatgcccggcgcagaactgcagcgttgaggctccggcatggatgcctgtacatcattgtaccaaataccgctatcaagatgaagacgcgccgcatgaccattcgttgccccgcctgacacacgaggtgaggggacctgagttggttcacgtgagcgagaaaaacctgtcccagattgagaacgtccacggatacgttcttcagagccacatctcccccctcaaagcttctccagcacctataatcgtgaacacggacaccctggacaccataccttacgtgaacggtactgagatagaatatgaatttgaagagattaccttggaaaggggtaattcgggcctcggcttttcaatagctggaggaaccgataatccacatatcggggacgatccaggtatcttcattacaaaaattattcccggcggagcggcggccgaggacggccggctgagagtcaatgactgtatcctgcgcgtgaatgaagtggatgtgtctgaagtaagtcatagtaaagcagttgaagctctcaaggaggcaggtagtattgttcgcctatacgtacgcagacgccggcccatcctggaaacggtggttgagattaaattgttcaaggggccgaagggcctggggttctccatcgctgggggagtaggcaaccagcacattcctggagataactccatctacgtcactaaaatcatcgatggcggtgcagcccagaaggacggacgacttcaggtgggtgaccgactactcatggtcaataactacagtttggaagaagtgacccatgaggaggccgtggctatcttgaagaacacctcggaggttgtctacttgaaggtgggcaagcctaccacaatctacatgactgacccatacggccccccagacatcactcactcctattcaccccccatggaaaatcatctgttgtcgggcaacaacgggacactcgaatacaagacttcactgcctcccattagtcctggacggtattcccccatcccaaagcatatgcttgtggacgacgattatactagacccccagagcctgtttattcaaccgtgaataaattatgtgataaaccggcctccccacgccactacagccctgtggaatgcgataagtcattcttactatctgcaccctactcccattatcaccttgggctgctgccagactctgaaatgacctctcacagccagcactccaccgcaacacgacagccgtctatgaccctgcagcgagccgtgtccctggagggcgagccacggaaagtggtgcttcataaagggtcaacaggcctcggtttcaacatcgtcggcggcgaggacggggaggggatattcgtcagcttcatactggcaggtggtccggctgatttaagtggagagttgcagcgcggtgatcagattctgtcggtgaatggcatcgacttgaggggcgcttctcatgagcaggcagccgctgcccttaagggagccggacaaacagtgaccatcatagcgcagtaccagcccgaagattatgctaggttcgaggcaaagatccacgacttacgggagcagatgatgaaccactccatgtcctcaggcagcggcagtcttagaacaaatcagaagaggagcttgtacgtgagagccatgttcgattatgataaaagtaaggatagcggcctgcccagccaaggcctctctttcaaatacggggacatactacacgtgattaatgcttctgatgacgagtggtggcaggctagaagagtgatgcttgaaggcgactccgaggagatgggggtgatacccagtaaacggagagtcgagcggaaggaaagagctcggctgaaaactgttaaattcaatgctaagcctggcgtgatagattcaaaagggtcatttaacgataaacggaagaagtcctttattttctctagaaaatttcctttttacaagaacaaggagcagtcagagcaggaaacctccgatcccgaacgcggccaggaagatctgattttgtcatatgagccggtgacaagacaggagatcaattacacccgtccagtaattatccttgggcctatgaaggaccggatcaatgacgatcttatcagcgaattccctgataaattcggcagctgtgtgcctcacaccacacggcccaaacgagactatgaggtcgatgggagagactatcactttgtaatttctagggagcagatggagaaagatatccaggagcataagttcatcgaggcgggacagtacaacgataatctatacggcacttcagtccaatcagtccgcttcgtcgccgagcggggaaaacattgcatactggatgtcagcgggaacgccatcaagcggctacaagtggcccaattgtatcccattgctatattcattaagccgcggtccctggagcctttaatggagatgaacaaacgcctcaccgaggagcaggccaaaaaaacctacgaccgagctatcaagttagaacaagagtttggcgagtatttcacagccatcgtgcagggggatacgcttgaggatatatacaatcaatgcaagctggtaatcgaggagcaatccgggccttttatttggatcccaagtaaagagaagctctag

SEQ ID NO: 185569 - DNA, 1005 bp, synthetic construct
  misc_feature 1..1005: note = Description of Artificial Sequence: Synthetic coding sequence
  source 1..1005: mol_type = other DNA
atgatgaaccacagcatgagcagcggcagcggcagcctgcggaccaaccagaagaggtcattgtatgtgagagctatgtttgattacgataagtcgaaggattccggtctgcccagccaggggctgagtttcaaatacggtgacatattacatgtcatcaacgcctcggacgatgagtggtggcaggcaagaagggtaatgcttgaaggagattctgaggaaatgggcgtcattccaagcaagagacgggtggaacggaaggaacgggcgcgacttaaaaccgtgaaattcaatgcgaagcctggcgtcatcgacagtaagggagacattcctggactcggggatgatgggtacggcacgaagactctccgtggccaggaggacctgatcctaagctacgagcccgtgactcggcaggaaattaattacacccggcccgtaataatcttaggtcccatgaaggacaggatcaacgacgacttaatatctgagtttccagataagttcggcagttgtgtgccacataccacacgaccaaaaagggattacgaggtcgatggacgagactaccatttcgtgatctcaagggaacagatggaaaaggatatccaggagcacaagtttatcgaggctggtcaatacaacgataacttgtacggaaccagtgtccagtctgtgcggttcgtggcagaaagagggaagcactgcatcctggatgtctctggtaatgctatcaaaaggctgcaggtagcccaactttacccgatcgccatttttataaaacccagatccctggaacctctaatggaaatgaataagaggctgaccgaggaacaggcgaaaaaaacctacgatagagcaattaaactcgagcaggagtttggcgaatattttacagcgatcgttcagggtgacactctggaagacatttacaatcagtgtaagttggtaatcgaagaacagtctggcccattcatatggatcccttcaaaagaaaaattgtag

SEQ ID NO: 185570 - DNA, 2613 bp, synthetic construct
  misc_feature 1..2613: note = Description of Artificial Sequence: Synthetic coding sequence
  source 1..2613: mol_type = other DNA
atgttcttcgcctgctactgcgccctgcggaccaacgtgaagaagtatagataccaggatgaagatgcaccccacgaccactcactgccgcgcctgactcatgaggtgagaggccctgaactggtgcacgttagcgagaagaatctgagtcagattgaaaatgttcacggatacgtgctgcagtcccacattagccctcttaaagcctctcctgcacctatcatcgttaataccgataccctggacaccataccctatgttaacggaacagaaattgaatacgaatttgaggaaatcactctggagcggggcaactccggcctaggctttagcattgccggcggtacagacaaccctcacatcggtgacgaccccggtattttcatcacaaagatcatccctggcggcgccgcggccgaggacgggaggctaagggtgaatgattgcattctgcgggtgaatgaagtagacgtttcagaagtttctcatagtaaagcagtcgaagctctgaaagaggctgggagcattgtcaggctgtatgtgcgccgtaggcgcccaatactcgagacagtcgtggaaatcaaactattcaagggtcctaagggacttggcttttccattgccggaggtgtgggaaatcagcatatacccggagacaattccatatacgtgaccaagattatagatggcggcgccgcccagaaagacggccgccttcaggtgggtgaccgcctgctcatggtgaataattattctcttgaggaggtaacccatgaggaggccgttgctatcctgaagaatacaagcgaggttgtatatttaaaagtgggaaagccaacaacaatatacatgacagacccatacggcccacctgacataacacattcatacagtcctccgatggagaatcatctgctaagcgggaataatgggactctagagtataaaacttcacttccaccaatttccccggggaggtattctccaatcccaaaacacatgcttgtggacgacgactataccaggccccccgagcctgtctattcaacagtgaataaactgtgtgacaaacctgccagcccccggcactactctcctgtcgagtgtgacaagtcatttcttctgtctgccccctatagtcactatcatttgggactgctgcccgattccgaaatgaccagtcactcacagcattccaccgctactagacagccatccatgaccctgcaaagagcggtgtccctggagggcgaacctaggaaagtggtactccataaaggatccaccggtctgggatttaacatcgtcgggggagaagacggtgagggtatcttcgttagctttatactggctggaggccctgctgacctcagcggggaacttcagagaggagaccagatcctgtctgtgaatggcatagatctcagaggggcctctcacgagcaagcagccgcggcactcaagggggccggccaaacagttaccataatcgctcagtatcaacccgaggactacgctcggttcgaagcaaaaatacacgacttgcgcgagcaaatgatgaatcactcaatgtccagcggttcaggctccctgaggacaaatcagaagcggtctctgtatgttcgcgccatgtttgattatgacaagtccaaagactcaggattgccgagtcagggtctttcctttaagtatggagatattctgcacgtgattaacgcatcagatgatgaatggtggcaagccagacgagtgatgttggagggcgactccgaagaaatgggggtgatcccatctaagcgtcgggtggagcgcaaggaacgggcaaggctcaaaactgtgaaatttaatgctaaacccggagtgatcgactcgaaaggctcatttaacgacaagagaaagaagtccttcatttttagtcggaaattcccgttctataagaataaagagcagagcgagcaggaaacatccgatccagagcgaggccaggaagatctcatcttgtcgtacgagcccgtgactagacaggaaataaactatacacggccagtcatcatcttaggcccaatgaaagaccggatcaacgacgacttaatctctgagtttccggataagttcgggagctgcgttccacacacgacccggcccaagagagactacgaggttgatggtcgggattatcacttcgtgatttctcgggagcagatggaaaaagacatccaagagcataagttcattgaggccggccaatacaacgataacctgtatgggacctcagtgcagagtgtgcggttcgtcgccgaacgtggcaaacattgcatcttggatgtctctgggaatgcaatcaaaaggctccaagttgcacagttgtacccaatagcaattttcattaagcctcgctccctagaaccgttgatggaaatgaacaagagactgacagaagaacaagctaaaaaaacctatgatcgggcaattaagctcgagcaagagttcggcgaatactttaccgctatcgtgcaaggtgacaccttggaagatatatataatcagtgtaagctcgtaatcgaggagcaatcgggcccctttatttggattcccagtaaggagaagctttag

SEQ ID NO: 185571 - DNA, 1047 bp, synthetic construct
  misc_feature 1..1047: note = Description of Artificial Sequence: Synthetic coding sequence
  source 1..1047: mol_type = other DNA
atgatgaaccacagcatgagcagcggcagcggcagcctgcggaccaaccagaaacgcagcctgtacgtccgtgctatgtttgactatgacaagtctaaagattccggtctgcccagccaaggtttgtcctttaagtatggtgatattctacatgtaattaacgcctctgatgacgagtggtggcaagctagaagagtgatgttagagggcgactccgaagaaatgggcgtcattccctctaaacgacgcgtggaacgcaaggaacgagcccgcctcaaaacggtgaaattcaacgctaaaccgggcgtaatagattctaaaggtgatatcccagggctcggggacgatggctacgggaccaagactttgaaacacgtctcgagcaatgcgtcggatagcgaatcctcttatagaggccaggaggatctgattttgtcttacgaaccagtgaccagacaggagatcaattatacccggcccgtgatcatcctggggccaatgaaggaccggatcaacgacgatttaatcagtgagttccctgacaagtttggaagttgcgtgccccacacaacaagacctaaacgcgattatgaggtggatggccgcgactatcatttcgtgatttccagggagcagatggagaaagacatccaggaacataagttcatagaggcgggacagtacaatgacaatctctatggcacctctgtccagtctgtacgatttgtcgctgaacgaggcaagcattgtatcctggatgtcagcgggaacgctataaagcgcctgcaagtggcccagctctatcccattgccatctttatcaagccgcgaagcctagaaccacttatggagatgaataaaaggctcaccgaagagcaggctaagaagacgtacgatagggcaattaagctcgagcaagagtttggggagtacttcactgccattgtacaaggggatacactggaagacatttacaaccagtgcaagctggttatcgaggagcagagcggaccgtttatatggatcccgagcaaagaaaagctatag

SEQ ID NO: 185572 - DNA, 2250 bp, synthetic construct
  misc_feature 1..2250: note = Description of Artificial Sequence: Synthetic coding sequence
  source 1..2250: mol_type = other DNA
atgcagcggcccagcgtgagccgggccgagaactaccagctgctgtgggatactattgccagcttgaagcagtgtgagcaggcgatgcagcacgcctttattcctgtgaacggcacagaaatcgaatatgagttcgaggagataacgttagaaaggggaaattcaggcctgggtttctccatcgctggaggaacggataatcctcatattggggatgaccccggaatctttatcactaaaattatccctggtggggccgcagccgaggacggacgcctgcgcgtcaacgattgcatacttcgagtcaatgaggtggatgtctctgaagtaagccactccaaagccgtcgaagctctgaaagaggctgggtccatcgtcaggctgtatgttcggagacgtaggcccatcctggagacggtcgttgaaatcaagcttttcaaagggccaaagggtttaggcttctccattgctggcggggtgggaaaccaacatattcccggagacaactcaatttatgtcaccaagatcatagacggcggcgcggctcagaaagacgggcgcttgcaagtcggagaccgtctcctgatggtaaataattatagcttagaggaagtgacacatgaggaagcagtggccattctgaaaaacacctctgaagtggtttatttaaaggtcggaaagcccactactatttatatgactgacccatatggtccccctgacatcactcattcttattctccccctatggagaaccacctgctgtcggggaacaatggtacgttggagtataagacgtcgctgcctcctattagcccaggaaggtactctccaatccccaaacatatgctggtggacgatgactacacaagccactcacagcactctactgcaacccgtcaacctagtatgactctgcaacgcgcagtgagtctggagggggaacctcgcaaagtcgttctccataaaggtagcactggcctgggttttaacattgtgggcggcgaggatggcgaagggatttttgtgtcgtttatcctcgcagggggccctgctgacctgtcgggtgagctacaacgcggggatcaaatcctctcggtaaacggcatagatctccggggcgcgtcacatgaacaggctgcagctgcccttaagggtgctggacagacagtaaccataatcgcgcaatatcagccagaggactatgcccggttcgaagctaaaattcacgacctgcgggaacagatgatgaaccactcaatgtcttccggaagcggatcactgagaactaatcagaaaaggtccttgtacgtaagggccatgtttgactacgataagtcaaaggacagcggtcttccaagtcaaggcctctcattcaaatacggtgacatcttacacgtcatcaacgcctcagacgatgaatggtggcaggcacgacgcgtgatgctggagggcgattctgaggagatgggtgtgatcccctccaagaggagagtggaacggaaagaacgggctcgcctgaaaacggtaaaatttaacgccaagccaggagtgattgacagcaagggtgatatcccaggcctgggtgacgatggctacggtactaagacgctccgcggccaggaagacctcatcctcagctacgagcccgtaacaagacaggaaatcaactacactcgacctgtcattatcctgggacctatgaaagacagaatcaatgatgacctaattagcgagttccctgataagttcggcagttgcgtgcctcatacaacccggccgaagcgagattatgaggtggatggccgggactatcacttcgttatctcgagagaacaaatggagaaggatattcaagaacataaattcattgaagccggccaatataacgataatctttatggcacatccgtacagagtgtccgcttcgtggccgagcgtggaaagcactgcatcttagacgtctcaggtaacgcaatcaagcgccttcaagtggcccagctgtaccctattgctatctttataaagcctaggagtctcgaacccctcatggagatgaacaaaaggcttacagaggagcaggctaagaagacatatgatagagctattaagttggagcaggagttcggcgaatacttcaccgccattgttcagggcgatacactcgaagacatttacaatcaatgtaagcttgtgatcgaggagcagtcagggccgtttatttggatccccagtaaggaaaaactatag

SEQ ID NO: 185573 - DNA, 1005 bp, synthetic construct
  misc_feature 1..1005: note = Description of Artificial Sequence: Synthetic coding sequence
  source 1..1005: mol_type = other DNA
atgatgaaccacagcatgagcagcggcagcggcagcctgcggaccaaccagaagagatcactctatgtcagagccatgttcgattacgacaaatccaaagactcggggcttccctcgcaaggactcagttttaagtacggcgacatcttgcatgtgatcaatgccagcgatgacgagtggtggcaggctagaagagtaatgctagaaggggacagcgaggaaatgggggtgattccttccaagcgaagagttgaaagaaaagagcgagcacgcctaaagaccgtcaaattcaacgccaagcctggagttattgacagcaaaggtgatatccccggcctgggagacgacggctatggtaccaaaactttaaggggacaggaggacctcatcttatcctatgagccagtaactaggcaggagatcaactacactaggcccgttatcattctcggtccaatgaaagacaggattaatgacgatctcatatccgaatttcctgataagttcgggagttgcgtacctcatactacccggcctaaacgggattacgaggtggacgggagggactatcattttgtcatttcgcgcgagcagatggagaaagatatccaggagcacaaatttatcgaggcagggcagtataatgacaacttatacggcaccagtgtccaatccgtgaggtttgtagcagagcgagggaaacattgtattctggacgtgtctgggaatgctatcaaaagattgcaggtggcccagctttaccccatcgcaatttttattaagcctcgcagcctcgaacctctgatggaaatgaataagcgtctgacagaagagcaggcaaaaaagacatacgatagagccattaagttggagcaggaatttggcgaatattttacagctatcgtgcagggcgacacgctggaggacatttacaatcagtgcaaattagtaatagaggaacagtcgggcccttttatctggatcccaagcaaagaaaaactttag

SEQ ID NO: 185574 - DNA, 2601 bp, synthetic construct
  misc_feature 1..2601: note = Description of Artificial Sequence: Synthetic coding sequence
  source 1..2601: mol_type = other DNA
atgttcttcgcctgctactgcgccctgcggaccaacgtgaagaagtaccgataccaggacgaggacgccccccacgaccatagtctgcccagactgacgcacgaggttcgaggaccagaactggtccatgtgagtgagaagaatctgtcccagatcgaaaatgttcatgggtacgttcttcagtctcacatctcccccctgaaagcctcacctgcccctataattgtcaataccgatactttggatacgatcccttacgtaaatgggactgagatagagtacgaattcgaggagatcacgttggaacgggggaacagcggactcggcttcagcatcgccggggggactgacaatccccatataggagatgatccaggaatcttcattacaaagatcatccccggaggagctgcggccgaggacgggcgccttcgcgttaacgattgcatcctgagagtgaacgaagtggatgtcagcgaggttagccactctaaagcagttgaggccctcaaggaagccgggtccatcgtgcggctctatgttcgtcgaagacgccccatcctcgaaacagtagtggaaatcaagctctttaaaggccctaagggtttaggcttttccattgccggaggcgtgggcaatcagcacattcctggggacaattcgatctacgtgacgaagattattgatggaggggctgcgcaaaaggatggaagattgcaggtgggagatcgattgctgatggtaaacaactacagcctggaggaggttactcatgaagaagcagtggctatcctcaagaacacctccgaggtggtttacctcaaggtcggcaagcccaccactatctacatgactgatccctacgggccaccagatatcacacactcttattccccacccatggagaatcatctgctctccggtaataatggcactttggagtacaaaactagcctccccccgatcagccccggcagatatagcccaatacctaaacatatgctggtagatgacgattacactcgcccccccgaacccgtatattcaacggtcaacaaactgtgtgataagcccgcctccccccggcattatagcccggtagaatgtgacaaaagtttcctgctctctgctccctacagtcattatcatctggggttgcttccagactcagaaatgacaagccatagtcagcacagcaccgcaacccgccagcccagcatgaccttgcagcgcgctgtatctttggaaggtgaaccccggaaggttgtgctgcacaaaggatcaaccggtcttgggttcaacatcgtcggaggtgaagatggggaaggaatttttgtttcttttatcttagcggggggccccgctgacctgagtggtgagctgcagcgaggtgaccagattcttagtgtaaacgggattgacctgaggggcgccagtcacgagcaagccgccgccgctctgaaaggtgccggccagacagtcaccatcatcgcgcagtaccagcccgaagactatgcacggtttgaagccaaaattcacgatttgagagagcagatgatgaaccactctatgagctccggctcaggaagtctaaggacaaatcaaaaacgcagcctgtacgttcgagcgatgttcgactacgacaaatcgaaggactcgggcttgcctagccaaggactgtcttttaagtacggcgacattctgcacgtgatcaacgctagcgatgacgaatggtggcaggcgaggcgggtgatgttggaaggtgactccgaagaaatgggcgtgattccatctaagagaagggtcgagcggaaagaaagagctcggcttaagactgtgaaattcaacgctaaacccggtgttatcgattcaaagggcgacataccaggattgggagatgacgggtatggtactaagactttgaagcatgtgtcaagcaacgcttctgattctgaatcaagctatagaggacaggaagatctgattctgtcttacgagcccgttacaagacaggaaattaattacaccaggcctgtcatcattttaggtccaatgaaggaccggattaatgacgacctgatcagtgaatttcccgacaagttcggatcttgcgtgcctcacaccaccagacctaaacgggattacgaggtcgacggtagagattatcactttgtcatctctcgtgaacagatggagaaggatatccaggagcacaagtttattgaagccgggcagtacaatgacaacctctacgggactagtgttcagtctgtaagattcgtggccgagcgaggtaaacactgcatccttgatgtgagtggaaacgccatcaagcggcttcaggtggcacagctgtaccccatcgccatctttattaaacctagatcactcgagccccttatggagatgaacaagcgattgacggaagagcaggcaaagaaaacgtacgaccgtgctatcaaactggaacaggagttcggcgagtattttacagcaatcgtgcagggggacacacttgaagatatctacaatcagtgtaagctggtgatagaagagcaatccggcccgttcatctggatcccatcaaaagagaagctttag

SEQ ID NO: 185575 - DNA, 285 bp, synthetic construct
  misc_feature 1..285: note = Description of Artificial Sequence: Synthetic coding sequence
  source 1..285: mol_type = other DNA
atgatgaaccacagcatgagcagcggcagcggcagcctgcggaccaatcagaagaggtctctgtacgtccgggcaatgttcgactacgataaatctaaggattccgggctgccctcccagggactgtccttcaagtacggcgacatcctgcacgtgattaatgcctccgacgatgagtggtggcaggcccgccgagtgatgctggagggcgactcagaagaaatgggcgtaatcccctcgaagcgaagagttgagaggaaggagagggcacggctgaaaacctag

SEQ ID NO: 185576 - DNA, 2559 bp, synthetic construct
  misc_feature 1..2559: note = Description of Artificial Sequence: Synthetic coding sequence
  source 1..2559: mol_type = other DNA
atgttcttcgcctgctactgcgccctgcggaccaacgtgaagaagtaccgctaccaggatgaagatgcgccccatgaccactctctgccacgcttaactcatgaggtgaggggccctgagcttgtacacgtttccgaaaagaacctgagccagatcgaaaatgtgcatggatacgtcttgcagtcacacatttcacccctgaaagcttctccagccccgatcatcgttaacacggacaccctggacaccattccctatgtgaatggcactgaaattgaatacgagtttgaagagatcacccttgagcgcggaaattctggtcttggtttttccattgctgggggaacggataatccccatatcggcgatgaccccgggatatttatcacaaagattattccaggtggagctgccgctgaggatggacgcctgagagtcaacgattgtatcctgcgggtcaacgaggttgacgttagtgaggtgtctcattcgaaggccgtagaagctttgaaggaagcgggttcaattgtcagactctatgtaaggcgccggagaccaatacttgagaccgtagtggagatcaagctgttcaaaggccccaaaggtctgggtttttcgattgccggcggagttggcaatcagcatatacctggagataactctatttacgtcactaagattatagacgggggagccgcccagaaagacggccgcctccaggttggcgatcggctcttgatggtgaacaactatagtctcgaagaagtgacacacgaggaagccgtagccatcctcaaaaatacatcagaggtcgtttatctgaaggtgggcaaaccaacaactatctacatgactgatccttatggcccaccagacatcacgcactcctactcgccacctatggagaaccacctgttgtccggaaataatggtaccctagagtacaagactagtctcccaccgatctccccagggagatatagccccatccccaagcatatgctggtcgacgatgattacacccgcccaccagagccggtttacagcaccgtgaataaactctgcgacaagcccgcatccccacgacattactcccctgtggagtgcgacaagagtttcctgctctccgctccatactcgcattatcatttaggtctcctgccggattcggaaatgacgtctcactcacagcattccacagccacacgacagcctagcatgaccctgcagcgggccgtaagtcttgagggtgagccaagaaaggtggttttacataaaggctcaacgggactcggctttaacatcgtcggcggcgaagatggggagggaatatttgtctcctttatcttagctggagggcctgcggatctgtctggtgagctgcagcgtggggaccagatactgtctgtgaatggaattgatctccgcggggcttcccatgaacaggcggccgcagcgctcaaaggcgcagggcagacggttacaatcatcgcccaataccaacctgaggattatgcccggttcgaagcaaagatacatgatctgcgcgagcagatgatgaatcacagcatgagcagtggatctggaagtctgaggacgaatcaaaagcgctctctgtatgtgcgagccatgttcgattatgacaagtccaaggattcagggttaccttcccaaggccttagctttaagtacggagacatcctccacgttataaacgcctccgacgatgagtggtggcaagctcgcagggtcatgctggagggggatagcgaggagatgggagtcattccttccaaacgcagggtagagcggaaggaacgggcccggctgaaaacagtcaagtttaatgccaaaccaggagtcatcgatagtaaaggggatattccaggattgggcgatgacggctacggaacgaagaccttacgcggacaggaggatttgatcctgtcctacgagcccgttacccgtcaggagatcaattacacacggcctgtgataattttgggacccatgaaagaccgcatcaacgacgatttgataagtgagttccccgataagttcggcagctgcgtgccgcatacgacacgccccaagcgcgattatgaggttgacggacgcgattaccattttgtgattagcagggagcagatggaaaaagacattcaagagcacaagtttatagaggccgggcagtacaacgacaacttgtatggcacatcagtccagtctgttaggtttgtggctgagcgaggaaaacactgcatccttgatgtgtctggtaatgcgattaaaaggttgcaagtggctcagttgtaccccatcgcaatttttattaagccacggagcctggagccactgatggaaatgaacaagcgtttaactgaggaacaggcaaaaaaaacatatgacagagcaattaaactggagcaagagttcggggaatattttactgccattgtgcagggcgatacgctcgaagatatctataatcagtgtaaactggtcatagaagagcagtctgggcctttcatttggatcccgtctaaagagaaactgtag

SEQ ID NO: 185577 - DNA, 1863 bp, synthetic construct
  misc_feature 1..1863: note = Description of Artificial Sequence: Synthetic coding sequence
  source 1..1863: mol_type = other DNA
atggtgaacaactacagcctggaggaggtgacccacgaggaggccgtcgccatcctcaagaacacatcagaagtagtttacctcaaagtgggaaaacccacgactatttacatgacagatccctatggtccccccgatatcactcactcctattcacctccaatggaaaatcatctcttgtccgggaacaacgggactttggagtacaagacctccttgccccccatcagccccggacgatatagccccattcccaagcatatgttagtggatgatgactatacccggcctccggaacccgtgtattccaccgtcaacaagctatgcgacaagcccgccagtcccagacattactctcctgtggaatgcgataaatcattcctgctaagcgctccctactcccattaccatttgggactgctgcccgactccgagatgacctcccattctcaacacagcacagccacaaggcagccctctatgaccctccagagggctgtgtctctcgagggggaacccaggaaagtggtcttgcacaaaggtagcaccgggctggggtttaacattgtgggaggcgaggacggcgagggaattttcgtgtcctttatactggcaggtggccctgctgatttatctggcgagctgcaaaggggggaccagattcttagcgtcaatggaatcgatctacgcggtgcttcgcacgagcaagccgctgcggctctaaagggagcgggtcagacagtaactataattgcacaatatcaaccggaggactatgccagattcgaggccaagatccacgacctgcgggagcagatgatgaaccattctatgagttctggctctggctctttacgcacaaaccaaaagaggagcctgtacgtgcgggcaatgtttgattacgataagagcaaggactccggactcccaagccagggcctctcctttaagtatggggatattctgcacgtgatcaatgccagcgacgatgagtggtggcaggctaggcgcgtgatgctagaaggtgacagtgaggagatgggcgtgattccaagtaagcggagagtggagaggaaggaacgggctcgcttgaaaacagtgaagtttaatgccaaacccggcgtcatcgactctaagggcgacatccctggtcttggcgatgatggctacgggaccaagacactgaaacatgtttcttctaacgctagtgattctgaaagttcttaccggggccaggaggatctgatattgagctacgagcccgtaactagacaggagattaattatactcgccccgtgatcattctgggccccatgaaagatcgtatcaacgacgacctaattagcgaattccctgacaagttcggctcttgcgtgccacacacaactaggcctaagcgagactatgaggtagacggaagagactaccacttcgtcatctcacgggaacaaatggagaaagatattcaggaacataaattcatcgaggccggtcagtacaacgataacctgtacggcacttcagtacagtctgtgagattcgtggccgagagaggcaaacattgcatcctcgatgtttcaggaaacgctatcaagcggctccaggttgcccaactctacccgatcgccattttcatcaagccgcggagcctcgaacccttgatggagatgaacaaacgtctgactgaggaacaagcgaaaaagacctacgaccgagccattaagctagagcaggagttcggcgaatacttcactgctattgtgcagggcgacacgctagaggatatctataaccaatgcaagctggtgatcgaagagcagtccgggcccttcatttggattccttctaaagaaaagctctag

SEQ ID NO: 185578 - DNA, 2928 bp, synthetic construct
  misc_feature 1..2928: note = Description of Artificial Sequence: Synthetic coding sequence
  source 1..2928: mol_type = other DNA
atgggcatcttcaagagcagcctgttccaggccctgctggacatccaggagttctatgaggtgaccctactgaatagtcagaagagttgcgagcaaaaaattgaggaagctaatcaggtcctgcagaagtgggaaaagacatctctcctggctccgtgtcacgaccgcttacagaagagcagcgagctgaccgattgcagtggaagtaaggaaaacgcctcctgcatcgagcagaacaaggagaatcagtcgttcgagaatgaaacagatgagacaactactcagaaccaaggtcggtgccctgctcagaactgttccgttgaagcacctgcgtggatgcccgtgcaccactgcactaagtatagataccaggacgaagacgcaccccacgaccatagtcttccaaggctgactcacgaggtaaggggccctgagctcgtgcacgtgtccgaaaagaacctctcgcaaattgaaaatgtacatgggtacgttctccagtcacacatttctcctctgaaagcaagccccgcacctatcatagtcaataccgacacactcgatacaataccctatgtaaatgggaccgaaattgagtacgagtttgaggagattactctagagcgaggcaactccggtctcgggtttagtatcgcaggcggtacagacaatccccacattggcgatgatcccggaatcttcatcactaagatcattccagggggagcagcagcagaggacggccgtctgcgcgtcaatgactgtatcctcagggtaaacgaggtcgacgtctcagaagtgtctcacagcaaggctgtcgaggccctgaaggaagccggctcaattgtgcggctgtatgtgcgacgacgccgccctattctcgagacagtcgtagagattaagctctttaaggggcctaaaggacttggctttagcattgccggtggcgtcgggaaccagcatatcccaggggataactcaatttacgtaaccaagatcatagatgggggggctgcccagaaagacggcaggctgcaggtgggggatcgtctgctcatggtgaataactactccttggaagaggtcactcatgaagaggcggtcgcaatccttaaaaacactagcgaggtggtgtaccttaaagtggggaagcccacgaccatttacatgacggacccatacggccccccagacatcactcattcttattcacctccaatggaaaaccacctgctaagcggcaacaatggtacactggaatataaaacatccttaccaccaattagccctggcagatatagccctattccaaaacatatgctggtagacgatgactatacgaggccccccgaaccagtttactcaaccgtgaataaattatgtgacaagcctgcatctcccagacactatagtcctgtagaatgcgacaagagtttcctgctctccgctccttacagccactatcatcttggattgctgccagatagcgagatgaccagccactcccaacatagcacagctacgaggcagccgtccatgacgttacagcgagcagttagtctagagggtgaaccaagaaaggtagtgctccataaggggagcaccggtctagggttcaacattgtggggggagaagacggagaaggcattttcgtaagctttatactggcgggtggcccagctgatctatccggggagctgcagaggggcgaccagatcttgagcgtcaacggaatcgatctgcggggcgcttctcacgagcaggcagccgccgcacttaagggggccggccagactgtgaccattatcgcgcaatatcagcccgaagattatgctcgttttgaggctaagatccatgacctcagagaacagatgatgaaccactccatgtcttctgggagtggctcattgcggacgaaccaaaaacgcagcttatatgttagggccatgttcgattacgataagtccaaggatagcggtctcccaagccagggcctgtcttttaagtacggagatattttacacgtgatcaacgctagtgatgatgagtggtggcaggctcgcagggtgatgcttgaaggggattctgaggagatgggcgtgattccttcgaagaggagggtcgaacgcaaggaacgcgcacggctgaagaccgtgaagtttaacgcaaagcccggcgtaatcgatagtaagggcagctttaatgataaacgcaaaaaaagtttcattttcagtcgaaaattccccttttacaaaaacaaggaacaatctgagcaggaaactagtgatcctgagaggggccaagaggacctaatcttgagctatgagccagttactagacaagaaataaactatacacggcctgttatcattttaggacccatgaaagaccgtatcaacgacgatctgatctccgagttccctgacaagttcggtagctgtgttccgcacacaacacgcccaaagcgcgactacgaggtggacggacgggactaccacttcgtgatctcccgcgaacagatggaaaaggatattcaagaacacaagtttattgaggccgggcagtacaatgataatctatacggaacaagtgtgcaatcagtaaggttcgttgccgagcgagggaagcattgcattttagatgtctctgggaacgcaatcaaacggctccaggtggcgcagctgtatcccatcgccatttttataaagccacgaagcctggagccgttgatggagatgaataagaggctcactgaggagcaggctaagaagacctatgaccgggcaatcaagttggaacaggagttcggcgagtacttcacagccatcgtgcaaggcgacaccctggaggacatctataaccagtgtaagctagtgatcgaggaacaatctggtccattcatatggataccaagtaaggaaaaactgtag

SEQ ID NO: 185579 - DNA, 2928 bp, synthetic construct
  misc_feature 1..2928: note = Description of Artificial Sequence: Synthetic coding sequence
  source 1..2928: mol_type = other DNA
ttcggcttcatcgtgagcgtgcacttccagagctacctgaacatccaggagttttacgaagtcacactgctgaacagccagaaatcctgtgaacagaagatcgaagaagcgaaccaggttctgcaaaagtgggagaaaacatccttactggccccatgccacgatcgcctccaaaagtcatccgagctgactgattgctccggttccaaagagaatgctagttgcatagaacagaacaaagaaaaccagagctttgaaaatgagaccgatgagacgacgacccagaaccaggggcgctgcccggcacaaaactgttctgtcgaagctcctgcctggatgcctgtgcatcattgcaccaagtatcgctaccaggacgaagatgcgccgcatgaccactcattgccacggttaactcacgaggtcagagggccggaactggttcacgtaagcgaaaagaatctatcacaaatcgagaacgtgcatgggtatgtgctccagagccatatatccccattgaaggctagccccgcacctatcatcgttaacacagacacacttgatactattccttatgtaaatggcacagagattgagtacgagttcgaagagatcactctcgaaaggggcaactcaggtttaggctttagcatagcaggaggaactgataatcctcacatcggggacgatcctgggatattcattacaaaaatcattccaggcggcgctgcagccgaagacggtaggcttcgggtcaacgattgcatactgcgagttaatgaggtggacgttagcgaagtgtcccacagcaaagccgtcgaagctctcaaggaagctggtagcattgtcaggttatacgtccggaggcggcgtccgatcctggagaccgtggttgagatcaagctgtttaagggcccaaaaggattaggatttagcatcgccggtggtgtgggcaaccagcacattcccggggacaactccatttacgttaccaagattattgacggaggagctgctcagaaggatggaaggctccaggtgggcgaccggctgctgatggttaataactatagcctcgaggaagtgacccacgaggaggctgtggccatcttaaagaataccagtgaggtggtgtatctaaaggtcggaaaacctaccactatctacatgacagacccatacgggcctccagatatcactcactcgtactctccccctatggaaaatcaccttttgagtggcaacaatggtacgcttgaatacaagacatctctgcccccgatatctcccggtcgctactcccctataccaaaacacatgctggttgacgatgactataccagaccaccagagccagtatattccaccgtgaacaagctgtgtgataagcctgcttcaccccgtcactactcccctgtggaatgcgacaaatcctttctgttgagtgcaccctacagccattaccatctcggtttgctgccagattccgagatgacatctcattctcaacacagcaccgctacccgtcaaccttctatgacactgcagagggctgtttctctcgaaggcgagccgagaaaggtggttttacacaaggggagcaccggactgggtttcaacatcgtaggcggcgaagatggggaaggaatcttcgtgtcgttcatcctggcgggaggacccgccgacctcagcggagagttgcagcggggggatcagattctttcagtgaatggaatagatctccgtggtgccagccacgaacaggccgcagctgctctaaagggcgcagggcagaccgtgaccatcatcgctcagtaccagccagaggactatgctagatttgaagcaaagattcacgacctgcgggagcagatgatgaatcattccatgtcaagcgggtctggaagtctccgcaccaatcagaagcggtcgctgtacgttcgggccatgtttgattacgacaaaagcaaagattccggcttaccatcacaggggcttagtttcaaatatggggatattctgcacgtcattaacgcctctgatgatgaatggtggcaggctaggcgtgttatgttggaaggagattccgaggagatgggtgtcataccatccaagcgccgtgtggaacggaaggagagggctaggttgaaaacagtgaagtttaacgccaagcccggcgtcattgacagcaaaggcagctttaacgataagagaaagaaaagctttatcttttcaaggaagtttcctttttataagaataaagagcagtctgaacaagagaccagtgatcctgaacgtggccaggaagaccttatattgtcgtatgaacccgtgacgcgtcaggaaattaattatactcggccagtgattattctcggacctatgaaggaccggatcaatgatgatttaatcagtgaatttcccgacaaatttggcagctgcgttccccatacaactcggccaaagcgtgactatgaagtggacgggcgagactaccacttcgtcattagccgagagcaaatggaaaaggatatccaggagcacaagttcattgaagccggccagtataatgacaacctgtacgggactagcgtgcagtctgttcggttcgtggccgagcgcggcaaacattgtattctcgacgtctccgggaacgccattaaaagactacaagtggctcagctgtacccaatcgcaattttcatcaagccacggtccctcgagcccttgatggagatgaacaaacgcctgacggaggagcaggccaagaagacatacgatcgcgccatcaaactcgagcaggagttcggtgagtactttacagctatcgtccagggggacactttggaggatatttacaatcagtgtaaactggttattgaggagcaaagcgggcctttcatctggatccccagtaaagagaagctgtag

SEQ ID NO: 185580 - DNA, 2550 bp, synthetic construct
  misc_feature 1..2550: note = Description of Artificial Sequence: Synthetic coding sequence
  source 1..2550: mol_type = other DNA
atgcacaagcaccagcactgctgcaagtgccccgagtgctacgaggtcacgaggctggcagccctgagacgtctggagccgcctggatatggcgattggcaggtgcctgacccttacgggcctggaggcggcaatggcgcttccgccggctatggtggctactccagtcaaaccctcccgagccaggcaggcgccacacccaccccccggaccaaggctaaactcatccccaccggtcgcgacgtcggcccggtccctccaaagccagtgcccggcaaaagcacgcctaaactcaacggaagtggaccgtcctggtggcctgaatgcacgtgcacaaatagggattggtacgaacaggctagaccagctccgttgctggtcaaccctgagactctaaaacattcacttagcgtgaatggttcggacggcatgtttaagtatgaagagatcgttctcgaacggggaaacagcggacttggattctcgatcgctggtggcatagacaatccacatgttcctgacgatcccggaattttcataacaaaaattatccctggcggtgctgccgcgatggatggaagacttggagtcaacgactgtgttctgcgtgttaacgaggttgacgtgtccgaagtcgtccactcccgcgcggtagaggcgcttaaggaggccggtcctgttgtaaggttggtggtgagacgaaggcagcccccgcctgagaccatcatggaggtcaacctcttgaaaggcccaaagggccttggcttctcaatagctggcggtatagggaaccagcacatccctggggacaacagtatttacatcacaaagataatagaagggggagcggcccagaaggacggccgactgcagataggcgaccggctgctagcagttaataacaccaacctccaagacgtgagacatgaggaggcagtcgcatccttaaagaatacttccgatatggtttatctaaaggttgccaagcccggctcgttgcatcttaatgacatgtatgcaccaccggattatgcgtctacgttcaccgcattggccgacaatcacatctcccacaactctagcttaggctacctcggcgctgtggagtcaaaagtcagctatccagcaccgcctcaggtgcctcctacccgatacagcccaattccacgccacatgttagcagaggaggacttcaccagagagccccggaaaatcattctacacaaaggtagtaccggcctaggcttcaatatcgtaggcggtgaagatggtgagggtatcttcgtctctttcattttggccggcggccccgccgacctgagcggcgagctgcgtcgcggtgaccgtattctgtccgttaatggtgtgaatttgcggaacgccacccatgaacaggccgctgccgctttgaaaagagcaggacagtctgtcacaatcgtggctcagtaccgccccgaggaatactcaaggttcgagtcgaagattcacgacctgcgcgagcaaatgatgaactccagcatgagttccgggtccggctcacttagaacaagcgaaaagcggagtttatacgttcgtgcacttttcgattacgacaggacccgcgattcttgtctgccgtctcaggggctgtcattttcctatggggacatactccatgtgataaatgcctctgatgatgaatggtggcaggcccgactggtgaccccacatggtgaaagtgagcagattggcgtgattcctagcaagaagcgagtagagaagaaagagagagcgcgcttaaagactgtcaaatttcacgccagaaccggaatgatcgagtccaatcgggacttccccggcctctccgacgactactacggtgcaaagaaccttaagggagtgacttctaacacctctgatagcgagtctagttctaagggtcaggaagacgcaatcctctcctacgaacccgtaactagacaggagatccactacgccagaccagtcatcatcctcggacctatgaaagatagggtcaacgatgatttgatcagtgagttcccacacaagtttgggtcttgcgtccctcacacaacacggccaaggagggataacgaagtggatgggcaggattatcattttgttgtatccagagagcagatggagaaggacattcaagacaataaatttattgaggcagggcaatttaacgataacctatacggcacatcaatccagtctgtacgagcggtcgccgagcggggaaaacactgcattctggacgtgtctgggaatgctattaaaaggcttcagcaggctcagctgtaccccattgctatctttataaagcctaagtccattgaagcccttatggagatgaatcgtcgccaaacctacgagcaagctaacaaaatttatgataaagcaatgaaactagaacaagagttcggggagtacttcactgccatagtgcagggagattccctggaagaaatttataacaaaattaagcagatcatagaggaccagtccggccactatatatgggtaccatcccctgagaagttatag

SEQ ID NO: 185581 - DNA, 2454 bp, synthetic construct
  misc_feature 1..2454: note = Description of Artificial Sequence: Synthetic coding sequence
  source 1..2454: mol_type = other DNA
atgcacaagcaccagcactgctgcaagtgccccgagtgctacgaggtgacgagactggctgcactcaggcggctggagccacccggttacggggattggcaggtgcctgatccctatggaccaggcggtggtaatggcgcgtctgctggttacggaggttactcatcacagaccctcccatcacaagctggagcaacccccacgccgaggacaaaggccaagctgatacccactggccgggatgtcggccccgtccctccaaagccagtccccggaaagtctacccctaaactgaacgggagcggacccagctggtggcccgaatgcacgtgtacaaatagggactggtacgaacaagtgaacggatctgacggcatgttcaagtatgaagagattgtgctcgaaagaggcaactctgggctcggatttagtatcgcaggaggtatcgacaacccgcacgtgccagatgatcccggtatcttcataacaaagataattccaggcggggctgcagcaatggatggacggctcggcgtgaatgactgcgtactgcgagtgaacgaagtcgacgtgagtgaagtggtgcactctcgcgccgtggaagccctgaaagaagccgggcccgtggtgagactcgtcgttcgacgaaggcaaccgcctccggagaccatcatggaggttaatcttctcaaaggtccaaaaggattaggtttctctatagctggtggcatcggcaatcaacatattccgggtgataattctatctatatcactaaaatcatcgagggaggcgctgctcagaaagacggtaggctgcaaataggtgatcgcttactcgccgtgaataatacaaatctgcaggacgtgcgtcacgaagaagcagtggcgagcctgaaaaacacctccgacatggtttacttgaaggtggccaaacctgggtctttgcacttaaacgatatgtacgcccccccagactatgcttcaacattcactgcccttgccgacaatcatataagccacaattccagtcttggatacctgggggcagtcgaatcaaaggtgagttaccctgccccgccacaggtgccacccacacggtatagcccaatccctcggcatatgcttgccgaggaggatttcacaagagagcctcgcaagataattttacacaaaggctccaccggactgggcttcaacatcgtaggtggagaagacggagaaggcatttttgtgagtttcatactagctgggggtcctgccgacctgtccggtgagctccgaagaggagatcgaattctctctgtgaatggtgtgaatttgcgaaacgcgacccacgagcaggccgccgccgcactgaaacgagctggccaatccgtgacgattgtagcccaatatcgtcccgaagaatactccagatttgagtcaaaaattcatgatcttagagagcaaatgatgaatagctccatgtcatcgggctcagggtccctccgcacatccgagaagagatccctctacgtgagggcactgtttgactacgataggactagggattcctgtctgccctcccaggggctgagctttagttatggggacatcctgcatgtcatcaacgccagtgatgatgagtggtggcaggcccggctggtaaccccacatggtgaatctgaacagattggcgtgattccatccaagaagagggtagagaagaaggagcgagctaggctgaagacagtgaaattccacgccaggactggcatgatagagtccaaccgagactttcccgggttatccgacgattattatggagccaaaaacctgaaaggacaggaggatgccattctgtcctatgaacctgtgactcggcaggaaatccattacgctaggcctgtaatcatcttgggccccatgaaggacagagtgaacgatgacctgatctcagagttcccacacaagtttggctcttgtgtgccccataccacaaggccccggagagacaacgaagtggacgggcaggactaccattttgtggtcagcagagagcagatggagaaagatatccaagataataagtttatcgaggcgggccagtttaatgataatttgtacgggacatctattcagagcgtcagagcagtcgcagagcgaggtaaacattgcattctggacgtgagcggcaatgcgatcaaacgattgcagcaggcacagttgtacccaattgccatctttatcaagccgaagtccatcgaggctctgatggaaatgaacagaagacagacttatgagcaggcgaataaaatttatgacaaggccatgaaactggagcaggagttcggggaatatttcacagcaattgtgcagggggatagtctcgaggaaatttataataagattaaacagattatagaagaccagtcaggccactatatatgggttccatcccctgagaagttgtag

SEQ ID NO: 185582 - DNA, 1101 bp, synthetic construct
  misc_feature 1..1101: note = Description of Artificial Sequence: Synthetic coding sequence
  source 1..1101: mol_type = other DNA
atgatgaacagcagcatgagcagcggcagcggcagcctgcggacctcggagaagagatccctgtatgtgagggccttgtttgattacgataggacaagggattcctgtctgcccagccagggactatccttcagctatggagacatcttacatgtgatcaacgcttctgacgacgagtggtggcaggcccggttggtgacccctcacggcgagagcgaacagatcggggtgatcccatctaagaaaagagtggaaaagaaggagcgcgcccggctgaagactgtgaagtttcacgcgagaaccggaatgattgagagtaaccgcagcatcaagaccaagagaaagaaatcttttaggctatctagaaagtttccattttataaatcaaaggaaaacatggcgcaggaatcttctatccaggaacagggtgtgacatcaaataccagcgattccgaatcgagttcaaaaggccaggaagatgctattctgtcttacgagcccgtgacaagacaggagatccactacgcaagaccggtgattattctgggcccgatgaaagacagggtcaacgatgatctgatctctgaattccctcataagtttgggagctgtgtaccacacacaacaaggcctaggagagacaacgaagtggatggacaggattatcactttgtagtcagccgtgagcagatggaaaaagacattcaagacaacaaattcatcgaagccggtcagtttaacgataacctgtacggtacatccatccaatctgtcagagccgtggcggagaggggaaaacattgtattctggatgtttccgggaacgccattaaaaggctgcagcaggcccagttgtatcccatcgcaatcttcattaaacccaaatctatcgaggcactaatggaaatgaatagacgacaaacatacgagcaggctaataaaatctatgataaggcaatgaaactggaacaggaattcggcgaatactttactgccatcgttcagggcgattcgctggaggaaatttacaacaaaattaagcagatcatcgaggaccagagcggccactacatctgggtcccatctcctgaaaaactttag

SEQ ID NO: 185583 - DNA, 2304 bp, synthetic construct
  misc_feature 1..2304: note = Description of Artificial Sequence: Synthetic coding sequence
  source 1..2304: mol_type = other DNA
atgagccagcggccccgggccccccggagcgccctgtggctgctggcacctccactcctcagatgggcgcccccactgctgacggtccttcactccgacctctttcaagctctgctcgacattttggactactacgaagcgagccttagtgagagccagaaataccgctaccaggatgaggacacccccccactggaacatagtccggcacatctgccaaatcaggcaaactccccccccgttatcgtgaatacagacactctcgaagcgcctggctatgagctccaagtaaatgggaccgagggggaaatggaatatgaggagatcacattggaacgtggcaatagcggccttggctttagcatcgctggggggacagataaccctcacattggagacgacccaagtattttcatcactaagattattcccggaggcgctgcggctcaggatggaaggttgagagtgaatgatagcatcctgttcgtgaacgaagtcgatgtccgcgaggttacacactctgcagctgtggaggcactgaaggaggccgggtccattgtccggttgtatgttatgaggcggaagcctccggccgaaaaagttatggagattaagctcattaaggggccaaagggcttggggtttagtatcgccggtggcgtgggtaatcagcacattcctggcgacaatagtatctacgtgaccaaaatcatcgaaggaggggccgcccataaagacgggcgcttgcagatcggggacaagatactagctgtgaatagtgtgggcctagaggatgtaatgcatgaagatgccgtggccgccttgaaaaatacctatgatgtggtctatcttaaggtggcaaaaccatctaatgcgtatctgagcgatagctacgcccccccagatatcactacaagttattctcagcatctggataatgagataagccacagttcttacttaggtacagactacccaactgccatgactcctacaagccctcgaaggtatagccccgtagctaaggaccttctgggggaggaggatataccacgcgaacctcggagaattgtcatacataggggctctaccggcctcgggttcaacatcgtggggggtgaggatggggagggcatatttatcagttttatcctggcaggggggcctgctgatctgtcaggagaactacggaagggagatcagatcttgagtgttaacggagtggaccttaggaacgcctctcacgagcaagcagctatcgcactgaaaaatgccggtcagactgttacaatcatcgcacagtataaaccagaggaatatagtagattcgaggctaaaatccacgacttgagagaacagctcatgaacagttcactcggctcaggtacagcctccctgaggtcgaacccaaagcgaggattttatattcgtgcactgttcgactatgacaagacaaaggactgcgggttcttgtctcaggccttgagctttcgtttcggcgatgtgcttcacgtgatcgacgcatcggacgaggagtggtggcaggcacggcgggtccactccgattcagagactgacgacattgggtttatcccaagcaagagaagagtcgaaaggcgcgagtggtctaggctgaaggccaaagactgggggtcctctagcggcagccaaggtagggaagattctgtgctgagctatgagaccgtgacccagatggaagtgcattacgctcgccctataatcattcttggcccgacaaaggatcgcgcaaatgatgaccttctctcggaatttccagataagttcgggtcctgtgtgccccataccaccagacctaagcgggaatatgagatagacggcagggattatcatttcgtcagtagcagagagaagatggagaaagatatccaggctcacaagttcatcgaagctggccagtacaatagccatctgtatggcacaagcgtgcagtcagtccgtgaggtggccgagcagggaaagcattgcatcttggacgtgagtgcaaatgcagtccgcaggctccaggctgcacacctgcatcctattgctattttcatcagaccacggtcccttgaaaatgtgcttgagatcaataagcgcattaccgaagagcaggcccgcaaagccttcgatcgggctaccaaattggaacaggaatttacagaatgttttagcgccatagtggaaggggactcctttgaggaaatttaccacaaggtgaaacgcgtcatagaagatctgtctggaccttatatttgggtgcctgctagggaacggctgtag

SEQ ID NO: 185584 - DNA, 2166 bp, synthetic construct
  misc_feature 1..2166: note = Description of Artificial Sequence: Synthetic coding sequence
  source 1..2166: mol_type = other DNA
atggactgcctgtgcatcgtgaccaccaagaagtaccggtaccaggacgaggacacaccacctctggagcacagccccgcccaccttcccaaccaagcgaacagccccccggtcattgtgaacacagatactctcgaggcccctgggtatgtgaatggcactgagggggagatggaatacgaggagataacacttgaaaggggtaactctggacttggcttttccattgccggtgggactgacaatccccacatcggggacgatccatccatctttatcactaaaattattccaggcggcgccgccgcccaggatggacggctgagagtcaatgactctattctgttcgtgaatgaagtggatgttagggaggtgactcactctgctgccgttgaagctctaaaggaagcgggctctattgtgcgcctgtacgttatgagaaggaagcctcccgcggaaaaagtgatggagatcaagctgattaagggacctaaggggctcggttttagtatcgccgggggggtggggaatcagcacatcccaggagacaacagtatctacgtgacaaaaattatagagggcggcgccgctcacaaagacgggcggttacaaattggtgataaaattttagcagttaactctgtggggcttgaggatgtcatgcacgaagatgccgtagccgccttgaaaaatacctatgacgtggtctacttgaaggtggccaagccttccaacgcatacctgagtgacagttacgctcctcctgacatcaccacatcatattctcaacacctggacaacgagatatcccattcctcttacctgggcaccgattaccctaccgcaatgaccccaacctctccgcggcgctatagtccagtcgcgaaggaccttctcggcgaggaggacattccccgtgagcctcgacggattgtaatccaccgcggttccactggcttgggtttcaacatagttggcggggaggacggcgaagggatctttatctctttcattcttgccggaggccctgccgatctaagtggggaactgcggaagggagatcagatcctgagtgtaaatggagtggatctccggaatgcctctcacgagcaggctgctatagccctcaagaacgccggacagacagtcacaattatcgcacaatataaacccgaggaatactcccgcttcgaagccaaaatccatgatctgagagagcaactgatgaattcctcgctgggctctggtacagcaagcctgcggagtaaccctaaacgcgggttttacattcgagcactcttcgactatgacaaaaccaaggattgcggctttctgagccaggcactgtcattccggttcggagacgtcctccacgtaatagatgcgagtgacgaggagtggtggcaggctcggcgggtgcactccgatagtgagaccgatgacatcggattcattcccagtaagcgcagggtcgaaaggcgagaatggtctagactgaaggctaaggactggggtagtagttcaggaagccaggggcgggaggactccgtcctgagctacgagaccgttactcagatggaggtccattatgctcgtcctatcatcattctaggacctacgaaagaccgtgccaatgacgacttattatcagagttccccgataaatttggctcctgtgtcccacatacaactcgccctaaaagggaatacgagatagatggccgggactatcactttgtgtcttccagggagaagatggagaaggacatccaagcacacaagttcattgaagcggggcagtacaattcccacttatacgggacaagcgtgcaatctgttcgagaggttgccgaacagggcaaacactgtattctcgacgtctccgctaatgcggtgaggcgcctccaggctgctcatctgcaccctatagcaatctttatcaggccacgctccctggagaatgtgctggagataaataagagaatcaccgaagagcaggcccggaaggccttcgacagagccaccaaattggaacaggagtttaccgagtgcttttcggctatcgtagagggcgattcgttcgaggaaatctaccataaggtcaagagagtgatagaagacctgagcggcccatacatttgggtcccggcccgagagcgcctgtag

SEQ ID NO: 185585 - DNA, 1995 bp, synthetic construct
  misc_feature 1..1995: note = Description of Artificial Sequence: Synthetic coding sequence
  source 1..1995: mol_type = other DNA
atggagtacgaggagatcaccctggagcggggcaacagcggcctgggtttctctattgccggcggtacggataaccctcacatcggcgacgatccatctatatttattaccaagattataccaggcggagcagccgcccaggatggtaggctgagagtaaacgactctatcctcttcgtaaatgaggtggatgtgcgagaggtaacacatagcgcagccgtggaggcactcaaagaggccgggtcaatagtgcgcctgtatgtgatgagacggaaaccccccgcagagaaggttatggagattaaattaatcaaggggcctaagggacttggcttctcaatcgctggcggagtcggcaaccagcacatacccggagataattccatatacgtcactaaaattatcgagggaggcgcggcacataaggatgggagattacaaatcggcgataagatcctggccgttaatagcgttggtctagaggacgtcatgcatgaagatgctgtagccgctcttaagaatacttacgacgtcgtatatttgaaggtggccaaaccaagcaatgcgtacttaagcgacagttatgctccacctgatattaccactagttactcacagcatctggacaacgagataagtcatagcagttatttgggcaccgattatcctacagcaatgactccaacctccccccgtagatacagccctgtggccaaagatttactgggtgaggaggacattcccagagaaccgcgccggatcgtaattcacagaggaagcaccggacttggctttaacatcgtcgggggggaagatggcgaaggaatctttatttctttcatcctcgccggaggacctgcggacctctccggggaactgcgtaaaggggatcagattctatctgttaacggagtggaccttcggaatgcctctcatgaacaggcggccatagcgctgaagaacgccgggcagacagtcaccatcattgcccagtataagccggaggaatatagtcggttcgaggctaaaatacacgacctgcgtgaacaactgatgaattcctccctggggtccggaactgcctcattacgaagcaatcccaaacgcggcttctacataagagccctctttgactatgataagaccaaagactgcggattcctgagccaagctcttagctttcgattcggagatgttctccatgtcatcgacgcctcagatgaggaatggtggcaagcccgaagggtacactccgattcggaaaccgacgacatcggtttcatcccaagcaagagaagggtggaaagacgcgagtggtctcggctcaaagccaaagactggggatctagctcagggtcgcagggcagggaggacagcgtattgtcctatgaaacagttactcagatggaggtgcattatgccaggccaattatcatacttggcccaacgaaggacagagcaaacgacgatctgctgtcggagttcccagacaagttcggatcatgtgtgccacatacgacacgtccaaagcgggagtatgagattgacggaagggattatcatttcgtgtcctctagggagaagatggaaaaggacatccaggcgcacaagttcattgaggccggtcagtacaattcacacctctacggaacttcagtgcagtccgtacgggaggttgctgaacaaggcaagcattgtattcttgatgtatctgccaatgccgtccggcgtctgcaggctgctcacctgcatccaatcgcaatctttataagaccccgaagcttagagaacgttctggagatcaacaagcgaatcacagaagagcaggcgcgcaaagccttcgatcgtgccaccaagctggagcaggaattcacagagtgttttagcgccatagttgaaggcgattcctttgaagaaatctatcacaaagtgaagcgggtgatcgaggatctgtctggaccgtatatatgggtcccagcaagagaacggctgtag

SEQ ID NO: 185586 - DNA, 2175 bp, synthetic construct
  misc_feature 1..2175: note = Description of Artificial Sequence: Synthetic coding sequence
  source 1..2175: mol_type = other DNA
atggactgcctgtgcatcgtgaccaccaagaagtaccggtaccaggacgaagacacgccaccattggagcacagcccagcgcaccttcctaatcaggctaatagcccccccgtgattgtaaatacagatacactagaggcccccgggtacgtgctccaggtgaacgggaccgagggtgagatggagtacgaggaaataacccttgagaggggcaactctggacttggattttcaattgctggcggtaccgataatcctcacatcggagatgatccttctatctttatcacgaaaattattccaggaggagcagccgcgcaggatggcaggctccgcgtgaacgactccattctcttcgttaacgaggttgacgtccgggaggtcactcactccgcagccgtcgaggctctcaaagaagctggcagtatcgttcggctgtatgtcatgaggcgtaagccaccagctgaaaaggtgatggagattaagttgataaagggtcccaaaggactcgggtttagcatcgcaggcggagtgggtaatcagcatatacctggggacaactctatatatgtgaccaaaatcatagagggcggggccgcccataaggacggtaggcttcaaattggagacaagatcctcgccgttaactccgtgggtctggaagacgtgatgcatgaagacgccgtcgccgcactcaagaatacttatgatgtagtgtatttgaaggtcgcaaagcctagcaacgcctatctgtctgactcttacgctccccctgacatcactactagctattcccagcatctcgacaatgagatttctcacagtagctacttagggacagactaccccacagcaatgacaccaacttccccccgtcgttattcccctgtcgctaaggatttattgggggaagaggatattcccagagagccaaggcgaatagtgatccatcgcggaagcacgggactgggttttaatatcgtggggggcgaggacggcgaaggtatttttatttcctttatactggctggtggaccagctgaccttagtggcgaactgaggaaaggggatcagatcctgtcagtgaacggtgtagacctacgcaacgcctcccacgaacaggcggcgatcgcacttaagaacgctggccagaccgttacgataatcgcacagtataagccagaggagtactcccggtttgaagcaaaaatccatgacttaagggagcagctgatgaactcctctctcggtagcggcaccgcgtctctgcgctcaaatccgaaaaggggcttctatattcgggcccttttcgattacgataagaccaaggactgcgggttcctctctcaggcactcagctttcgcttcggcgatgtgctgcatgttatcgatgcttcagacgaggaatggtggcaggcccggagagtgcatagcgatagcgaaacagacgacatagggttcatccctagtaaacggagggttgagcggcgtgagtggagcagattgaaagctaaggactggggatcctcaagtggttcccagggccgggaggactctgtactgtcttatgagacagttacccagatggaagtacactatgcgcggccaattatcatcctcggccccaccaaggatcgggcaaacgacgaccttctctccgagtttccagacaaattcggctcttgcgttccacatactactcgtcccaaacgggaatacgaaatagatggccgggactaccatttcgtgtcttccagagaaaaaatggagaaagatatccaggctcacaagttcattgaagctggacagtacaactctcatttgtacgggacttctgtccagtcagtcagggaggtggccgaacagggaaagcactgtatccttgatgtatccgccaatgccgtgcgacgcctgcaggccgctcacctgcatccaatcgccatattcatcagaccccgtagtctcgagaacgtgcttgagattaacaagcggattacagaagaacaggctcgcaaggccttcgaccgtgctacgaaactggagcaggagtttacagaatgcttcagtgccatcgtcgaaggagattccttcgaagagatataccacaaagtcaaacgagtcattgaggacctaagcggtccgtacatctgggtgcctgcccgcgaaaggctgtag

SEQ ID NO: 185587 - DNA, 2304 bp, synthetic construct
  misc_feature 1..2304: note = Description of Artificial Sequence: Synthetic coding sequence
  source 1..2304: mol_type = other DNA
atgagccagcggccccgggccccccggagcgccctgtggctgctggccccacctttactccggtgggcacccccattgctaaccgtgcttcactccgatctgttccaagccttgctggatatcctggactactacgaggcttcgctgagcgaaagccagaaataccgttaccaggacgaagatacccccccgctggagcatagcccagcccacctgccgaaccaagctaatagcccaccggtgattgtgaacactgacaccttggaagcgcccggatacgtgttgcaggtgaacgggactgagggagaaatggaatacgaggagatcactctcgagcgcggcaattcgggactcggtttctcaatcgccggtgggaccgataacccacatattggtgatgacccatctatctttattacaaaaatcatcccaggaggcgcagctgcacaggatgggcgcctgagggtgaatgactccatcctgttcgtaaatgaagtggacgtgcgcgaggtaacacactccgctgccgtggaggctctcaaggaagctggatccatcgtcagactgtatgtgatgcggcgtaagcccccggccgaaaaggttatggagattaagttgatcaagggccccaaggggctcgggttcagtatagctgggggagtgggaaatcagcatattcccggcgacaactctatatacgtgaccaagattattgaaggcggcgccgcacataaggatggcaggctccagattggcgacaagattctggcagtgaactctgtcggtttggaggacgtcatgcacgaggatgcagtggctgccttgaaaaacacctacgacgtcgtctatttaaaagtggctaaacccagtaatgcctacctgtctgatagctatgcccctcctgacataaccacatcttattctcagcacctagacaacgagatctcacattccagttacctgggaacagactaccctactgcgatgacccctacgagtcctcggcgttactcacctgtcgctaaagacctcctgggagaggaggatatccctagagagccgcggcgcatcgtgattcatagagggagtactggtctgggattcaatatagttggtggggaggacggggagggcattttcatttcattcattctggctgggggccccgccgacttgagtggcgaattacggaaaggtgaccagattttgagcgtaaacggagtggatctgcgaaacgcttcacatgaacaggccgcaattgctctgaagaacgcaggtcaaactgtgacgattatagcacaatataagccggaggagtattcccgctttgaggccaagattcacgatctgcgggagcagcttatgaattcatccctcggctccggaacggcaagcctcaggagcaaccccaagcgcggattctatatacgggctctgtttgactacgacaaaacaaaggactgtgggttccttagccaagcactcagttttcggtttggtgacgtgctgcacgttatcgatgcatcagacgaagagtggtggcaggcaaggcgggtgcacagcgatagcgagacggacgacatcggcttcatcccgtctaagcggcgcgttgagagacgcgagtggtctaggctcaaggctaaggattggggatcatccagtgggagtcagggacgcgaggattctgtgctctcttacgagacagtgacccagatggaggtgcattacgcgaggccaatcattattctgggtcccaccaaagatagggctaacgatgatctgctgagcgagttcccagacaagtttggaagttgcgtcccccacaccacccgtcctaagcgcgaatacgaaattgatggtagggattaccatttcgtcagctcaagagaaaagatggaaaaagatatacaagctcataaattcatcgaagctggtcagtataattcccatctgtacggaacaagtgttcagagcgtgagagaggtcgctgagcagggcaaacactgcatcttggacgtatcggccaacgctgtccgtcgcttgcaggctgcccatctgcacccaatcgccatctttatccgacctaggtcgttggagaatgtgctggaaattaacaaaaggatcactgaggagcaagcacgaaaagcttttgaccgcgctactaaattggagcaggagtttaccgagtgtttttctgcaatcgtcgagggggattcattcgaggagatctaccataaggtgaagagggttatcgaggacctttcgggaccctacatctgggttccagctagagaaaggctttag

SEQ ID NO: 185588 - DNA, 2004 bp, synthetic construct
  misc_feature 1..2004: note = Description of Artificial Sequence: Synthetic coding sequence
  source 1..2004: mol_type = other DNA
atgagccagcggccccgggccccccggagcgccctgtggctgctggctcctccgctgctgaggtgggcacctccactcctgacggtgctgcactcagacctctttcaagcgttgctggacattttggattactacgaagcaagtctgtcagaatctcagaagtaccgttatcaggatgaggacacccctcccctggaacactcccccgcccatttgcccaaccaggctaattccccaccagtgatcgttaacaccgatactttagaggccccaggatatgagcttcaagtaaacggaacagaaggtgagatggagtatgaagaaattacccttgagcgtggaaactccggactcggcttttctattgccgggggcacggacaatccccatatcggggacgacccatcaattttcattacaaagataattccagggggcgctgcagcacaggacggtcgactgcgggtgaacgactccatcctctttgtgaacgaggtggacgtgagggaagtgacccattccgccgcggtcgaggccctgaaagaagccggctcaatagtccgtctgtacgtcatgcgccggaagcctcctgccgagaaggtcatggaaatcaagcttattaagggccctaagggcttgggattttccatcgccggcggggtggggaatcagcacatccctggtgacaactccatatatgtgacaaaaattattgagggcggtgctgctcataaggatggaaggttacagattggagacaaaatcctggctgtgaactctgtggggttggaggatgtgatgcatgaggacgccgtggccgccttgaaaaacacctacgatgtcgtctacttgaaggtagcgaagccttcgaacgcgtaccttagtgattcctacgcacccccggatatcacgacctcttactcacagcacttagacaatgaaatcagccactcctcctacctgggcactgattacccaacagccatgactcccacatcccctaggaggtactcgcccgtggctaaggaccttctgggggaagaggatataccgcgcgaacctcgacgaattgtaattcaccgcggctcgaccggccttggctttaatatcgtgggcggcgaggatggggaaggtatcttcatcagctttattctggctggtggtcccgccgacctctccggggaattacgcaagggggaccaaattctaagcgtgaatggagtggatctgagaaacgcctctcacgaacaggctgcgattgccctgaagaatgctgggcagaccgttactatcatcgcacagtacaaacctgaggagtactccaggttcgaagccaagatccacgacctccgcgagcagttgatgaactctagcctcggtagtggaaccgccagccttcgtagtaacccgaaaaggggcttctatatcagggctctcttcgactacgataagacaaaagactgtggatttctctcccaggcactgtcttttcgtttcggcgacgtgttgcatgtgattgacgcgagcgatgaagagtggtggcaggctaggagggtccactcggatagtgaaaccgatgacatcggctttatacctagtaaaagacgcgttgaacgaagagagtggtctaggctgaaggctaaagattggggttcaagttctggcagccagggtagggaagatagcgtcctgagctacgaaacagtgacacaaatggaagtgcactatgcacgcccaataatcattctcggcccaacaaaggacagggctaatgacgatctgctgagcgaatttcctgataaattcgggtcctgtgtgcctcatacaactcggcctaagagggagtatgagattgatgggcgtgactatcactttgtttcaagtcgcgagaagatggaaaaagatatccaggctcataagtttatagaggccgggcagtacaatagtcacctttatggaacgtcggttcagtcagtcagagaggtggctgagcagcgcgattag

SEQ ID NO: 185589 - DNA, 4740 bp, synthetic construct
  misc_feature 1..4740: note = Description of Artificial Sequence: Synthetic coding sequence
  source 1..4740: mol_type = other DNA
atggagccccagcggcgggagctgctggcccagtgccagcagagcctggctcaggctatgacggaagtggaagcagtccttggtctcctcgaagcagccggtgcactcagccccggggagcgcaggcagctagacgaggaagctggtggggccaaagcagagctgctcctcaaactattgttagctaaggaacgtgatcactttcaggacctcagggccgctttggagaagacccagcctcatttgctcccaatactgtatctgaatggtgtcgtgggaccgcctcagcctgccgaaggtgccgggagtacctattccgtgctctcaaccatgccatcagacagcgaatcttcttcctctttatcatccgtcgggacaacgggcaaggcccccagcccgcccccgctgctcactgaccagcaggtgaatgagaaagttgagaacttaagtattcagttgaggctgatgacaagagagagaaacgagttgaggaagagattggcctttgcaacacacggaactgcctttgataaacggccctaccatagattgaatcctgactatgaaagactgaaaattcagtgcgtacgggcaatgagcgacttgcagtcattgcagaaccagcacacgaatgcgctcaagcgctgcgaggaagtagccaaggagaccgatttttaccacacactgcattctcgcctcctgagtgaccagaccagactgaaggacgacgtggatatgctgcggcgggagaatggccagctgctgcgcgaacgcaacctgcttcagcaatcctgggaggacatgaagagactacacgaagaagaccagaaggagattggagatctgcgggctcaacagcagcaggtcctcaagcataacgggtcatctgaaatactcaacaagctctatgacacagctatggataagttggaagtcgtcaagaaggactacgatgccctaaggaagcgttacagcgagaaggttgctatccataacgcagacctgtcccggctggaacagcttggtgaggagaaccagcgcctcctcaagcagacagagatgctgacacagcagagggatacagctattcagctgcaacaccagtgtgcgctgtctttaagacgctttgaagccattcaccacgaactgaacaaggccactgcgcagaataaggacctgcagtgggaaatggaactgttacagtcagagctgaccgaactgagaactacacaggtaaagaccgccaaagagtcagagaaatatcgtgaggaacgagacgctgtgtatagcgagtataaactgatcatgtctgaaagagatcaggtgattagcgaattagataaactgcagactgaagtggagcttgcagagtcaaaacttaaatcttccacttccgagaaaaaagccgctaacgaggagatggaagccctgcggcagattaaagacaccgtaacaatggatgcaggacgagccaacaaggaagtggagatattgcggaagcagtgtaaggccctctgccaggaactcaaagaagcgttgcaggaggcggatgttgccaagtgccgacgtgactgggcttttcaggagcgggataaaatcgtggctgagcgcgactctatccggactctctgtgacaacttgcgtcgggaacgtgatcgcgcagtatccgaacttgctgaggcactcagaagtctggatgatactagaaagcagaagaatgacgtgtctagagaactgaaggagctcaaggagcaaatggagtctcagctcgaaaaagaggcgcggttccgtcagctcatggctcactcttctcatgactccgccattgataccgatagtatggagtgggagactgaggtcgttgagttcgaaagggagactgaagacatcgacttgaaagcactggggtttgatatggcagagggcgtgaatgagccatgtttccccggcgactgcgggatctttgtaacaaaagtggataagggcagtatagcggatggacgcttacgagtgaatgactggctcctgcggatcaatgacgtggaccttattaacaaggacaagaaacaggccatcaaagcactgttgaacggtgagggcgccataaatatggtcgtgagaagacgcaagtcactgggtggtaaagtcgttacaccattacacataaatctttccgggcaaaaggattctggcatatccctggagaatggcgtctacgcagcagctgtgctgcctggttcccctgccgccaaggaaggctccttagccgtcggagatcggatcgtggccatcaacggaatcgctttggacaataagtctctgaacgagtgtgaatccctgctcaggtcctgtcaagacagtcttactctttctttattgaaggaacagaaatgtgtgccagcatcaggcgagctctcccccgaactgcaggaatgggccccatactcgccaggccattcaagtaggcactcgaatccaccactatacccgtcccgaccttctgtgggaactgtgcctcgtagtctgactcccagtacaacggtgtcctccattctgaggaacccgatttacactgtaaggagccatcgtgtaggcccttgttcatcaccccctgccgccagggatgccggcccacaaggccttcaccccagtgtgcaacaccagggccgcttgtctttagatctttcacacaggacctgttccgattattccgagatgagggctacccatgggtctaatagcctgcctagctcagcccggcttggctcctctagcaaccttcagtttaaagcagagcgaatcaaaatccctagtactccacggtaccctagatccgtggtgggcagcgagcgcggtagtgtttcccatagcgaatgctccaccccacctcaaagcccgctcaacatcgacacactgagctcctgcagccaatctcagacttcagccagcacactgcccagaattgccgtgaatccggcttctttgggcgagcgcagaaaggaccgcccatatgtggaagagcctcgccatgtgaaggtgcagaagggtagcgagcccttggggatctccatagtgtcaggcgagaaagggggaatctatgtgtcaaaagttaccgtgggcagtatcgctcaccaggccgggctggagtacggggaccagcttctggagtttaatggcattaacttacgctcagctaccgagcagcaggccaggctgattatcggccaacagtgcgatactatcacgattctggcacagtacaacccacacgtccatcagctgtcgtcacactcccgctcaagttctcatctggacccagcaggcacccattctactctgcaggggtcaggcacgacaacacctgagcatcccagcgtcatcgacccattaatggagcaggatgaaggcccaagcacaccaccagctaagcagagctccagtcgcatagccggggacgcgaataaaaaaactctagagccaagagtcgtttttataaagaagtcacagctggagctaggcgtccacctgtgcggaggcaatttacatggcgtgttcgttgctgaagtggaagatgattctccagccaaaggccccgacggcctcgtaccaggtgacctgatactggagtacggatcattagatgtgagaaataagacagtggaggaggtctatgtcgagatgctaaaacctagagatggggtacggctgaaagttcagtatcgcccagaggagttcactaaagccaaaggactgcccggcgattccttctatattagagccttgtacgaccgactggctgatgtagaacaggagctatcgttcaagaaagatgatatactgtacgttgatgacactctgccccagggaacttttgggagttggatggcctggcagttagatgagaatgcacagaaaatccagaggggtcaaatccctagcaagtatgttatggaccaggaattcagccgccgcctcagcatgtcagaggttaaagatgacaatagtgctactaaaacactgagcgccgcagctcgtagaagtttcttccgccggaagcacaagcataagcgaagcggctcaaaagatggtaaggacctgctggcattggacgctttctcgagtgactcaatacccttattcgaggactcagtgagcctggcctaccagcgcgtacaaaaggtggattgtacagccctcaggccggtgctgatcctgggcccgctgcttgatgttgtcaaagagatgctcgtgaacgaggctccaggaaagttctgccgatgccctctggaggtgatgaaggcctcccagcaggcaattgaacgtggagtcaaggattgtctgttcgtggactataagcgtaggtccggtcatttcgatgtcaccacagttgcatccattaaggaaataaccgagaaaaaccgccactgcctgctagacattgcaccccacgctatcgagcgcttgcaccatatgcatatctaccccatagtgatttttattcattacaagagcgccaagcacattaaagaacagcgcgatccaatctatttgcgcgataaggtaactcagaggcacagcaaggagcagttcgaagcggctcaaaagctggagcaggaatactccaggtacttcactggcgttattcaagggggggctctgagtagcatctgtacccagatccttgctatggtcaaccaggagcagaataaggtgctgtggatccctgcgtgccctctgtag

SEQ ID NO: 185590 - DNA, 5760 bp, synthetic construct
  misc_feature 1..5760: note = Description of Artificial Sequence: Synthetic coding sequence
  source 1..5760: mol_type = other DNA
atggagccccagcggcgggagctgctggcccagtgccagcagagcctagcgcaggcgatgacagaggtggaggctgtgctggggctactggaagcggcgggggccttgtcccccggggaacgccgtcagctcgacgaggaggctgggggggcaaaggctgagctcctcttaaagctattgctagcgaaggagagagaccactttcaggaccttcgggcagctttggaaaaaacccagccccatctcttgccaatcctgtacctgaatggcgtcgttggcccacctcagcctgccgaaggagcaggaagcacatatagtgttttgagtacgatgccgtctgactccgaatcctcttccagcttgtcgagcgttgggactaccggtaaggcccctagtcctcccccattactcacagatcagcaggtgaatgagaaggtggaaaacctgagcatccagctacgtttgatgacaagagagaggaatgaactccggaagcgcctggcctttgctacacacggcaccgctttcgataagagaccttatcaccgtctcaatcctgattatgagagattgaagatccaatgcgtgcgtgcaatgtcggatctgcagtcccttcaaaaccagcatactaatgcccttaagcgatgcgaggaagtggccaaagaaacagatttttatcatactttgcattctcgcctcctttctgatcagactagactgaaagatgacgttgacatgctccgacgcgaaaacggccaactcttgagggagaggaacctcctgcagcaaagttgggaagatatgaaaagacttcacgaggaggatcaaaaagagattggcgacttgagagcacagcaacagcaggtcttaaaacacaacggcagcagcgagatcttgaacaaactgtatgataccgccatggataagctggaggttgtcaaaaaagactatgatgctctgcgcaaacggtattcggagaaggtagccatccataatgccgacctttcacggctggaacagctgggcgaagagaaccagcgactgctgaaacagacggagatgctcacccagcagcgggatacagccattcagctgcaacatcaatgtgctttatctctacgccggttcgaggccatccatcatgaactgaacaaggcgaccgctcaaaataaagacttgcagtgggagatggaactgctccagtcagaattgactgagctgaggaccacccaggtcaagacggcgaaggagagtgaaaaataccgggaagaacgcgacgccgtgtacagcgaatacaagctgatcatgagcgagcgggatcaagttatctccgagcttgacaagctgcagacagaagtcgaactggcagaatccaaattaaagagcagcaccagtgaaaagaaggccgctaatgaggaaatggaagctctcagacagatcaaggatactgtaacgatggatgccgggcgggctaacaaggaggttgagatactaagaaagcagtgtaaagccctttgtcaggaacttaaggaagccttacaggaagcagatgtggccaaatgtagacgggactgggcttttcaggagagggacaagattgtggcagaacgggattctattcgcactctgtgcgacaacttacggcgagagagggatcgcgcggtgtcagagttagccgaagcgcttcgatctcttgatgacacccgtaagcagaagaacgacgttagccgagaactgaaggaactcaaagaacagatggagtctcagcttgagaaggaagcccggttcagacagctgatggctcatagcagccacgactcggccatagacactgatagtatggagtgggaaacagaggttgttgaatttgaaagagagaccgaggatatcgatctcaaggctcttggcttcgacatggccgagggtgtgaacgaaccttgtttccctggagattgtggaattttcgtgactaaggtggataaggggagcatcgccgacggcaggctgagagtgaacgactggctgctccgaattaatgacgtggacttgattaacaaggacaagaaacaggccattaaggcactgctgaatggggagggcgcgatcaacatggttgttcgacggcgaaagagtttgggagggaaagtcgttacgcctcttcacattaacctgtccggacagaaagattcagggatttcgctcgagaatggagtttatgcggcagccgtgcttcctggcagcccagctgcaaaggagggctcattggctgtgggggacaggattgtggcaataaatggcattgcacttgataataagtcccttaatgagtgtgagagtctgttgaggtcttgccaggactccctcacactgtccctcctgaaagtgtttcctcaatcctcatcctggagcggacaaaatatattcgaaaacattaaagattccgacaaaatgctgtctttcagagcacacggacccgaagtgcaagcgcataataagcgtaacctcatccaacataataactctacacagaccgacatcttttacaccgataggctggaagataggaaagagccagggccacctggtggcagctccagctttttgcataagccattcccagggggtcctctccaggtgtgtcctcaagcttgtcccagcgctagtgagcgatccctgagcagttttcgctctgacgcttctggcgatcggggtttcgggctcgtggatgtcaggggcaggaggcccctgctcccttttgagacagaggtaggtccttgcggcgtaggcgaagcaagcttggacaaagccgattctgagggatcaaactccggtggtacctggcctaaggcaatgctctcctctactgcggtgccagagaagctatccgtttataagaagcccaaacaacgtaaatctatctttgaccctaacactttcaaacgcccgcaaacccccccaaaaatcgactatcttctcccaggtccaggacccgcccatagccctcagccttccaaaagggcaggtccactgacaccgcctaagccgcctcgcagaagcgattccatcaaatttcagcatagactcgaaacctctagtgaatccgaggctactctcgtgggaagtagcccgtccaccagtccaccctccgctctgccaccagatgttgaccctggagagcccatgcacgcttctccgcccagaaaagccagagttaggatcgcaagttcctactatcccgagggggacggagatagctctcatctgccagccaagaaatcctgcgacgaggatcttacttctcagaaagtggacgaactgggccaaaagagaagacggcccaagtcggcccctagtttccggccaaagctggcccctgttgtaatccccgcacagtttcttgaagaacaaaagtgtgtgccagcttccggagaattaagcccggagctccaggaatgggctccctactcccctgggcatagctccagacattcgaacccaccactgtatccttccagaccatcagttggtacagtccctcggagtctgacgccctctactactgtgtcgtctatcctgaggaatcccatctatactgtgcgctctcatagagtcgggccatgcagtagcccgcccgccgcaagggatgccggtccccaaggcttgcacccttcagtgcagcatcagggccggctgtcattagacctcagccataggacttgttctgactacagcgagatgcgggctacccatgggtctaacagtctgccttcctccgcccgcctcggctccagtagcaacctccagtttaaggccgagcggattaagattccttccacgcctcggtatcccaggtctgtggttggctcagagaggggttcagtctcacattccgagtgcagtactccccctcagtcgcccttgaacattgatactctcagctcctgctctcagtcccagaccagcgcgagtactctgccacggatcgctgtgaaccccgcatctctgggggagaggcgcaaagatagaccctacgtcgaggagcccagacacgtcaaagtacagaaaggatctgagcctctggggatctccatagtctccggtgagaaggggggaatctacgttagtaaagtgactgtcggcagcatcgcccaccaggcaggattggagtacggggaccagctgctcgaattcaatggcattaatctccggtcagccaccgagcagcaggctcgcttgatcattggccagcaatgtgacaccatcactatcctggctcagtacaacccgcacgtccatcagctgagctcacatagcaggagctctagtcacctggatccagctggcacccattctactctgcaaggctcagggacaaccacacccgagcatcctagcgtcatcgaccccctcatggagcaagatgaaggcccttcaacgccaccggccaaacagtcatcttcgcgcatcgctggggatgccaacaaaaaaacgcttgaaccaagagtagtgttcatcaagaagtcacagctggagctgggagtccatttgtgcggtggaaacttgcacggtgtctttgtagcggaggtggaagacgactctcctgccaaggggcccgacggtctcgttcccggggacttaatacttgaatacggttcattagatgtgcgcaacaagacggttgaggaggtatacgtggagatgctcaagcctagagatggcgtaaggctcaaagtccagtatcggccagaggagtttaccaaagctaagggattaccgggtgacagcttctacatccgcgcactgtacgatcgcttggccgacgtcgaacaggagctctctttcaaaaaggatgatattctttacgtggatgacaccctgccccaggggacttttggctcttggatggcctggcagctggatgagaacgcccagaaaatacagcgggggcagatcccatcaaaatatgtgatggatcaagaattcagtcgccgactcagcatgtcagaagttaaagatgataattcagccactaagactctctcggcagccgccaggcgctcgttctttcgtcggaaacacaagcataaacgatcggggtccaaagatggaaaagacttgcttgcactcgacgcatttagttcagactccattcctctctttgaagactccgtcagcctcgcctaccagcgcgtgcagaaagtggattgcaccgcactccggcctgtactcatcctaggacctttacttgacgtcgttaaagagatgcttgtgaacgaggcccccggcaaattctgtcgctgcccactcgaggtgatgaaggcatcccagcaggcgatcgagagaggagtcaaggattgtcttttcgtggactacaaaaggcgaagtggacacttcgacgtaacgacggtcgcctctattaaagagatcactgagaaaaaccgccactgcctgctggatattgccccccatgctatcgagaggcttcaccatatgcatatttatccaatagtaatctttatccactacaagtcagctaagcacattaaggaacagcgagatccgatatatcttcgtgacaaagtgactcagcgccattccaaggagcagtttgaagccgcccagaaactggaacaggagtatagtcgctatttcactggtgtcattcagggtggcgctctctcatcgatctgcacacagattctggctatggtgaatcaggaacagaataaggtgttgtggatccccgcttgccccctttag

SEQ ID NO: 185591 - DNA, 2052 bp, synthetic construct
  misc_feature 1..2052: note = Description of Artificial Sequence: Synthetic coding sequence
  source 1..2052: mol_type = other DNA
atggagccccagcggcgggagctgctggcccagtgccagcagagcctcgcgcaggccatgacggaggtggaggcagtgctcggcctgctggaggctgcaggcgctctttctcccggggaacgacggcagctagatgaagaggctgggggcgccaaggccgagctactgcttaaattgcttctggctaaggagcgggaccatttccaggatctccgcgcagctctggaaaaaactcagccccatctgctgccaattctgtacctgaacggtgtagtcggacctccccaacccgccgagggcgccggaagtacgtattctgtgctcagtacaatgcccagcgacagcgagagttctagctccttgtccagcgtcggaactacggtgaaacacctgcgtgagcagatggagtcacaactcgaaaaggaggctcggtttaggcagttgatggcccattctagccatgatagcgccatagatacggactcaatggaatgggagacggaagtggttgagttcgaaagggaaactgaggatatagaccttaaggcactaggcttcgacatggccgagggagtcaatgagccatgttttcccggtgattgtgggattttcgtcaccaaggtggataagggctccatcgctgacggccggctgcgagtgaatgattggctactgcgaattaatgacgtggacctcattaacaaagacaagaagcaggccataaaagccctattgaacggcgaaggagcgattaacatggtcgtcagacgaagaaaaagtctcggaggaaaggtagtgaccccgctgcacatcaatcttagcggccagaaagatagtggcataagcttggagaacggggtctatgcagcagctgttctacccggctcccccgctgctaaagagggatcactcgctgttggagaccggattgtggccatcaacggtattgcactggacaataaatctttgaatgagtgcgagtcactgctgcggagttgccaagactccctgaccctgtccctgctgaaagtcttcccgcaatcgagctcctggtcaggacaaaacatcttcgagaacatcaaggattcagacaaaatgctctcatttcgcgcccatgggcctgaggttcaggcccacaacaaaagaaacctgattcaacacaacaactctactcaaaccgatatattttatacagatcgactggaagacagaaaagagccaggccccccaggaggcagcagttcatttctccacaaaccctttcccggcggtcccttacaggtgtgtcctcaagcatgtccctcggcctctgaacgctcattgtcctcctttcgaagcgatgcctcaggcgacagaggctttggactcgtggacgtccgcgggcgaaggcccctcttgccatttgaaacagaagtgggaccatgtggagtgggggaggctagccttgacaaagctgacagcgagggaagcaatagcgggggtacatggcctaaggctatgctttcttccacagcagtgccagagaaactttccgtgtacaaaaagcccaaacagcgcaagagcattttcgaccccaacacttttaagaggcctcagactccccccaagatcgattacctgctacccggccccgggcctgcgcatagtccccagcctagtaaaagagcaggaccactgactccacccaagccccctaggagatctgactcgattaagtttcagcataggctcgagacttccagtgaatctgaagctacattggtcggatcttccccttccacctcacccccctccgccctaccacctgatgttgacccgggggagcctatgcatgcttctcccccacgaaaggccagggtgcgaatcgctagttcttattaccctgagggggatggtgattcttctcacctgccggctaagaaatcatgcgacgaggatctaacttcacagaaggtcgatgaactcggtcagaagcgacggaggcctaagagcgcaccctctttcagaccgaaacttgccccagtcgtcatccccgcgcagttcctggagtag

SEQ ID NO: 185592 - DNA, 2643 bp, synthetic construct
  misc_feature 1..2643: note = Description of Artificial Sequence: Synthetic coding sequence
  source 1..2643: mol_type = other DNA
ggcgccatcaacatggtggtgcggcggcggaagagcctgggcggcaaggtggtcaccccacttcacatcaacctgtctgggcagaaggatagcggaatatccctggagaacggggtctatgccgccgccgtcctgcctggcagtcctgctgccaaggaagggtcccttgccgtgggagatcggattgtagcaataaatgggattgcactggacaataagtcccttaatgagtgcgaaagcttattacgcagctgtcaggacagcctgacgttatccctgctgaaagaacagaaatgtgtcccagccagtggcgagttatcacccgaactgcaggagtgggcaccttattctcctggacatagcagccgccattcaaaccctcctctttatccaagtcgcccttcagtcggtacagtgccacggtccctgacccccagcacaaccgtatccagtatacttcgaaaccccatttataccgttcggtcccatcgtgtcggcccctgctcaagcccgcctgcagccagggacgctgggccccagggattacatccatccgtacagcaccagggacgtctgtccctcgacctgtcccatagaacatgttccgactatagcgagatgcgcgcaacacacggctctaactctttgccatcctcagctagactcggatcaagctccaatctgcagtttaaggccgaacgcattaagattcccagcacaccccgatacccgagaagcgtggtcggatctgaaagaggatctgtgtcccacagcgaatgttctacccccccacagagtccccttaacattgatacactctcctcttgcagccaaagccagacgagtgcttctactcttccgagaatcgcagtcaatcccgcatcgctgggagagcgcaggaaagatagaccgtacgttgaggaacctaggcacgtgaaggtacagaaggggagtgaaccactgggcatctcaatcgtcagtggagagaagggagggatttacgtgtctaaggttactgttgggtctattgctcaccaagccggcctcgaatacggcgaccagttgctggaattcaatggcattaatcttcgatctgccaccgagcagcaagctagactgatcattggacagcagtgtgacactatcaccatactcgcacagtataacccacacgtccaccagctgagttcgcacagtcggtcgagctctcatctggacccggcgggcacgcactctacactgcaaggatctgggactacgactccagaacaccccagcgtgatcgatcccttgatggaacaagacgagggacccagtacccctccagccaaacagtcttcctctcgcattgccggcgacgctaacaagaaaacattggaaccaagggtcgtgttcataaagaagagtcagctcgagctcggggtgcacctgtgtggggggaacctgcatggggtgttcgtggcagaggtggaggacgattcccccgccaaggggcctgatggcttggtgccgggagatctgatccttgagtacggaagtctcgatgtgcggaataaaacggtggaagaggtatacgtggagatgctgaaaccccgcgacggggtcaggttgaaggtccagtatcggccagaagaattcactaaagcaaagggacttcccggcgactcattctacataagagccttgtatgacagactggcggatgttgaacaagagttgtcattcaagaaggacgacattttgtatgttgatgacactctcccgcagggcacctttggctcctggatggcctggcagctggacgagaacgcgcaaaagatacaacggggacagatcccttccaaatacgttatggaccaggagttcagcaggagactcagcatgtccgaagtgaaagatgacaactccgctactaagaccctctccgccgccgcccgcaggagcttcttcaggcggaagcacaagcataagaggtccggcagtaaagatggaaaagacctgcttgcactggatgcattctcgtccgattccattccattgtttgaagactctgtatcactagcataccagagggtccagaaggtggactgtacagccctgcggcctgtcctgatactgggccccctgttggatgtagtgaaggagatgctcgtcaacgaagcaccggggaagttctgtagatgcccactcgaggtgatgaaagccagccagcaggcaattgagagaggggttaaggattgcctgttcgttgattataagcgtcgttctggtcacttcgatgtgaccacagttgcttccatcaaagaaattaccgagaagaacagacactgtctgctggacatcgccccccatgccatagagcgtttgcaccacatgcatatttaccctattgtcatctttatccactacaagtctgcaaagcacattaaggagcaacgtgatccgatatatctacgggataaagttactcaaagacactccaaggaacagttcgaggctgcgcagaagctggagcaggaatattcccggtatttcaccggcgtcatacagggaggggcactctctagtatctgtacccaaattttggcaatggtgaatcaagagcagaacaaagtgctgtggatccccgcctgcccactgtag

SEQ ID NO: 185593 - DNA, 3237 bp, synthetic construct
  misc_feature 1..3237: note = Description of Artificial Sequence: Synthetic coding sequence
  source 1..3237: mol_type = other DNA
atggccccccggaagcggggcggccggggcatcagcttcatcttctgctgcttccggaacaacgaccatccggagattacttatagactgaggaatgactcgaatttcgcgcttcagacaatggaaccagccctcccaatgcctccagttgaagagttggatgtaatgttttctgagctggtggacgagctggacctgaccgacaaacaccgtgaggccatgttcgcgctcccagccgaaaagaaatggcaaatttattgcagcaagaaaaaagatcaggaagaaaacaagggagctacttcctggccagagttttacattgaccagcttaatagtatggctgcgagaaagtccttgctcgccctagaaaaagaggaggaagaggagaggtcaaagaccattgagagcttgaagacagcactcaggacaaagcctatgcggtttgtgacgcgcttcatcgaccttgacgggttatcctgtattctgaactttctaaagacaatggactacgagacgtcagaaagtcgtatccatacgtccctgattgggtgtattaaagctctcatgaacaatagccaggggcgggcacacgttctggcccattcggaatcaataaacgtgatcgcacagagtctgtcaacggaaaacattaaaactaaggtggcagttttagaaatactaggagccgtttgcttggttcctggaggtcataagaaagtgctgcaagcaatgctccactaccagaaatacgcaagtgagagaactcgctttcagacacttataaacgatctggacaaaagcaccggacgctaccgtgatgaggtgtccctgaagaccgccatcatgagcttcattaacgccgtgctgtctcagggggccggcgtggagagccttgactttcgactgcaccttcgctatgagtttctgatgctgggcatccagccggtcattgataagctgcgcgagcacgaaaattccactctggatcgacacctcgacttcttcgagatgctgaggaacgaggatgaactggaattcgctaaacgcttcgaactggttcacattgacactaagtcagcgacacagatgttcgagctcactagaaagaggctgacccactcagaagcgtatcctcactttatgtctattctgcaccactgtctacaaatgccatacaagcgttctggtaacactgtgcagtattggttgctgctagaccgtatcatacagcagatagtaatccagaatgacaaaggtcaagatcccgatagcaccccccttgaaaactttaacatcaagaatgtggtgcgcatgctcgtgaatgaaaacgaggtaaaacagtggaaagagcaggccgagaagatgcgcaaagagcataacgagctgcagcagaagctggagaaaaaggaacgagaatgtgatgccaagacccaggagaaagaggagatgatgcagactctgaacaagatgaaagagaagctggagaaggaaacaaccgagcataagcaagttaagcagcaggtggcggatctgaccgctcagttgcatgaattatctaggcgggccgtctgtgcctctattcctggtggccctagtcccggggctcccggcgggccgttccccagcagcgtgcccgggtccttactgcccccccctcccccacctcctctccccggcggaatgcttccaccgcctcctccgccactgccacccggcgggccacctcccccccctggccctccgccattgggggcaataatgcctcctccgggagcgcccatgggtttggcattaaagaaaaagagcatcccacagccaaccaacgcccttaagtcattcaactggtccaagctgcccgagaataagcttgaagggactgtgtggactgaaattgacgacactaaagtcttcaagattcttgatctggaagatttggaaagaaccttttctgcgtatcagcggcaacaggacttcttcgtgaattcaaattccaagcagaaggaagctgatgccatcgatgacacactctcctctaaactcaaggtgaaggagctctccgtcattgacgggcgtcgggcgcagaactgtaatatcttattatcccggctgaagctgtcaaacgatgaaatcaagcgagccattctcaccatggacgaacaggaggatctgcccaaagacatgctcgagcagctactcaagttcgtgccggaaaaatcagatatcgacttgctggaggagcacaaacacgaactcgatagaatggctaaggcagacaggtttctgttcgagatgtcacgaatcaatcattaccaacagcggctgcaaagcctgtactttaagaaaaagttcgctgagcgggtggccgaggtaaagcctaaggtggaagcaattagaagcggaagtgaagaggttttccggagcggcgcattgaaacaactcctcgaggtggtcttggcttttggaaattacatgaataaagggcagaggggcaacgcctacggattcaaaattagcagtctgaataagatcgcagatacaaagtcttccattgacaaaaacattacgctcttacactacctgattaccattgtggagaacaagtaccccagtgtgctgaatctcaacgaagagttgcgggacattcctcaggccgctaaagtaaatatgacagagctcgataaggagattagtacactgaggagcggattgaaagcagttgagaccgaactggagtaccagaagtcccagcctccacaaccaggagacaagttcgtgtctgttgtgtctcagttcatcactgtcgcctctttctccttctccgacgtggaggatttgttggccgaggcgaaagatctcttcaccaaggctgtgaaacacttcggggaggaggccggcaagatccagccggatgaatttttcggcatcttcgaccagtttctgcaggcagtgtcagaggctaagcaagagaatgaaaatatgaggaagaagaaagaagaggaagaacggagggctcgcatggaggcccaattaaaagagcagagagaacgagaacgtaaaatgaggaaggccaaagagaatagcgaagaaagcggtgagttcgatgaccttgtgtctgctttgaggtctggggaagtctttgacaaagacctgtccaagcttaaacggaatcgcaagcgaatcactaatcaaatgacagattcctcccgcgaaagacccatcaccaagctcaacttctag

SEQ ID NO: 185594 - DNA, 2649 bp, synthetic construct
  misc_feature 1..2649: note = Description of Artificial Sequence: Synthetic coding sequence
  source 1..2649: mol_type = other DNA
atggccccccggaagcggggcggccggggcatcagcttcatcttctgttgtttccgtaacaatgatcaccctgaaatcacctatcgacttaggaatgactccaatttcgcgctgcagaccatggagcccgccttaccaatgccacccgttgaagagctggacgtaatgttttctgagcttgtcgacgaattggaccttaccgataagcaccgcgaggccatgttcgccttacccgcagaaaagaagtggcagatctattgctctaaaaaaaaggaccaggaggagaacaagggagccacatcctggcccgaattttatatcgatcagctgaacagcatggccgcccgcaaaagcttgctggccctggagaaagaagaggaggaggagcgcagcaagacaatagaatctctcaaaacagccctcagaaccaagcccatgcgctttgttacacggtttatagacctagacggccttagttgtatacttaatttcctaaagaccatggattacgagacttctgaatcacggatccatacgtcactcatcggatgtatcaaggcactgatgaataattcacaagggagggcacatgtcctggcccacagtgaatccatcaacgtgatagcccagtccctcagtactgaaaacatcaaaactaaagtggcagttctggaaatcctgggtgccgtgtgtttggttcccggaggtcataaaaaagtgttgcaagctatgcttcattatcaaaaatacgcaagcgagcggacacgcttccaaactctgattaacgacttggataagagtaccgggagatatcgggatgaggtttctttgaagacggccatcatgagctttattaacgcggtattgtcacagggggccggagtggagtctctggacttcaggttgcatctgcgttacgaatttctcatgctaggaattcagcccgttatcgataagcttcgtgaacatgagaactcaacacttgatagacacttggacttttttgagatgctgcgtaacgaggacgaacttgaattcgccaagcggtttgaactagtgcacattgacacaaagtccgcgacacaaatgttcgagctgacacgcaagcgcctgacccactccgaagcctacccccacttcatgagcatcctgcatcactgtctccagatgccttacaagagatcaggcaacacagttcaatattggttgctcctcgaccgtattatccagcagatcgtgatccaaaatgacaaaggtcaggaccctgactccactcctcttgaaaattttaatattaagaacgtagtaagaatgctcgtgaacgagaacgaggtcaagcaatggaaggaacaggccgagaagatgcggaaggaacataacgaactgcagcagaaactagaaaagaaagaacgagaatgcgatgccaaaacgcaagagaaggaagagatgatgcaaacactaaacaaaatgaaggaaaaactcgagaaagaaacaacagaacacaagcaggtcaaacagcaagtcgcggacctgacagcccagctccacgagctatcacgcagggctgtttgcgcgtctattcccggtggtcccagccccggtgctcctggcggcccgtttccttccagcgtccccggtagcttattgcctccaccccccccccctccactgcctgggggaatgctgcctccccctccacccccattgcccccaggcggacctcctccaccgccggggccacccccactgggcgcaatcatgccgccccccggagccccaatggggcttgccctaaaaaagaaaagcattccccagcccactaatgctcttaagtcgtttaattggtcaaaactaccggagaataaactggaaggcacggtgtggaccgaaatagatgatactaaagtattcaagatcctcgatttagaggacctggaacgcactttcagcgcctaccagcgtcagcaagacttctttgttaatagcaatagtaagcagaaggaggcggatgccattgacgatactctctcttcaaaattgaaagtgaaagagctgagcgtgatcgacggccggcgagcccagaactgcaatatcctgttgagccgacttaagctgagcaatgatgagatcaagcgggctatcctcaccatggacgagcaggaggacttacccaaggatatgctcgagcagctgttgaaattcgtgccagaaaagtctgacatcgacctcctcgaggagcacaaacacgagctcgatcgaatggcaaaggcagataggttcctatttgaaatgagtaggatcaaccactatcaacagagactgcaatccctgtacttcaagaagaagtttgctgagagggtggcattcggtaattatatgaataaaggccagcgcgggaacgcatatggtttcaagatcagcagcctgaataaaattgctgacaccaaatcatcaatcgacaagaatattacactcctgcactatctgatcaccatcgtggaaaataagtacccgagcgtactgaacttgaatgaggagctacgggacatcccccaggcggctaaagttaagtcatggaatatcagatcactgtcgccacactcacccgagatctctctttgcctgctcagcgcaagctcctctcagtag

SEQ ID NO: 185595 - DNA, 3207 bp, synthetic construct
  misc_feature 1..3207: note = Description of Artificial Sequence: Synthetic coding sequence
  source 1..3207: mol_type = other DNA
atggccccccggaagcggggcggccggggcatcagcttcatcttctgctgcttccgcaacaatgatcacccggaaattacctacaggctgcggaacgatagcaactttgcccttcaaactatggaaccagctctgcctatgcccccagtggaggagctggacgtgatgttttcagagttagtggacgagctggatctgacagataagcaccgcgaggccatgtttgcactgcctgcagaaaaaaaatggcaaatctactgttccaagaagaaagaccaggaggagaataagggcgctacaagttggccggagttctatatcgatcagttgaattcaatggccgcacgtaaaagtctgctggccctagaaaaggaagaggaggaggaacggtcgaaaaccatagaaagtctgaagacggctcttaggaccaaacctatgaggtttgtcacacgcttcattgaccttgatggcttgagttgcattctgaattttctgaagacaatggattacgagacttctgaaagcagaattcacaccagccttattggttgcattaaggctctcatgaataatagtcagggcagggcccacgtactcgctcattctgagtcaattaacgtgattgcccaaagcctgtctacggaaaacatcaaaaccaaagtcgccgtcttggagattctgggggccgtgtgtttggtacccggcggacataaaaaggtgctccaggctatgctgcactaccagaagtacgcctccgaaagaacaaggttccagacgctgatcaatgaccttgacaagtccactggccgctaccgcgatgaagtttccctgaagacagccatcatgagctttataaacgcagttctttcacagggggctggtgtcgagtccttagactttcgcttgcacctaaggtacgagtttttgatgttggggatccagcctgtgattgataagcttagagaacacgagaacagcacattggaccgacatttagacttctttgagatgctcaggaacgaggatgaattggaatttgccaagcggttcgaattggtgcatatagacaccaaatcggctacccaaatgtttgagctgacgaggaagcgcttgacccatagtgaggcgtaccctcactttatgtcaatactgcatcactgcttacagatgccatataaacgctctgggaacactgtgcagtactggctccttttggataggatcatccagcaaattgtcattcagaatgataaggggcaggatcctgactctactcccctggaaaatttcaatataaagaacgtggtcaggatgctcgtcaacgagaacgaggtgaaacaatggaaagagcaagcagagaagatgcgtaaagagcataacgaactgcagcagaaactggagaagaaggagcgcgagtgcgatgcaaagactcaggagaaggaagaaatgatgcagaccctgaataagatgaaagagaagctggagaaagaaactaccgagcataagcaggtcaaacagcaggttgcagacttaactgctcagctccatgagctgagtaggcgagctgtgtgcgcttctataccaggtggacctagcccaggagctcctggggggccctttccttcttccgtacccggtagcttactgcctccaccaccccctccccccctgcctggaggcatgcttccccctcctccccctcccctgcctcctggcggtcccccaccaccgcccggccctccccctctgggcgccatcatgccccccccaggcgccccaatggggctggcattgaagaagaagagcatccctcagccaacgaatgccctgaagagcttcaattggagcaagctgcccgaaaataaactggaaggaacagtgtggactgagatcgatgacacaaaagtttttaaaatcctcgacctcgaggacttggagagaaccttctcggcttaccaaaggcagcaaaaggaagcagatgccatcgacgataccttgagcagtaaactcaaggtgaaggaattgagtgttatcgatgggcgacgagcacagaactgtaatatattactgagcaggctgaaactgtctaacgacgagattaaacgggctatcctcaccatggacgagcaagaggatctgcctaaggacatgctagaacaacttcttaaattcgtcccagaaaaaagcgacattgatttattagaggaacacaagcatgaactggaccgcatggccaaagccgatagatttctgttcgagatgagtaggatcaatcactaccagcagcgcctccagtccctatacttcaaaaaaaaatttgccgagagggtagcggaggtgaagcccaaggtggaggcaatacgatcaggctccgaggaggtattccggagcggcgcgctgaagcagctccttgaggttgtgttagctttcggaaactatatgaacaaaggacagagaggcaacgcatacggtttcaagatctcgtctctcaataagattgctgatacgaagagttccatagacaaaaacattaccctgctccactacctgattacgattgttgagaacaagtacccatccgtgcttaatctcaacgaggaactgcgcgatataccccaggcagctaaagtgaacatgacagagctagataaggaaatttctaccctgagatcgggacttaaggctgtggaaaccgagctggaataccaaaagtctcagccaccccagcccggggacaaatttgtatctgtggtgtcccaattcattacagtggccagcttctcgtttagtgacgtggaagacctgctcgccgaagctaaggatctgttcactaaggctgttaagcattttggagaggaggcagggaagattcagcctgacgagtttttcggaatctttgatcagtttctccaggctgtgtctgaggccaaacaagaaaatgagaacatgaggaaaaagaaggaggaagaggaacgcagagcacgcatggaggcacagctgaaagagcagagagaaagagagagaaagatgaggaaggcaaaagagaattcggaagagtcgggggagttcgacgatctcgtttctgccctgagaagcggagaagtctttgacaaagatctgtccaaactgaagaggaataggaaaagaataacaaaccagatgacggattcgtcacgcgagcgccccatcaccaagctcaatttctag

SEQ ID NO: 185596 - DNA, 3237 bp, synthetic construct
  misc_feature 1..3237: note = Description of Artificial Sequence: Synthetic coding sequence
  source 1..3237: mol_type = other DNA
atggccccccggaagcggggcggccggggcatcagcttcatcttctgctgtttccgcaacaatgatcaccccgaaatcacctaccggctgcggaacgattctaactttgcattacagaccatggagcctgcccttcccatgcctcccgtagaagagcttgacgtgatgttttctgagttggtggatgagttagacttaaccgacaagcacagggaggcgatgttcgcattgccagccgagaaaaaatggcaaatctactgttcaaaaaaaaaggaccaagaagaaaataaaggggcaacttcatggcctgagttttatatcgatcaattgaattcaatggccgctagaaagtctctgctggctctcgaaaaagaggaagaggaagagcgttctaaaacaatcgaatcactcaagacggcactgaggactaagccaatgagatttgtgaccaggttcattgaccttgacggcctgagctgcatcctgaatttcctgaaaacaatggattatgagacatccgagtcacgaattcacaccagtctcatcggttgtattaaggcattgatgaacaactcccagggccgggcccacgttctggcacacagcgagagcataaatgtgatcgcccaaagccttagtacggaaaacatcaagactaaagtggccgtgctcgagatcctgggcgccgtctgcctggtgccaggcggccacaaaaaagtgctacaggccatgctccactatcagaaatatgcatctgagcgaaccaggttccagaccctcattaacgacctcgataaaagtacaggaagatacagagatgaagtctctttgaaaacagcaataatgtccttcatcaacgccgttttgtcacaaggagcaggggtggagtctctcgattttaggcttcacttacgctatgaatttttgatgctcggtatacaacccgtcattgacaagctacgtgagcacgaaaacagtacccttgacaggcacttagatttctttgagatgcttaggaatgaggatgaactggagtttgccaagcggttcgagctggttcacattgacaccaagtctgctactcagatgttcgagttgacacgtaagcgactcacccattcggaggcatatcctcactttatgtctatattgcatcactgcttgcagatgccttataagagaagcgggaatactgtccaatactggctgctgctggatcgcatcatccagcagatcgtcatccagaatgataagggccaggatcccgacagtacgcccctggaaaacttcaatattaagaatgtggtacggatgcttgtcaatgaaaatgaggtaaagcaatggaaagagcaagcagagaagatgaggaaggaacacaacgagctgcagcaaaagcttgagaagaaggagcgggagtgtgacgccaagacacaggagaaagaagaaatgatgcagacactcaacaaaatgaaagagaaactcgaaaaggagaccactgagcacaagcaagtgaagcaacaggttgcagacctgacagcccagttgcacgagctctcgaggcgcgcagtgtgcgcatccattcctgggggcccttctccaggcgcacctggaggacctttcccctcttcagtgcccggctctttacttcccccaccacctccgccccccttgcctggtggtatgctgcccccccctcccccccctctaccccccggaggcccacccccacctccgggacctccccccctgggggcaatcatgccccctcccggcgcccccatgggcctggcactgaagaagaagtcaatccctcagccaacgaatgcactgaagagcttcaattggtcaaagctacccgagaacaagctggaaggtaccgtgtggactgaaatcgatgacactaaggtcttcaaaattcttgacctggaggacctggagcgcaccttctcggcgtatcagcggcagcaggacttcttcgtaaattcgaatagcaagcagaaagaggcggacgcgattgatgacaccctctccagcaagctgaaggttaaggaactctcagttatcgacgggagacgtgcccagaactgcaacatcctcctgagccgactcaagctcagtaatgatgagataaagcgcgctatcttgactatggacgaacaggaagatttgccaaaagacatgctggagcaactactgaagttcgtgcctgagaaatcagatattgacttgctcgaggaacacaagcacgagctggacagaatggctaaggccgatagatttttgttcgaaatgtcacgaataaatcattaccaacagcgcctgcagtcactgtattttaagaagaaattcgccgaacgggtagcagaagtgaaacccaaggtggaagctatccggagcggatcagaggaggtctttagaagcggtgcgcttaagcagttgctcgaagtcgtccttgccttcggaaattacatgaacaaggggcagcgggggaacgcgtacggattcaagatctcaagccttaataaaattgcagatactaagtccagtatcgataaaaatattacactgctccattatctgatcaccatagtagagaataaatatcccagtgtgcttaacctgaacgaagagttgcgcgatataccacaggctgctaaggtcaacatgactgagctggacaaggagatatctaccctgcgatcgggccttaaagctgtggagacggaactcgagtaccagaagtcacagcctccccagcccggggacaaattcgtgtccgtcgtctctcagttcattaccgtcgccagtttcagtttttccgatgtcgaagacctgctggctgaggctaaggacttgtttaccaaagcagttaaacatttcggcgaggaggccggcaagatccagccagatgaatttttcggaattttcgaccagttcctgcaggccgtctctgaggccaaacaggagaatgagaatatgcgcaagaaaaaagaagaagaggagagaagggcgcgaatggaggctcagctgaaagagcagcgagaacgcgaacgcaaaatgcgcaaagcaaaagaaaacagtgaggagtcaggcgagtttgacgaccttgtgtcagcacttcggagtggtgaggtgttcgacaaggacctgagtaaactcaagaggaaccggaagcggatcaccaaccaaatgacagattcatcaagagagcggcccatcacaaaattgaacttctag

SEQ ID NO: 185597 - DNA, 3207 bp, synthetic construct
  misc_feature 1..3207: note = Description of Artificial Sequence: Synthetic coding sequence
  source 1..3207: mol_type = other DNA
atggccccccggaagcggagccaccacggcctgggcttcctgtgctgtttcgggggatccgatatacccgagataaatctcagggacaaccatcccctgcaattcatggaattttcaagcccaataccaaacgcagaggaacttaatattagatttgctgaactggtggatgagctcgacctgaccgataaaaaccgcgaggccatgtttgccctcccgccggaaaagaaatggcagatctactgcagtaaaaaaaaggagcaagaagaccccaataagttggccacctcctggccagactactatatcgatcggattaacagcatggctgcaatgcagtctctctatgccttcgatgaggaggagaccgagatgagaaatcaggtggtggaagatctgaagaccgccctcagaacccaaccgatgaggttcgttacacggtttatcgagctcgagggactgacatgcctgctgaacttcctgaggtctatggaccatgcaacttgtgagagcaggatccacaccagcctgatcggctgcatcaaggcactgatgaataattcacaggggagggctcacgtgctcgcgcagcccgaagctatctccacaatcgcccaatctctaagaaccgaaaactccaaaaccaaggtggctgtgctcgaaattttgggcgccgtatgcctggtgcccggtggtcacaagaaggtgctacaggccatgctgcactaccaggtgtacgcagcagaaaggacgaggttccagacgctcctgaacgaattggacaggtctttaggtaggtaccgagatgaagtgaacctcaagacagcgataatgagcttcattaatgcagtactcaacgcaggcgccggggaggacaatttggaatttcgactgcacctacgttacgaattcctcatgctgggaatccaacccgtaatagataagttacgacagcacgagaatgcaattttagacaagcacctggattttttcgagatggtgcggaatgaagacgatctggagctggcgagacggttcgacatggtgcacattgacacaaagtctgcctctcaaatgttcgaactgattcacaaaaagctcaaatataccgaggcctacccgtgcctgctgtctgtgcttcatcactgcctgcagatgccctacaagcgcaacggcggctacttccagcaatggcagttgctcgatcgtattctgcagcaaatagtgctgcaggatgagagaggcgttgatccagatctggccccactcgaaaacttcaatgtgaaaaacatcgtgaacatgctcatcaatgagaatgaggtcaaacagtggcgggatcaggccgagaagttccgcaaggaacacatggagctggtttctcggctggagaggaaggagcgggaatgtgaaacgaagacactggagaaggaggaaatgatgcgtaccttaaataagatgaaggacaaacttgctcgcgaaagccaggaattacggcaggcacgcggacaagtggcagagctcgttgcccagttgagtgagctgagcacgggcccagttagcagtccgccccccccaggggggcccttaacactcagttcatctatgactaccaacgacctgcctccgccccccccaccattgcctttcgcctgttgccctccgcctcctccaccaccgctaccccctgggggaccgcccactcctcctggcgctccaccttgcttaggaatggggctccccttaccccaggatccctatcccagctctgatgtgccactgagaaagaagagggtgcctcagccatctcaccctttaaaatcttttaattgggtgaaactgaacgaagagcgcgtgcctgggaccgtgtggaacgagatcgacgacatgcaagtgttccgaatcctagatctggaggactttgaaaagatgttctccgcttaccaacgccaccagaaggagctaggaagtaccgaagatatttatttggcatctaggaaagtcaaagagctgagcgttatcgatggccgccgcgctcagaactgcattatactcctttcaaaactaaaactgtccaacgaggaaatccgacaggcaattttgaaaatggatgaacaagaggatctggcaaaagacatgctcgagcagctgctgaaatttatcccagaaaaaagcgacattgacctactggaagaacacaagcacgaaattgagagaatggcaagagccgacagattcctgtatgagatgtctaggattgatcactaccaacagcggttgcaggccctattcttcaaaaaaaagttccaggagcggctggccgaagcgaagccaaaagtagaggctatcctgctagcatcacgtgaactggtgcgttcgaaaaggcttcgccagatgctagaagtgattttggctatcggcaactttatgaacaaaggccagcggggtggggcttacggcttccgggttgctagcttaaacaagatcgcagacacaaagtcaagtatagaccgtaatatatcactgctgcactatctaatcatgattcttgaaaaacacttccctgacattcttaatatgccatccgagcttcaacacttgcccgaagctgctaaagttaacctggccgaattggaaaaagaggtgggcaatctgagaagagggttgagagctgttgaggtggaactggaatatcagagaaggcaggttagagagccatccgataaatttgtgcccgtgatgagcgactttattaccgtgtcaagtttctctttctccgagttggaggaccagctgaacgaggctagggataaatttgccaaggcccttatgcattttggcgagcacgattctaaaatgcagccagacgaattcttcggcattttcgacacattcctgcaggccttttctgaagctcgacaagatctggaagcaatgaggcggcgcaaggaagaggaagaacgacgcgccaggatggaggccatgctgaaagaacagagagaaagggaacgatggcaacgtcaacgcaaggtgctcgcagccggctcctctctggaggagggtggagaattcgacgacctggtttctgccctgcggagcggagaagtgttcgacaaagacctttgtaaactgaagaggtctcgcaaacgcagcggctctcaggcactcgaggtgacgcgagagagggccatcaaccggcttaactactag

SEQ ID NO: 185598 - DNA, 3207 bp, synthetic construct
  misc_feature 1..3207: note = Description of Artificial Sequence: Synthetic coding sequence
  source 1..3207: mol_type = other DNA
atggccccccggaagcggagccaccacggcctgggcttcctgtgctgttttggtggttcagatatccctgagatcaacctgcgtgacaaccatcctctccaatttatggaattctcctccccgatccccaatgcagaagagctcaatatacgctttgctgagctggtggatgaactggaccttaccgataaaaatcgcgaagccatgtttgctctccctcctgagaaaaagtggcagatctactgctctaaaaagaaggagcaagaggaccctaataagcttgctacatcttggcccgattactacatcgaccggatcaactctatggccgccatgcagtcgctctatgcattcgacgaggaagagacagagatgaggaatcaggtcgtcgaagatctgaaaaccgccctaaggacccagccaatgcgcttcgttacacggtttattgagttagaaggcttgacatgtttgctgaatttcctgaggtctatggaccatgccacctgcgagagcagaatccatactagtttgatcggatgcatcaaggcccttatgaacaattcccagggcagggcgcacgtcctggcccagcccgaggctattagtacaatcgcacagagtctgcgcacagagaactccaaaacaaaagtagctgtgctggaaatactcggagccgtttgcctggtcccaggcggtcacaagaaggtgctgcaggccatgctccactatcaggtttacgcagccgagagaacccgtttccagacactcctcaatgaactggaccggagcctcgggaggtacagggatgaagtgaatctgaagacagcaatcatgtccttcattaatgcagttctgaatgcaggggccggcgaagacaatcttgagtttcgcttacatttacggtatgaattccttatgctggggatccaacccgtgattgacaagctgcgccagcacgagaacgccatactcgataagcacctcgatttttttgagatggttcgcaacgaggacgacttggaattagctcgacggttcgatatggtacacattgacaccaagtctgcctcacagatgttcgaattaatacataagaaactaaagtacacagaagcctatccctgcctgctgtctgttctgcaccattgtttgcagatgccctataagcgcaacgggggctactttcagcagtggcagcttctggataggattctacagcagattgtgctccaggacgagcggggcgtcgatcctgatctagccccacttgagaattttaacgtcaagaacatcgtgaatatgctgatcaacgagaatgaagtgaagcaatggcgagatcaggccgagaaatttagaaaggagcatatggaacttgtctctaggctcgagcggaaagagagggaatgtgagacaaaaactctggaaaaggaggagatgatgcgaacactcaataaaatgaaggacaaactggccagagaatcccaggagctgcggcaagctcggggacaggtagccgagcttgtagctcagctcagcgaactgtctacaggtcctgtgtcttcaccccccccaccaggcggaccacttacccttagttcttcaatgacaacaaacgacttacccccccccccccccccactgccgttcgcctgctgtccaccaccaccgccccctccgctgccacccggaggccctcctactcctcctggggcaccaccgtgcctcgggatggggctgccacttcctcaggacccctacccaagttctgacgtacctctaaggaagaaacgggtcccccagccaagccaccctcttaagtcgtttaactgggtgaaacttaacgaggaaagggtgccaggtaccgtgtggaacgagatagacgacatgcaggtcttccggattctggacctcgaggacttcgaaaagatgttctcagcctatcagcgccaccagaaagaactggggtcaaccgaggatatatatttggcttcacgcaaggtgaaggagctctccgtaatcgacggacggcgagcacagaattgtattatcctcttgtctaaactgaagctatcaaatgaagaaatccggcaggcaatattaaagatggatgaacaggaggatttggcgaaagacatgttagagcagttacttaagtttattccagaaaagagtgatatagacttactcgaggagcataagcacgaaattgaacgcatggccagagccgatagattcctttatgagatgtcaaggatagaccactatcagcagcgactgcaggcgctgttcttcaagaaaaagttccaagaacgcttggctgaagcaaaacccaaagtcgaagcaatcttgctggccagccgcgaactggtccggtccaaacgcctgagacagatgctggaagttattctggccatagggaacttcatgaataaaggtcaacgcggtggcgcttatgggttccgcgttgcaagcctgaacaagatcgctgacactaagtcatccatcgatcgaaacatttccctgttacactatcttatcatgatcctagagaagcactttccggatatcctgaatatgccttcagaattacagcatctacccgaagctgcaaaggtaaacctggcagagctcgagaaagaagtgggaaacctccgccgaggtttgagagccgtggaggtcgagcttgaatatcagcggcgtcaagtgcgcgagcctagcgataaatttgtgcccgtgatgtctgacttcatcactgtaagcagttttagtttttctgaattggaggaccagttaaatgaggccagagataagtttgccaaggcactgatgcactttggggagcacgacagtaaaatgcagcctgacgaatttttcggcattttcgacaccttccttcaagcatttagtgaagctagacaggatcttgaagccatgagaagacgcaaagaggaggaggaacgcagagctcgaatggaggcgatgctgaaagagcagcgtgagagggagcggtggcagcggcaacggaaggtcttagccgcggggtcttcccttgaggaagggggtgagttcgacgatctggtgtcagctctgcgctccggcgaagtgtttgataaggatctgtgtaagctcaagaggtctcgtaaacgctcaggctctcaggccctggaggtaacccgtgaacgcgcaatcaataggctgaactattag

SEQ ID NO: 185599 - DNA, 399 bp, synthetic construct
  misc_feature 1..399: note = Description of Artificial Sequence: Synthetic coding sequence
  source 1..399: mol_type = other DNA
atggccccccggaagcggagccaccacggcctgggcttcctgtgctgctttggaggttcagacattcccgagatcaatctgagagataaccatccactgcagtttatggagttcagttccccaatccccaacgcagaggaactcaacattcgattcgccgagttagtggatgaattggatctcaccgataagaatagagaagctatgttcgcgctccctccagaaaagaaatggcagatttactgctccaaaaaaaaagtgccctcactgacccccttggctactagccagggatcatggcacggggtggccctggccgctctggcatgctcgtgtatacacttgatgttcatcacatgtcaaccatgtagcagatgttggcgtaataactccgaatag

SEQ ID NO: 185600 - DNA, 3204 bp, synthetic construct
  misc_feature 1..3204: note = Description of Artificial Sequence: Synthetic coding sequence
  source 1..3204: mol_type = other DNA
atggccccccggaagcggagccaccacggcctgggcttcctgtgctgtttcggggggtcagacatacccgagatcaacctccgggacaatcacccactacagtttatggaattctcctcgcccatacccaatgctgaggagttgaacattagattcgcagagctggtcgatgagctcgatctgactgacaaaaacagggaggcgatgttcgcactgccacctgaaaagaaatggcagatctattgcagtaagaagaaggaacaggaggaccctaacaaacttgccaccagttggccagattattatatcgaccgtatcaactccatggcagcaatgcagtcactgtatgcctttgacgaggaggagacggagatgagaaaccaggtggttgaagacttgaaaactgccctccggacacagcctatgaggttcgtcacacggtttattgaactggagggcctgacatgtcttttgaatttcctgcgatcaatggatcatgccacgtgtgagtctcggatccatacaagcttaatcggctgtatcaaagcgctaatgaacaacagccagggccgagcccacgtccttgcacagccagaggccattagtaccattgcccagtccctgcgtacagagaacagcaagacgaaggtggctgtcctggagatactcggcgctgtgtgcctcgtccctgggggtcataagaaagtactgcaggctatgctgcactatcaggtctacgccgcggaacgaacgcgttttcagactctgctgaacgaacttgatagatcattgggtagatatagggacgaggttaatctgaagacagcaatcatgtcttttataaacgccgtgctcaatgccggcgcaggcgaagataatttagagtttcggctgcatctgcgatacgagtttctgatgctcgggatccaacccgttattgacaagctccgacagcatgagaacgccatattggacaaacatctcgacttcttcgagatggtgcggaatgaagacgacctagaacttgcgcgaagatttgacatggtccacatagacactaagtccgcctcacagatgttcgagctgatccacaaaaagctcaaatataccgaagcatacccctgcttgttgagtgttctccaccactgtctccaaatgccatataaaagaaatggcggatattttcagcagtggcagctgctggacagaatcctccagcagatcgtgctgcaggatgagaggggtgtggaccctgatctggctccactagagaatttcaatgtcaagaacattgtcaatatgctcatcaacgagaatgaagtcaagcagtggagagatcaggctgagaaatttcggaaggagcatatggaactggttagtagattggaaaggaaggaacgggaatgcgaaactaaaaccctggaaaaggaggaaatgatgcgcactctgaataagatgaaagacaagctggcccgcgagagccaggagctgcgccaagctaggggccaagttgctgagctagtggcacagctgtcagagctcagcactggacccgtaagctccccacctcctccagggggccccctgacattgagctccagtatgaccaccaacgacctaccacccccaccgcctcccctgccttttgcatgttgtccacctcctccccccccgcccttgcccccgggaggtccacccaccccacccggcgcgccgccatgtctcggtatgggtttgccacttccacaagacccctatccctcatctgacgttccccttaggaaaaagcgcgtgccacagccgtctcacccactaaagtcctttaactgggtcaaattgaatgaagagagagtccctggcacggtctggaacgaaatcgatgatatgcaagtcttcaggatactagacctcgaggattttgagaagatgttctctgcttaccaaaggcatcagaaggagctagggtccaccgaagatatctatttggcttcccgcaaggttaaggagctttctgtgattgatggccggcgtgcgcaaaactgcattatcctgttgtccaagctcaagttaagtaacgaggaaatcaggcaggccatcctcaaaatggatgaacaggaggatttggccaaagacatgcttgaacagctcctcaagtttatcccagaaaagtccgacattgacctgctggaagaacacaaacatgaaattgagagaatggcgagagccgatcgctttctatacgaaatgtctcggatagaccactaccaacagcgtttacaggccttgttttttaaaaaaaaattccaggagaggctcgctgaggccaaacctaaggtggaagcaattctcctagcatctcgggaactagttcgctcaaagcggttaaggcagatgctggaagtgatcctggctattgggaatttcatgaataaggggcaacggggcggagcctatgggtttcgagtcgcgtcactgaataagatagctgacactaaaagcagcattgaccgcaatatatccctccttcattacctgattatgattctcgagaagcacttccccgatattctcaatatgcctagtgagctgcagcatctgccagaggccgccaaggtcaatttggcggagctggagaaggaggtggggaatctgaggagagggcttcgcgccgtggaggtgctggagtatcagcggcgtcaagttagagaacctagcgacaagttcgtgcccgtgatgagtgacttcattaccgtgtcctctttttcattctctgagttagaggaccagctgaacgaagcccgtgacaagtttgcgaaagccttgatgcacttcggggagcatgactctaagatgcagccggatgaattttttggtatctttgataccttcttgcaggccttttccgaggccaggcaggacctcgaagccatgagacgccgcaaagaggaagaggagagacgggccaggatggaggctatgctgaaagaacagcgagagcgcgagcgatggcagaggcagcgcaaagttctcgctgccggctcttctttggaagaaggcggtgaattcgatgatcttgtgtcggctttgagatcaggcgaagttttcgataaggacctgtgcaaactgaagcggtctcgaaagcggtccggatctcaggcactagaagtcacacgagagcgggcaataaaccggttgaactactag

SEQ ID NO: 185601 - DNA, 1062 bp, synthetic construct
  misc_feature 1..1062: note = Description of Artificial Sequence: Synthetic coding sequence
  source 1..1062: mol_type = other DNA
atgggcgccctgctgtgcgaccaccggagctgccggcccatcagcctgaccgtggcaaagtgttgggatcccactccaagatcatacttcaccgtcccccgggccgacccagtgcgacccatagaccccgctgcctggctgagtcacacagctgccctgaccggcgcattacccagatatgaattggaagaggcccctcttacagtcaagtctgacatgtcggcagtggttcgagtaatgcaattgcccgattccggtttggagattagagacaggatgtggctgaagattaccatcgcgaatgcagtaataggagcagatgtcgtggattggctgtacacacacgtggaaggattcaaggagaggcgcgaggctagaaagtacgcgagctcattgctgaagcacggcttcttgcggcacaccgtgaacaaaatcactttttctgagcaatgctattatgtatttggcgacctctgctctaatttagccacactgaatctgaactcaggctcaagtggtacaagcgaccaggatactcttgcccctcttccgcaccctgctgctccatggcccctcggccagggatatccatatcagtatcccgggccccccccttgcttccctcctgcttatcaagaccctggatttagctatgggtctgggtccacgggctcacagcagtctgagggctccaaatcaagcggatcaacacgctcctcacgccgcgcccctggacgagagaaggaaagacgggccgccggggctgggggatctggatctgaatctgatcatacggccccctctggtgtagggtcgagctggagagagagacccgcaggccagctcagccgggggtcatcacctagaagccaagctagtgccacagctcctgggctgccaccaccccaccctaccaccaaagcatacacagtggtcggtgggccacctggtggccctccggtccgcgagttagccgcggtgccacctgaactgacagggagtcggcaatcattccagaaagccatgggtaacccctgcgagttttttgtagacattatgtag

SEQ ID NO: 185602 - DNA, 1335 bp, synthetic construct
  misc_feature 1..1335: note = Description of Artificial Sequence: Synthetic coding sequence
  source 1..1335: mol_type = other DNA
atggccgagaccaagatcatctaccacatggacgaggaggagaccccatacctggtcaagttgccagtcgcccccgaacgggttaccctagcggactttaaaaatgtcctttcgaatcgaccagtgcatgcctacaaattcttttttaagagcatggaccaggacttcggggtggtgaaggaagagatcttcgacgacaatgccaagttgccgtgtttcaatgggagagtcgtgagttggctggtactcgccgagggagctcactccgacgccgggagccagggaacagacagccacaccgatctacccccccctctggagcgcacagggggcataggagacagtcgacctccatctttccaccccaacgtcgccagctcccgtgacgggatggataacgagaccgggactgagtccatggtttcccacaggcgcgaaagggcccgacggagaaatcgagaagaggccgccaggacaaacggacaccctaggggcgatcggcggcgtgacgtcggcttaccccccgattcagcctccaccgccctctcttctgagctcgagagttcgagcttcgtggattcagacgaagatggaagtaccagtagactgtcctctagcaccgaacaaagcacctcatccagactcatccggaagtatgcttcaagcctcctgaagcatgggtttttaagacacaccgttaataaaatcaccttttccgaacagtgctactatgtattcggggatctgtgtagcaaccttgctaccctgaacctaaattcagggtcctcaggaacgtcagaccaggataccctggctccgctgccgcaccccgctgctccatggccactaggacagggatatccttatcagtaccctggccctccaccatgcttccctccggcctaccaagaccccggtttctcatatggctcgggatccaccggaagccaacagagcgaaggcagcaaaagctccggcagtactcggtcttcccggcgggcaccaggaagagagaaggagcggagggcggcgggggccggcggcagtggctccgagagtgaccatacggcaccatcgggagtcggttcttcctggagggagcgtcctgctggacagttgagccgtggcagcagtcctaggtctcaagcgtccgccactgcccccggactgccccctccccaccctacaacaaaggcatacaccgtggttggggggcctcccggtggcccccctgtgagggagctggctgcagtcccgccagaattaaccggatctagacagtcttttcagaaggccatgggtaacccgtgcgaattctttgtggacatcatgtag

SEQ ID NO: 185603 - DNA, 2088 bp, synthetic construct
  misc_feature 1..2088: note = Description of Artificial Sequence: Synthetic coding sequence
  source 1..2088: mol_type = other DNA
atggccgagaccaagatcatctaccacatggacgaggaggagaccccatatcttgtcaagctgcccgtggcacctgaaagagtaacactggctgactttaaaaacgtgctctctaatagacccgtccatgcatacaaattttttttcaagtctatggaccaagattttggcgtggtcaaggaggaaatcttcgatgacaacgccaagctcccatgctttaacggccgggtcgtcagttggctcgtgttagctgaaggagcacactcagacgctgggtcccagggcaccgacagccatacagacttgcccccacccctcgagcgcaccgggggcatcggagactctcgtccaccaagctttcatccaaatgtcgcctcctctagagacggcatggataatgagacaggaaccgaatcgatggtatcgcataggagggaaagggccaggcgccggaatcgcgaggaagccgcacggaccaacggacatccccgcggagacaggcgccgcgatgttggactgccacccgactccgctagcacagctctgagctctgagcttgaatcatctagcttcgtggacagtgacgaggacgggtcaacgtctagattaagctcttctaccgaacagtccacatctagtaggctcatacggaaacacaagaggcgacggcggaagcagcgcctgagacaggctgacagggcctcctcctttagcagcatcaccgactccacaatgtcactgaacattgtgactgtgaccctgaacatggaacgccatcacttcctcggaataagcatcgtcgggcaatctaatgaccgcggggacgggggaatttacatcgggagcataatgaagggtggagcagtagccgcagatgggcgcatcgagcccggcgatatgctgctgcaggtgaatgatgtgaatttcgaaaatatgagtaatgatgacgccgtaagggtcctgcgtgaaattgtgtcccagacaggtcctatttccctgactgttgccaagtgctgggatcctacaccccgctcttatttcacagtgccacgtgccgatcctgtcaggcccatcgatccggccgcttggctgagccacacagctgctcttaccggtgccctgcctaggtacggaacatcgccttgttcatctgctgtgactaggacaagttcctcaagcttgacctcttccgtacccggcgctccccagctagaggaagcaccattgaccgtgaagtccgacatgagcgccgtcgttcgcgtgatgcagttacctgactccggactagagatacgggatagaatgtggctcaagattaccatcgcaaacgctgttattggagccgatgtcgtagattggctatacacccacgttgaaggcttcaaggaaagacgagaggctaggaagtatgcttcttcgttgttgaagcacgggtttcttcgccacacagtgaataaaatcaccttctccgagcagtgctactatgtgttcggcgacctgtgcagcaatctggcgacccttaacctgaatagcggctccagcggcacatcagaccaagataccttggctccacttccccacccagctgccccttggccgctgggccaaggatacccttaccaatatcccggtccccctccttgtttccccccagcctatcaagatcccggtttctcatatgggtcaggcagtactgggagccaacagtctgaggggtccaaaagttctggttccacaaggtccagcagaagggcccctgggcgggaaaaagaacgccgtgcagccggtgccggtggcagcggctcagagagcgatcataccgccccgagcggagttggatcttcttggcgcgaacgtcccgctggtcagctctcgagaggaagctcccctaggtctcaggcctccgctacagcccccggactgcctccaccacatcccaccaccaaagcctacaccgtagtgggcgggccaccaggaggccctcccgtacgtgagttagctgctgttcccccagagctgacgggatctcgccagtctttccagaaagccatggggaatccttgcgaatttttcgtcgatattatgtag

SEQ ID NO: 185604 - DNA, 2013 bp, synthetic construct
  misc_feature 1..2013: note = Description of Artificial Sequence: Synthetic coding sequence
  source 1..2013: mol_type = other DNA
atggccgagaccaagatcatctaccacatggacgaggaggagaccccctatttggttaagctgcctgtcgctcctgagagggtaaccttagctgacttcaagaatgtcctttcaaatcgccctgtccacgcatacaagttcttctttaagagcatggatcaggattttggcgttgttaaggaagagatctttgatgacaatgccaaactgccgtgtttcaacgggcgagtggtctcatggctagtactggccgagggggctcactctgacgccggatcacaggggacagacagccacacagaccttccacccccgctggagagaacaggcgggataggggattctagaccaccctcctttcatcccaacgttgccagttcccgcgacggaatggacaatgaaacgggcacagagtcaatggtgtcccatagacgcgagagggcgcgccggagaaatagggaggaggccgccaggaccaacggtcacccgaggggtgacagaaggcgggatgtggggctacctcccgacagcgcgtccaccgccctctcctcggaattggagagttcttccttcgttgacagtgatgaggacggttcaaccagtcgcctatcaagttcgactgagcagagcacatctagcaggctaatcaggaagcacaagagacggaggaggaaacagcgcttgcgccaggccgacagggcatccagcttctcatcaatcaccgacagcaccatgtcattgaacattgttacagtaactctcaacatggagagacatcattttcttggcattagcatcgtgggccagtcaaatgacaggggcgacggtggcatatatattggatcaatcatgaaagggggcgctgtcgccgccgacggtaggattgagcccggtgacatgctccttcaagtgaacgacgtgaactttgaaaacatgagcaatgacgatgccgtccgtgtgctgagagaaatagtttcacagacaggtcccatctctctcacagtggccaaatgttgggaccccactccacgatcttattttaccgtgccaagggccgatcctgtgcgaccaatagatcctgccgcatggttgtcgcacactgcagctcttaccggagcattgcctcgctatgaactggaagaggctcccttgactgtcaagtcagacatgtcagccgtggttcgcgtgatgcaactgccggacagcgggctggaaatccgcgacagaatgtggttgaagatcaccattgctaacgccgtgattggagccgacgttgttgactggctgtacactcacgtggaaggattcaaagagcggcgagaggctcgaaagtacgcttcaagtctactgaaacatggattcctgcgacataccgtcaacaaaataaccttctctgaacagtgctactacgtttttggagatctgtgcagtaacctcgccacactgaacctcaacagtggcagttccggaactagcgatcaagataccttggctccactaccccatccagccgccccctggcctctcggccaaggatatccctaccagtatcccggccctccgccctgttttccgccagcgtatcaggacccgggtttctcatacgggtccggatctacaggatctcagcagtcggaaggcagcaagtcctcggggtccacacgcagctctaggcgggcccctggccgcgaaaaggaacggcgtgctgctggggctggcggcagcgggtcggaaagcgaccataccgccccttctggcgttggcagcagctggagagagcggcccgccggacagttgagcagaggatcctccccccggtctcaggcttcagctactgccccaggcctgcctccaccccatcccacgactaaagcatatactgttgttggcggacctcctggtgggcccccggtgcgggaattagcagcagtgccaccggagttaactggtagtaggcagtcttttcagaaggcaatgggcaatccatgtgagttttttgtagacatcatgtag

SEQ ID NO: 185605 - DNA, 2151 bp, synthetic construct
  misc_feature 1..2151: note = Description of Artificial Sequence: Synthetic coding sequence
  source 1..2151: mol_type = other DNA
atgggcgagaccaagatcatctaccacctggacggccaggagaccccctacctggtgaagctgcctttacctgccgagagagtaacactggccgatttcaagggagtgctgcaacggccaagttacaagttctttttcaagtcaatggatgacgacttcggcgtcgttaaagaagaaataagtgacgacaatgctaagcttccgtgtttcaatggccgggtggttagttggcttgtgagcgcagagggttcgcaccccgatcctgctcctttctgcgctgacaatccttcagagctgccacccccaatggagcgcacgggaggcatcggcgacagcagaccccccagcttccacccacacgcaggcggcgggtctcaggagaatttggataatgatacagagactgacagtcttgtatccgctcagagggagcgaccccggcgccgagatggaccagagcatgccacccggcttaatggaactgcaaagggggaaaggcggcgcgagcccggcggttatgacagttcctccacactcatgtcatcggagttggaaacaacgtcattttttgattctgatgaagacgactccacctcccggttcagctccagcacggagcagtcttcagcctcacgcttgatgcgcaggcacaaaaggagacgccgcaagcagaaggtgagccggattgagagatcctcttcgttctccagtatcactgactctactatgagtttgaacatcataaccgtcacactcaacatggaaaagtacaactttcttggtatctcaatcgtgggccagtcaaacgagaggggggacggagggatttacattgggagcataatgaagggcggggccgtggccgcagacggccgtatcgaaccgggggacatgctcttgcaggtcaatgagatcaacttcgagaacatgtcaaatgatgatgccgtaagagttctgcgagaaatcgtacataagcctggcccaattacgctgaccgtggcaaagtgctgggacccaagtccacgaggttgcttcacgctgccgcgaagcgaaccaattagaccaattgaccctgccgcttgggtctctcataccgcagccatgaccgggacattccctgcttatggcatgagcccttctctgtcgactattacctcaacatccagcagcatcacgtcttcaatccccgacactgagcgtcttgatgacttccatctgtcaatccactcggacatggccgccatcgttaaggctatggcctcaccagaatccggcctcgaggttcgcgaccgcatgtggctaaaaataacaattcctaatgcgtttatcggaagcgacgtcgttgactggctgtaccataatgtagaaggatttactgatcgacgtgaggccaggaaatatgccagcaaccttctaaaggctgggtttatccgtcacaccgtcaacaaaatcacgttcagcgagcagtgctattacatatttggggatctttgtggaaacatggccaatttgtcactgcacgatcatgatgggtcctccggtgcttcagatcaggacacactggctccactcccccacccaggggccgccccatggcctatggcatttccatatcagtatccaccccctccacacccctacaatcctcatcccggattcccagaactaggctatagctacgggggcggctctgcatcatctcagcactctgaaggctctagaagttccgggtcgaatcggtctggatcagaccgaagaaaggagaaagacccgaaagcaggcgactcaaaatccgggggttccggttccgagtctgatcacacaacacgctccagcttgcgtggccctagggagcgggcccctagcgagcgtagtgggcccgccgccagtgagcatagccatcgcagccatcattcactagcctccagtctgcgcagtcaccacacccacccttcatacgggccaccgggagtccctcccttgtacggtccacctatgcttatgatgccacctcccccggccgctatgggacctccaggggctccccccgggcgcgatttagcaagcgtacctcccgagctgacagcttcacgccagagtttccgcatggccatgggaaacccctcagagttctttgtggatgtgatgtag

SEQ ID NO: 185606 - DNA, 2172 bp, synthetic construct
  misc_feature 1..2172: note = Description of Artificial Sequence: Synthetic coding sequence
  source 1..2172: mol_type = other DNA
atgggcgagaccaagatcatctaccacctggacggccaggagaccccctacctggtaaagctccccctgcccgcagaaagagtcaccctggctgacttcaaaggcgtcctgcaaagaccctcttacaaatttttcttcaagagtatggatgacgattttggcgtggtgaaagaggaaatctccgatgataacgctaagctgccttgtttcaacggccgggtcgttagttggctggtgagtgcggaggggtcacatcccgaccccgcccctttctgcgctgataatccgtccgagttgcctcctccaatggagaggacaggaggaatcggtgacagccggcccccctccttccatccccacgcagggggcggatcacaagaaaacctggacaatgatactgaaaccgattcacttgtatcggcccagagggaacgcccgcggcgacgggacgggcccgagcacgcaacgaggctcaacggaacagccaagggagagaggaggcgcgaacccggtggctatgacagtagtagtaccctgatgagttctgaattggagacaacctctttttttgactcagatgaagacgattccacgtctagattcagcagttctactgaacaatctagcgcatcgcggcttatgcgcaggcataaaaggaggcgtagaaagcagaaagttagtaggatcgagagatcgtcctccttcagctctataaccgattcaacaatgagcctcaacattattactgttaccctgaatatggaaaagtataactttttgggaattagcattgttggtcaatccaacgaaaggggagacggcggaatctacatcggctctattatgaagggtggggctgtcgctgccgatgggcgaatcgagccaggcgatatgttgttacaagtaaacgagatcaactttgagaacatgagtaatgatgacgcagtccgtgttctgcgcgagattgtccacaaacccggcccaattacgttgacagttgcgaagtgttgggacccgtcacctaggggctgttttaccctcccacgatccgaacctatacggcctatagatccagccgcttgggtcagccatactgccgccatgaccgggacttttccggcatatggcatgagcccttccctcagcaccatcacatcaacctcaagtagtatcacgtcctctatccctgatacagagagactcgacgattttcacctctctatacactcggacatggccgccatcgttaaggccatggcatctcccgaatcgggactggaagtgcgagaccgtatgtggctgaaaatcactattcctaacgccttcatcgggagtgatgtggtcgactggttgtaccataatgtggaagggtttactgaccgccgcgaagcacgcaaatacgcctcaaacctgctgaaagccggtttcattaggcacactgtgaataagatcacgttcagtgagcaatgttactatatctttggcgatctgtgtggaaatatggcgaatttgtctctgcacgatcacgacgggtcatctggcgcctcggatcaggatacccttgcacccctgccgcacccaggcgctgctccatggcccatggcatttccctatcagtatccccctcctccccacccgtataacccgcaccccgggttccccgaattgggatactcatacggtggcggtagtgcgagcagtcagcattcagaaggctcgcggagtagcggctcaaacaggagcgggtcggaccgcagaaaggaaaaggacccaaaggctggggactctaaatcaggaggcagtggatctgaatcagaccatacaaccagaagctcattgcggggacctagggagagggctccatccgagcgatcgggtcccgcggcctccgagcatagccatcgatcccaccacagcctcgctagctcactcaggagtcaccacacccatccctcttatggcccccccggtgtgccaccgctctatggtcctcctatgctaatgatgccccctccccccgcggccatgggccccccaggggcccctccaggacgggacctggcgagtgtgccgccagagctgactgcttccaggcagagctttcgtatggcaatgggtaatccgtccgaattcttcgttgacgtcatggtcctccggggctggggggcgtag

SEQ ID NO: 185607 - DNA, 2100 bp, synthetic construct
  misc_feature 1..2100: note = Description of Artificial Sequence: Synthetic coding sequence
  source 1..2100: mol_type = other DNA
atgggcgagaccaagatcatctaccacctggacggccaggagaccccttatctcgtaaaacttccgctgccggcggaacgtgtgactctggctgacttcaagggcgtactgcagaggcccagctacaagtttttcttcaaatccatggatgatgacttcggtgttgtgaaggaggagatctcagacgataatgctaaactgccgtgcttcaacggtagggtggttagctggctggtttctgccgaaggatcccaccccgatccggcccctttttgtgccgataatccttcagagctgcctccccctatggaaagaacgggaggaattggcgacagccgtccgccaagcttccacccccacgcaggaggcggatcacaggagaacctggataatgacaccgagaccgactccctggtttcagctcagagggaacgaccaaggcgaagggatgggccagagcatgccacccgactgaacgggacagctaaaggagaaaggcgcagggagcccggagggtatgacagttctagtacgctcatgtccagcgagctggaaaccacatcattttttgactctgatgaagacgacagtacatcccggttttcttcgtcaaccgagcagagttcggcctctcggttaatgcgcagacacaaacgccggcgacgcaaacagaaagtctcacgaatcgaaagaagctcctcgtttagttctatcactgactcaaccatgagcttgaacattatcacagtgactttgaacatggagaagtacaatttcctcggaatcagtattgtggggcagtccaacgagcgaggtgatgggggaatctatatcgggagtataatgaaaggaggtgctgtggccgcagacggtcggatagaacctggagatatgctcttacaggtgaatgagattaattttgagaatatgagcaacgatgacgcagttcgggtgctgcgcgagattgttcacaaacctggcccgataacgctcaccgtggccaagtgttgggacccatcccctagggggtgtttcaccctgccgcgtacaatgactggcacctttcctgcctacggaatgagtccttccctgtccacaataacgtcaacatcatcatcaatcactagctccattcctgacactgaacggctcgacgactttcacctctcaatccacagcgatatggccgcaatcgtgaaggcgatggccagcccggagtcgggacttgaggtgcgggacagaatgtggttgaaaatcacaattcccaacgcgtttattggttccgatgtagtggactggctgtaccacaatgtagaaggtttcaccgaccgcagagaagctaggaaatacgcctcaaaccttttaaaggccggtttcataagacacactgtgaacaagataacgtttagcgagcaatgctactacatcttcggtgacttgtgcggtaatatggctaacctttccttacatgaccacgacggatcatcaggggcttccgaccaggatacgctggctccccttcctcacccaggcgccgctccttggcctatggcgtttccataccagtatccgcccccaccacatccctataatccccatccaggttttcccgaattagggtacagctacggcgggggctcagcgtcatcccagcattcggaagggtctcgctctagtgggagcaaccgtagcgggagtgaccgtcggaaagagaaggatcctaaggcaggcgattctaaatccggaggctctgggagtgagtcagaccacacaacccgttcgagcttgaggggtcctcgagaaagagccccatcggaacggtctggtcccgctgctagtgaacactctcaccggtcacaccactctctggcctcatctctacgctcgcaccacactcacccctcatacggcccccccggcgtcccccctttgtatggacccccaatgttaatgatgcctcctccaccagctgccatgggcccgccgggtgccccacccgggagagatttagcaagtgtcccaccggaactcacagcctcgcgccagtcttttaggatggccatggggaatccatctgagtttttcgttgatgtgatgtag

SEQ ID NO: 185608 - DNA, 315 bp, synthetic construct
  misc_feature 1..315: note = Description of Artificial Sequence: Synthetic coding sequence
  source 1..315: mol_type = other DNA
atgcccgaggcccacatgcagcccgccaagctgcagaccagcctgcccaccacggaccatggcagtaagaaacctgtttcttgttaccttccaccgctctctaacgctcatcccatgtgcatcgaagtgcagaacgcacagaactgtagtagcgccgcggcaaccctagagccaagcataatttctgacacatgcttttacaagcccatcactaaggaccagctcagcagcagaagcgaactgaatacggtgaggctgaagtgtctcaatagccttcggggatggaaaatcctaaatcagctctcactaacgtag

SEQ ID NO: 185609 - DNA, 1437 bp, synthetic construct
  misc_feature 1..1437: note = Description of Artificial Sequence: Synthetic coding sequence
  source 1..1437: mol_type = other DNA
atgggcagccggtggagcagcgaggaggagcggcagcccctgctgggaccagggcttgggcccggactaggagccagctggaggagcagagaagcagcggcagctgcactgcccgccgccgtccccggcccaggccgggtttatgggagacggtggctggtcctgctcctatttagtctgctggcgttcgtgcaggggctggtctggaacacgtggggccccatacagaactctgcccggcaggcttatgggttttctagctgggatattgcgctactggttctgtggggacctatcggattcctgccgtgctttgctttcatgtggttgctggacaaacgggggcttcggatcacagtcctgcttacttccttcctgatggtcctgggaaccggtctgcggtgtattcctatctctgacttaatcttgaaacgaaggctgatacacggtggtcagatgctcaacggactagctggccctaccgtgatgaacgcggctcccttcctgtcaacaacctggttttcagcagatgagcgagccaccgccacagcaatagcttctatgttgtcctacctggggggcgcgtgtgccttcctggtgggccctctcgtagtgccagccccaaacgggaccagccccctcctggcggcagaaagttcaagagctcatatcaaagatcggatagaagccgtcctctatgctgaatttggtgtcgtgtgcttgatctttagtgctacactagcatatttccccccaagacctcctttacccccaagcgtagccgctgcaagtcagcggctaagctaccggaggagtgtctgtaggctactcagcaacttcagattcctcatgatcgccctagcctacgccatcccccttggggtgttcgcaggttggtctggcgtgctggatctgatactgaccccagcgcatgtctctcaggtggacgctggttggataggcttctggagcatcgtgggcggatgtgtcgtcgggatcgccatggccagattcgctgacttcatacgcggcatgcttaagctgattctcctgttactgttctccggagcgacgctgtccagcacttggtttacccttacctgtctaaacagcattacccacctgcctctgaccaccgtaacgctctatgccagctgtatcctgctcggagtgttcctgaattcttcagtgcctatcttctttgagctcttcgttgagactgtctaccctgtaccggaaggcattacctgcggcgtggtcactttcctctcaaatatgttcatgggcgtgctgttattcttccttacattttatcatacagagctgtcctggttcaactggtgtctgcctggttcatgcctcctgagtttactcctgattctctgcttcagggagtcttacgaccgcctgtatctcgacgtcgttgttagcgtctag

SEQ ID NO: 185610 - DNA, 1644 bp, synthetic construct
  misc_feature 1..1644: note = Description of Artificial Sequence: Synthetic coding sequence
  source 1..1644: mol_type = other DNA
atgcccggcggcggcccccagggcgcccccgccgccgccggcggcgggggagtcagccaccgggctggctcacgggattgcctgccacccgccgcctgttttcgacgaaggaggttggcaaggaggcctgggtatatgcgatcttctacaggacctggaatagggtttctctcgcccgctgttggaacactattccggtttcccggaggcgtgagtggggaggagtctcaccatagtgaaagtagagctagacagtgtggtctagactcccgtggcctgctggttcgctcaccagtttcaaagtccgctgcggctcccaccgtcaccagcgtccgaggcacaagcgcccacttcgggatacaactgagaggcgggactcgactccccgaccgtctgtcgtggccctgtggcccaggatctgctgggtggcagcaggaattcgcggcgatggattccagtgagacactggatgcctcatgggaggcagcgtgctctgacggagctcggagggtgcgcgcggctggaagcctgccctctgctgaactaagttctaactcttgctctccaggatgcggtcccgaggtaccaccaacacccccaggatcgcatagcgcgttcacctcctctttcagtttcattagactgtccctggggagtgcaggagaaaggggagaagccgagggatgtcccccatcacgtgaagcagaaagccactgtcaatcacctcaggagatgggggcaaaggcagcatctctggatggaccacacgaagacccccggtgtttgagcagaccattctccctgttggcaacacgagtgtctgccgatctcgctcaggctgccaggaattctagccgcccggagagagacatgcacagtctgcctgatatggatcccggatcttccagtagcctggacccatctctggcaggatgtgggggtgacgggtcctcaggatctggagacgcacatagctgggacactctgttacgcaagtgggaacccgtgctcagggactgcctgttacgtaaccggcggcagatggaagtaatttcactacgcctcaagctccagaagctgcaggaagacgctgtcgaaaatgatgactacgataaagctgagacactccaacaacggctggaggatctcgagcaggaaaagatctctctgcactttcagctgccttcacgccagccagccctgagtagcttcctgggacatctggccgcccaggtgcaggccgcactgaggcgcggcgccacccaacaagcgtcaggggatgatacacatacccctctgagaatggagccaagactgctggaacctaccgcccaggattctctacacgtttctataactagaagggactggcttttgcaggaaaaacagcagcttcagaaggagattgaggccctgcaagcgcggatgtttgtgcttgaggcaaaggatcagcagttaagacgtgaaattgaggaacaggagcagcaactccagtggcagggttgcgacctaacccctctcgttggacagttatccctcggccaactgcaggaagtgtccaaggctttgcaggataccctcgcgagcgctggccaaatccccttccacgcggaacccccggaaaccatccgtcggtgcgtctag

SEQ ID NO: 185611 - DNA, 1110 bp, synthetic construct
  misc_feature 1..1110: note = Description of Artificial Sequence: Synthetic coding sequence
  source 1..1110: mol_type = other DNA
atgcccggcggcggcccccagggcgcccccgccgccgccggcggcggtggcgtctcgcaccgtgcaggatctagggactgcctccccccggccgcctgtttcaggcggagacggctagccaggcgtcccgggtacatgcggtctagcaccggccccggtatcgggttcttatctccagctgtggggactttgttccggttcccaggaggagtgtcaggggaggagagccatcactctgagtcaagagccagacaatgcgggctggatagtcggggcttgctcgtccggagcccagtcagcaaaagcgccgctgctcctactgtcacaagcgtgagagggacctcggcacactttggcatccagctccgcggcggaacgcgactgcctgatcgtctgagctggccctgcggtccaggctccgctggctggcagcaggaattcgccgccatggattccagtgagacacttgatgcctcatgggaggccgcctgcagtgacggcgctcggagggtccgggcggctggatctttaccctctgccgagctgtcatctaactcctgcagccctggctgcggcccggaagtaccccccacacctcctggatcccattcagcattcacctcctcatttagtttcatccgcttgagcctcgggtctgctggagaaaggggagaggcagaggggtgtccaccaagtagagaagccgagtctcactgtcagagcccccaggaaatgggagctaaggcggccagcctcgatggccctcacgaagacccccgttgcctatcgcgccccttttccctgctggccactcgcgtgtccgcagatctggctcaggctgctcgaaactctagcagacctgagcgcgatatgcacagcctccctgacatggaccccggaagttcaagttctttggatccttcactcgccgggtgtggcggggacgggagctctggtagtggtgacgcacactcatgggacaccctgcttcgcaagtgggagcccgtgctccgggattgccttctgcgtaataggagacagatggagcttgagcccatagctctggacccaccgtggaagcctagacacccagagccaaactcctattag

SEQ ID NO: 185612 - DNA, 717 bp, synthetic construct
  misc_feature 1..717: note = Description of Artificial Sequence: Synthetic coding sequence
  source 1..717: mol_type = other DNA
atggacagcagcgagaccctggacgccagctgggaggccgcctgctctgacggcgcccgtagggttcgcgccgctggcagcctaccctccgccgagctgagttcaaactcttgttccccaggatgcggcccagaagtgcctccgacccctcccggttctcactccgcctttacctcatcctttagtttcatcagattgtcactggggagtgccggcgaacggggagaagctgaaggatgccctccgagtcgagaagccgagagccattgccagtccccccaggaaatgggtgccaaagccgcctcactggacgggccacatgaagaccctcggtgtctttcaagaccatttagtctacttgcaacccgagtgtcagctgacctggcacaggctgctagaaattcctcaagaccagaacgggacatgcactcgctcccggatatggatccaggatcctcttcttcattagatccttcattggccgggtgtggcggcgacggcagctcaggctctggagacgcgcactcgtgggacaccctgctccgtaaatgggaacctgtcctgcgggactgcttactaagaaatcgaaggcagatggaggttatttcattgcggctgaaacttcaaaagctgcaggaggatgccgtggagaatgacgactacgacaaagcggggacgaactgcttcgggtcaacgatggaggcatctaccagctag

SEQ ID NO: 185613 - DNA, 2268 bp, synthetic construct
  misc_feature 1..2268: note = Description of Artificial Sequence: Synthetic coding sequence
  source 1..2268: mol_type = other DNA
atgcccggcggcggcccccagggcgcccccgccgccgccggcggcgggggagtgtctcatcgcgccgggtcccgggattgtcttccaccggcagcctgtttcagaaggagacgtttagctcggagacccggctacatgcgctcaagcaccgggccaggaattggatttttatcaccggctgtggggacacttttccgctttcctggaggcgtgagtggagaggagtcccatcactccgagtctagagcaaggcagtgtggcttggattctaggggactcctggtgcgctctccggtaagcaaatccgccgcagcacctaccgtgactagcgttaggggaacttctgctcatttcgggatccaactccgtggggggacacggttgccagaccgcctgtcatggccttgcggtcccgggtctgctgggtggcagcaggaatttgcggctatggactcctcagagacactagatgccagttgggaggccgcatgttccgacggcgcaaggcgcgtgagggcggccggatccctcccaagtgcggagttgtcgagcaattcgtgctctccaggatgcgggcctgaggtacctcctaccccccctgggtcccattcagcttttaccagcagtttttctttcatccgactatctctgggtagcgctggggagcgcggagaagcagagggttgcccccctagtagagaggctgagtctcactgccagtccccacaggagatgggggccaaagctgcttcccttgatggaccccatgaggacccaaggtgtctatctcggccctttagtttgctggccacccgagtcagcgctgatctagcccaggcggcacgtaactcatcacgtccagagcgggatatgcactccttgcctgatatggatcccggatcgtcatcctccttagacccatccctggcgggttgcggcggagacggtagtagtggctccggagatgcacattcttgggataccctattacgaaaatgggaaccagtgctgcgggattgtctcctcaggaatcggcgtcagatggaggttataagcttgaggctcaagttgcagaagctgcaggaggacgccgtggagaatgacgactatgataaggccgaaaccttgcaacagagactggaggaccttgagcaggaaaaaataagtctgcacttccagctgcctagcaggcagcctgcgctttcatcctttttgggacatctggctgctcaagtgcaggccgccttgcggcggggcgccactcagcaggccagtggcgatgacactcatacccccctacgaatggaaccacggcttcttgagcctacagctcaggactctctacacgtctcaattacgcggcgtgattggttactccaggaaaaacagcagctccaaaaagaaatcgaagccctgcaggctcggatgttcgtcttggaggctaaggaccagcagcttcgccgagagattgaggaacaggagcaacaactgcagtggcaagggtgtgatctgaccccccttgtcggccagctgtcacttggacagcttcaggaggtcagtaaggccttgcaggatacgctcgccagcgcaggtcagattccctttcacgctgagccccccgagactatacgtagcttgcaggagcgcatcaagagcctcaacctcagcctgaaggagatcacaactaaagtgtgcatgagtgaaaagttttgtagcacactaaggaagaaggttaatgacatcgaaacgcagctgcctgcattgctggaagcaaaaatgcatgccattagcggcaaccacttctggacagctaaagacctgactgaggagatcagatctttaacctcagagcgggagggtctggaaggattattatcaaagttgctcgtgctgtctagtcgcaatgtaaagaagctaggaagcgtaaaggaagactataacagattgagacgagaagtcgaacaccaggaaacagcctatgacggggtctcgctgtgccgacctgtttggtccgccgtcgtaaggagctgcagtttgcaacctttgccgccagagttcaaacaattcagctgtctttcgttgagatctagctgggattaccgatgtccccctccctgtttggctaactttgtgttcttagtcgaaatgggattttaccatgtcgaccaaacaggcctgaaactacttacgagctcagacccgccaagttctgccagtcagagcgcaggaattacggatatgagccattgcgcctggccactgcagtag

SEQ ID NO: 185614 - DNA, 2037 bp, synthetic construct
  misc_feature 1..2037: note = Description of Artificial Sequence: Synthetic coding sequence
  source 1..2037: mol_type = other DNA
atgcccggcggcggcccccagggcgcccccgccgccgccggcggcgggggggtcagccacagggcaggcagccgcgattgtcttcctccagccgcctgcttccgccgtcgcaggctcgcccgtcgtcccggatatatgagatcctctacggggcccggcattgggtttctcagcccagctgttgggaccctcttcagattccctgggggcgtctctggagaagaatcacatcattctgagagtagggcccggcagtgtgggcttgattcacgaggactgctcgtgcgaagccccgtcagcaagtctgcagctgctcccactgtgacatcagtgcggggcacgtccgcacactttggtatccagcttagaggaggaacccgattgcctgaccgtctgtcatggccgtgtggccctggctcagcggggtggcagcaggaatttgccgcgatggattccagtgagacactagacgctagttgggaggccgcatgctcagatggtgctagacgtgtgcgagctgcaggctcactccccagcgccgagctgtcctccaacagctgttctccaggctgtgggccggaagtacctccaacgccacctgggagccattccgcctttacatccagctttagcttcatcagactgagtctgggcagcgccggcgaaaggggtgaggctgagggttgccctccctcgagggaggctgagtctcactgtcaatccccacaggagatgggtgctaaggcagctagcctggatggcccacatgaagaccctcggtgcctgagccgtccattctcgctcctggcgacaagggtctccgcagacctcgcacaggccgctcgaaactcaagtcgacccgagcgggatatgcacagtctccccgatatggatccggggtcttccagcagtctggatccttctctggcaggctgtggaggtgacggcagttccgggtcgggagatgcccacagttgggatactctcctgcgaaagtgggagccagtcttgcgagattgcttactccgcaaccggagacagatggaggtaataagcctccggttgaaattgcagaaacttcaggaagacgccgtggaaaacgatgactatgataaagctgaaactttacagcagcggttggaagatctggaacaggaaaagatatctctgcatttccaattgccctctcgacagcctgctctgagctcctttcttggtcatctggccgcccaggtgcaggcagccctgcgcaggggagcaacacagcaggcaagtggtgacgacacccatacccctctccgaatggaacctcgcctgctcgagcctacagcccaggacagtctacacgttagcatcacccggcgggactggctgctgcaagaaaagcaacagcttcagaaggaaatagaggcactgcaggcccgtatgtttgtcctggaagctaaggaccaacagctacggcgagagatcgaggagcaagaacagcagctgcagtggcaaggatgtgatttgacacccctcgtcggtcagctctcactgggccagttacaggaagtgagtaaagccctgcaggataccctggctagtgcaggacagatccctttccatgccgagccaccagaaactatccgcagtcttcaggagaggatcaagagccttaatctgtcactgaaggagataacaactaaagtctgtatgagcgagaagttctgctcgaccctgagaaaaaaggtgaatgatatcgagactcagctacctgcactcttagaggccaaaatgcacgcaatctctgggaaccatttttggaccgcaaaggatttaaccgaagagatacggagccttacatcagagagggaaggactggaaggcctcttgtctaaactcttggtcttaagtagccggaatgtgaaaaagctgggttctgtcaaggaagactataacaggttgcgcagagaagtggaacaccaagagactgcttacgggtataagtactgtgacgccgagtcttggacccagagaagccagcagctggcttag

SEQ ID NO: 185615 - DNA, 2499 bp, synthetic construct
  misc_feature 1..2499: note = Description of Artificial Sequence: Synthetic coding sequence
  source 1..2499: mol_type = other DNA
atgcccggcggcggcccccagggcgcccccgccgccgccggcggcggcggtgtgtctcaccgcgccggttcccgcgactgtttgccacctgccgcatgtttcaggagaagacgcctcgcccgcaggcctgggtatatgcgatcctctacaggacccggaataggctttctctcaccagccgtgggcacattattccggttccctggcggggtttctggcgaagagtcccaccattccgaaagccgagctcggcagtgcggacttgattcacgtggactgctggtacgcagtccagtctctaaatccgcagccgccccaacagtgacttccgtgaggggcactagcgcccatttcggcatccaactgaggggcggcacgcggctgcctgatcgcctgtcgtggccttgcggccccgggtcagctgggtggcagcaggagtttgccgctatggattcctccgagacgctggacgcgtcttgggaagcagcctgctctgatggagcacggagagtgagggccgctggaagtcttcccagcgccgaactttccagcaactcttgctctcctggctgcggcccagaggttccacccacgcctcccggatcgcattccgccttcaccagctcattcagcttcattagattgtccctgggctcagctggagagcggggcgaagcagaaggctgcccaccctccagagaggctgagtctcactgtcaatcaccccaggagatgggcgcgaaagcagccagtctggacggcccccacgaggatccacggtgcctttctcgccccttctccctgctggcaacacgggttagtgcggacctggcacaggcagcgaggaattcatcaagacccgagagagatatgcactcacttcctgatatggatcccggatcatctagctcactggacccttccctggccggctgtggtggagacggttccagtggaagtggggacgcgcattcctgggacacactgctccgtaagtgggagcctgtgctacgcgactgtctgctgagaaacagacgccaaatggaggtcatctcgttacggctgaagttgcaaaaactgcaggaagacgccgtggagaacgatgactatgataaagccgaaacattacaacagagattggaagatctggagcaggagaagatttccctgcatttccagctcccaagtagacaacctgctctcagctcatttctgggacatttggccgctcaagtgcaggccgcgctccgtcgtggggccacccagcaagcctcaggtgacgatactcatacgccactgaggatggaacccaggctactcgagccaactgcacaggacagcctgcacgtcagtatcactcggagggactggctgctgcaggaaaagcagcaattgcagaaggagatcgaagccttacaagctcgaatgttcgtgcttgaggcaaaagatcagcagctccgcagggagatcgaggagcaggagcagcaactgcaatggcagggctgtgatctcacaccactggttggccagctgagtctgggccagctgcaagaagtgtccaaagctctgcaggatacccttgcatcagctggacaaatcccttttcatgccgagcccccggaaacgatccggtccctgcaggaacgaataaaatcgctcaatctctctctcaaggaaatcactactaaagtctgcatgtctgagaaattttgcagtactctgaggaaaaaagtgaacgacatcgagacacagcttcccgcactgcttgaagctaagatgcatgcaatttccggtaaccacttttggacagctaaggatcttactgaggagatcaggtcgctcaccagcgagcgagagggattagaggggctgctttcgaagctgctggtgctctcatctcgaaacgttaagaaactggggtctgtcaaagaagattacaatcgcttacgaagggaagtcgagcaccaggaaacagcttacgaaacatcagtgaaagagaacaccatgaaatacatggagactctgaagaacaaactgtgtagctgtaaatgtcccttgctgggtaaggtctgggaagccgacctggaagcttgccgcctgctcatacagagcctgcagctgcaggaggcccgtggctcacttagcgttgaggatgagcgtcaaatggacgaccttgaaggtgcggcaccaccaatcccacccaggctgcacagcgaagacaagagaaaaacaccattgaaggagtcctacatcctgtcggcagagctcggtgagaaatgcgaggacattgggaaaaagctgttgtatttagaagaccagctccacactgctatacattcgcatgatgaagacctgatccactctctgaggagagagctccagatggtgaaggaaacccttcaggcaatgattctgcagcttcagcctgcaaaggaagcaggcgagcgtgaggccgccgcgtcgtgcatgaccgccggcgtacatgaagctcaggcatag

SEQ ID NO: 185616 - DNA, 2661 bp, synthetic construct
  misc_feature 1..2661: note = Description of Artificial Sequence: Synthetic coding sequence
  source 1..2661: mol_type = other DNA
atgcccggcggcggcccccagggcgcccccgccgccgccggcggcggtggggtgtcacacagggctggctccagggactgcctccctcctgccgcatgcttcagaaggaggcgtctagcaaggcgccctggctatatgcggagtagcaccggccctggtattggtttcctttcccccgccgttgggaccttatttagattcccaggcggcgtaagtggggaagaatcacatcattctgaatcgagggcacgccagtgcggcttagactcgcgtgggttgctggtcagatcacccgtcagtaagtcagccgccgctccaaccgttactagcgttagaggtacaagtgcacattttggcattcagctgcgtggtggtacgcgcctacctgatcgtctgtcttggccttgtgggccaggctctgccgggtggcaacaggaattcgctgccatggactcttcagagactctggatgcctcctgggaagcagcttgctccgacggtgcacgacgggtcagagccgcagggagcctgccatccgcggagctttccagcaacagctgcagtcctggctgtggaccagaggtaccccccactcctccaggaagtcactcagccttcacttctagcttttcttttatccgcctgagcctgggctctgccggtgagaggggcgaggcagaggggtgccccccaagccgagaagctgagtcccactgccagtctccacaggaaatgggcgccaaggctgcctctttagacggcccccacgaagacccgcgctgcctatcccgtccctttagcctgctggcgactagggtgtctgccgaccttgcccaggcagccagaaactcttcacgcccggaaagggacatgcactccctgcctgatatggacccaggctcaagtagtagccttgacccatcactggccggctgtggcggcgacggcagttccggctctggtgacgcacacagctgggatacactcctgcgcaaatgggagccagtccttcgcgattgtctcctgaggaatagaagacagatggaagtcatatctctgcgtctgaaactccagaagcttcaggaagacgctgtcgagaatgacgattacgataaggtcgagacaggctttcattatgtgggacaagcaggtctcgaactgctcaccagctcaaaccctcctgcaagcgcatctcaaagtgccgggataaccgcggagaccttgcagcagaggctagaggacctcgaacaagaaaaaatctccctgcactttcagctccctagtagacaacctgccctgtcttcttttctcgggcacctggctgcacaggtgcaggcagcactgcggaggggagccacacaacaggcaagcggagatgacactcataccccactgagaatggaaccacgactactggagcctaccgcgcaagactcccttcacgtgagcattacaaggcgcgactggctgctgcaagaaaaacaacagctacagaaggagattgaagccctgcaggctaggatgtttgtccttgaggcaaaagatcagcagttgaggagggaaatcgaagagcaggagcaacaacttcagtggcaggggtgtgatttaacaccactggtgggacagctgtccctggggcagctgcaggaggtaagtaaggcattgcaggataccttggctagcgccggtcagataccattccacgcggaacctcctgaaacgattagatcactgcaggagaggatcaaaagtctgaacctgagcctaaaggagattaccaccaaggtgtgtatgagcgagaagttctgctcaaccctgcgcaaaaaggtgaacgacattgaaacccaacttcccgccttgctggaggctaaaatgcacgctatatccgggaaccacttttggacagccaaagacctgacagaggagattaggagtctcaccagtgaacgggaggggcttgaaggactcctttctaagctgctggtgctgagttcccggaacgtgaagaaactgggatctgtaaaagaggactataacaggctgaggagggaggtggaacatcaggaaactgcttatgaaacatccgtaaaggaaaataccatgaagtacatggaaacgctaaagaacaagctctgtagctgcaagtgtccactgcttggtaaagtgtgggaggctgatctcgaagcatgccgcttgcttattcagagcttgcagctccaagaggccagagggagcctcagcgtcgaggacgagcgacagatggatgaccttgaaggggctgcccctcccatccccccccggctgcactctgaggacaaaagaaagactcctctgaaagtcctggaggagtggaagacacatctcataccctcactccactgtgccggcggagagcaaaaagaggaatcatatattctgagtgccgagctcggagaaaagtgcgaagatattggaaagaaattactgtacctggaggaccagttacatactgctattcactcccatgacgaggatctcattcattccctccgccgcgagctgcagatggtgaaggaaactctgcaggccatgattctccagttgcagccggcgaaggaagccggagaacgcgaggcagccgcatcatgtatgaccgctggtgtgcatgaggcccaagcctag

SEQ ID NO: 185617 - DNA, 621 bp, synthetic construct
  misc_feature 1..621: note = Description of Artificial Sequence: Synthetic coding sequence
  source 1..621: mol_type = other DNA
tgaaaccacttctggaccgccaaggacctgaccgaggagatccggtcgctgacatcggagagggaaggcttagaagggctcctttcaaagctgctggtcttgtctagcaggaacgtcaagaagctcggcagcgtgaaggaagactataaccgcctccggcgtgaagttgagcaccaggaaacagcttatgagacatccgtcaaggagaacaccatgaagtacatggaaacactcaagaataaactgtgtagctgtaagtgccccctcctaggtaaggtgtgggaagccgaccttgaagcgtgccggttgctcattcagtcccttcagcttcaagaggcaagaggatctctgtcggtcgaagatgagcggcagatggacgaccttgaaggcgcagctccgcctattcctccccgactgcactcggaagacaagagaaaaacaccgctgaaagtgttggaggaatggaaaacacatttaataccaagtctgcactgtgccggtggagagcaaaaagaggtgtgcccattccatatggccagtcggggggacccttactccaagggttgtttcggcaccatgctgcagatgggtacaataaacattggtaaggcatcccactag

SEQ ID NO: 185618 - DNA, 279 bp, synthetic construct
  misc_feature 1..279: note = Description of Artificial Sequence: Synthetic coding sequence
  source 1..279: mol_type = other DNA
atgaagtacatggagaccctgaagaacaagctgtgcagctgcaagtgcccgcttcttgggaaggtctgggaggccgacctggaggcatgtcgtctgctcattcagtcactccagctccaggaggctcgcggctcattgagcgttgaagacgagcgtcagatggacgacctagagggagcagctccgccgatcccccctcggctgcattcggaggataaaaggaaaacccccctgaaggtcctggaggagtggaaaactcacctcataccatctctctag

SEQ ID NO: 185619 - DNA, 2565 bp, synthetic construct
  misc_feature 1..2565: note = Description of Artificial Sequence: Synthetic coding sequence
  source 1..2565: mol_type = other DNA
atgcccggcggcggcccccagggcgcccccgccgccgccggcggcgggggagtgagccacagagccggctcacgggactgcttaccgccagctgcctgtttcaggagaagaagactcgctaggcgcccaggttatatgcgttcctctacagggccaggcataggcttcctgtcccccgctgtaggaaccctgttccggtttcctggaggggtttccggagaggagagtcaccattctgagagccgggcaaggcaatgcggattggacagtaggggtttgctggttaggtcccctgtctctaagtccgcagccgccccaaccgtcacgtccgttagaggtactagcgcccacttcgggattcaacttcgggggggcacccgcctgccagataggttgagttggccatgtggccctggtagcgccggatggcagcaagagtttgccgccatggactcctccgagacactggatgctagttgggaggctgcctgctcggatggggcacgccgggtgcgtgccgcgggctctctgccaagtgcggaacttagctccaactcttgcagcccggggtgtggccctgaggtgccccccactccccccggttcccactctgccttcacgagttccttttcattcattcggctttcacttgggtccgcaggcgagaggggcgaggcggaaggctgccctccgagcagggaagcagagagccactgtcagtctcctcaggaaatgggagccaaggcggctagcttggacggccctcacgaggacccccgctgtctatccaggcctttttctctgttagccactcgagtttccgctgatctcgcccaggcagctagaaattccagccgccctgagcgagatatgcactctttacccgatatggaccccgggagtagctctagcttagatccatccctcgccggttgcggtggggacggtagcagtggaagtggcgatgctcattcctgggacaccctcttgaggaaatgggaaccagtcctcagagattgtctgcttcgcaaccggcggcagatggaggtgattagcctgcgcttgaagcttcaaaaactacaggaagatgcagtggagaacgatgactacgataaagcagagacccttcagcaaagacttgaggaccttgagcaggaaaaaatatctctccattttcagctaccaagcagacagccagctctctctagcttcttaggacaccttgcagcccaggtccaggccgcacttcgcaggggcgcaacccaacaggccagtggggatgatactcacacgccattacgtatggagccgaggctcctcgaacccaccgctcaagactccttacatgtgagtatcacgaggcgggattggctgcttcaagagaaacagcagcttcaaaaagagatcgaggcccttcaggcacgaatgttcgttctggaggcaaaggaccagcagttgcggcgtgaaatcgaggaacaagagcagcagctgcagtggcaggggtgtgacttgacccctctagtcggacagctaagtctcggccagctgcaggaagtttccaaggctctgcaggacacattagcctctgcaggccagatacccttccacgccgagcccccagagactatccggtctctgcaggagagaattaagagcctgaatctgagtctcaaggagatcaccacaaaggtctgtatgtccgaaaagttctgtagcaccttaaggaagaaggtaaacgacatcgaaacacagctgccagcgctccttgaggcaaaaatgcatgccattagcggcaatcatttttggaccgcaaaggaccttaccgaggagattaggagtctcacgtccgaacgggaaggcctagaaggtctactgagcaaattgttagtgctgtccagcaggaatgtcaagaaactggggagtgtcaaagaagactacaatagactccggagggaagttgaacaccaggagactgcttacgaaacctctgttaaggagaacaccatgaagtacatggagactctcaagaataagctgtgcagctgcaaatgtcctctcctgggtaaggtctgggaggctgaccttgaggcatgtagactgttaatacaatccctgcagcttcaagaggctcgtgggtccctgtccgtggaagatgagcgacagatggacgacctcgaaggggctgccccccccattccccctcggttgcacagtgaagataagcggaagaccccactgaaggtcctggaggagtggaaaactcatctaattccttccctccattgtgccggaggtgagcagaaggaagagagctacatcttgtctgctgagctgggagaaaagtgcgaagacattggaaagaaactcctttacctagaggaccagctacacacagctatccacagccacgacgaagatctgattcattccctccggcgagaactgcagatggtgaaggagacactacaggctatgatactgcaattgcagcctgccaaggaggccggcgagagagaagccgctgcatcctgcatgactgctggagtgcacgaggctcaggcctag

SEQ ID NO: 185620 - DNA, 2199 bp, synthetic construct
  misc_feature 1..2199: note = Description of Artificial Sequence: Synthetic coding sequence
  source 1..2199: mol_type = other DNA
atgcccggcggcggcccccagggcgcccccgccgccgccggcggcggcggcgttagccatagagctggctctcgggactgtcttcctccagctgcctgctttcgcaggcgtcgtctagcgagaaggccagggtatatgcggagcagcaccggacctgggatcggctttttgagtcctgcagttgggacattattcaggtttccaggcggcgtgtccggggaggagtcacaccattcagagtcacgggccaggcaatgtggattggactctagaggcctgctggtcaggtcaccagtttctaagagcgcagctgcccccaccgtgacctctgtccggggtaccagcgcccatttcggcatccaactgcgcggtgggactcgcctgccggatcggctttcatggccttgcggtccaggttcagcaggctggcaacaggaatttgccgccatggacagttcggagactctggacgcttcgtgggaagctgcatgcagcgacggagctcggcgcgtaagagccgccgggagcctgccaagtgccgaattgtcaagcaacagctgctcacctggctgcggccctgaagtgcctcctaccccgccgggatcacactccgcatttacctcatccttcagtttcatccgcttatccctcggctctgccggagagagaggggaagctgaaggttgtcccccctccagggaagcagagtcccattgccagtcaccccaggaaatgggagccaaggccgccagcctggacggcccacacgaggatccacgctgtctctctcgaccattcagcttgctggccacccgggtgagtgccgatctggcccaagccgcacggaactcttcacggcctgagcgagacatgcacagtctccctgacatggatccgggtagtagtagttccctggatccatccctggcggggtgcggaggcgatggatctagtggtagcggtgatgcccattcttgggacacactgctgcgtaagtgggaacctgtgctgagagactgccttctgagaaacagacgtcagatggaggtgatttctcttagactgaaattgcaaaagctgcaggaagatgcagttgaaaacgacgattatgataaagctgaaacgctccagcaacggttagaggatctggagcaggagaaaatttccctgcacttccagctgccaagcaggcagccagccctaagctccttcctgggccatctggctgcacaggtgcaggcagctctgcgtcggggtgctactcagcacctgcaggagcgcatcaaatcgttgaatctctccctcaaagagatcacaaccaaggtatgcatgtccgagaagttctgtagtacgctccggaaaaaagttaacgatattgagacacagctccccgccctgctggaggctaagatgcatgctatttccgggaatcacttctggacagctaaagatttaacagaagagattcgcagtctgacaagcgaaagagaaggactcgaggggctcctgtccaaactgctagtgttaagttcgaggaacgtcaaaaaactaggaagtgtgaaggaggattacaatcgcctgagacgtgaagtcgagcatcaggagacggcatacgaaacatctgtgaaagaaaataccatgaagtatatggaaactctcaaaaataagctctgctcctgcaaatgtccccttctggggaaggtgtgggaggctgatctcgaagcctgcagacttctaatccagtcgctgcaactccaggaagctagaggcagtttgtccgtcgaagatgagagacagatggatgatttggaaggagccgctcctccaatcccgccacgtctccatagcgaggataagcggaaaacaccattgaaagttcttgaagaatggaaaacacatctcatccccagtctgcactgcgccggcggagagcagaaggaggagagttatattctttctgcagagttaggtgagaagtgtgaggacattggcaaaaaactcctgtatctggaagaccagctgcatacagccatccactctcacgatgaagatcttatacacagtcttagaagggaactccagatggtgaaggaaaccctgcaggcaatgatcctgcaacttcagccagctaaggaggcaggggaaagggaggccgctgcctcttgcatgacagcaggtgtgcacgaagcacaggcctag

SEQ ID NO: 185621 - DNA, 1830 bp, synthetic construct
  misc_feature 1..1830: note = Description of Artificial Sequence: Synthetic coding sequence
  source 1..1830: mol_type = other DNA
atgcccggcggcggcccccagggcgcccccgccgccgccggcggcggtggagtaagtcaccgggcagggagtcgcgactgcctccctcctgcggcctgcttccgtaggcggcgtttggctcgcaggcccgggtacatgcgctcttcgactggacccggtattgggttcttgtctccagccgtgggcaccctgtttcgctttccagggggggtgagtggagaggaaagccaccacagcgagtctcgcgcacgccaatgtggcctcgatagtcgtgggctgctggtgaggtcccccgtatcaaagagtgcagctgctcctacagtcacttccgtcagaggcacatccgcccatttcggaattcaattaagaggcggtacccgtcttcccgaccggttaagctggccttgcggtcccggcagtgcaggatggcagcaggagttcgcagccatggattcatctgagacactcgacgcttcatgggaagccgcctgctcagatggcgccaggcgggtgagagcagccggatctttgccatccgctgaactgtcaagcaacagctgctcacccggctgtggacctgaagtgccacccacacctcccggctcccactccgcttttacctcaagcttcagcttcatcaggctgtctttggggtcagcaggagaacgcggagaagcggaggggtgcccgccctccagagaggccgaatcacactgccagtctccccaagagatgggagctaaagcggcctcactggacggtccgcacgaggatccacgttgtctgtcccgacccttttccctgctggcaactcgggtgtctgccgatttagcccaggcagctaggaactcgagtcggcccgaacgtgatatgcacagcttgcccgatatggacccaggatcatccagtagcctcgacccctctcttgccggatgcgggggggatgggtcctccggtagcggggacgcgcatagctgggacactctcctgcgaaagtgggagccagttctgcgggactgtttactgcgaaaccgtagacagatggaagttatatcattaagactgaagctgcaaaagttacaggaggacgccgtcgagaacgacgattacgataaggcagagactctgcagcagagactcgaagacttggagcaggagaagatcagcttgcacttccaacttcctagtcgacaacccgccttgtctagtttccttggacacttagctgctcaggtacaggccgctctgagacgcggcgctacacagcaagccagtggagacgacacccacactcccctgagaatggaaccaagactcctggaacctactgcccaggatagcttacatgtgtcgatcacccggcgcgattggctccttcaggagaaacagcagctccagaaagagatcgaggcactccaagcacgcatgtttgttcttgaggcaaaggatcaacagctgcgtagggagatcgaggagcaagagcagcaactccagtggcaggggtgcgaccttacccctctcgtgggccaactctcccttggccagctccaggaagtcagtaaagcacttcaggacacactggcttccgcaggtcagatacctttccacgcagaacctcccgagacaatccggcgagaggtgcgccaccagaccgctccctgtagaaatcaccaacttgagaaacccgtgatcaacatctgggcctttcacctgagaagaaaaatctgtttgtttcaggcggacgggctccagcatggcagcgcagaagtgaaacatctgaaagaaacctctgtggagcccgctggaagtactgcctcccgcaaggagtag

SEQ ID NO: 185622 - DNA, 2088 bp, synthetic construct
  misc_feature 1..2088: note = Description of Artificial Sequence: Synthetic coding sequence
  source 1..2088: mol_type = other DNA
atgcccggcggcggcccccagggcgcccccgccgccgccggcggcggcggggtaagtcaccgagctgggtctcgagattgtctgcctcccgctgcttgttttaggcgccgccgactggcccggaggcctgggtacatgaggagttctacaggtccaggtatagggttcctgagtccagcagtgggcacactctttcggttccccggcggagtttccggggaagaatcccaccattcagagtcccgtgcgaggcaatgtggacttgatagccggggactccttgtgaggtccccggtgtctaaaagcgccgctgcccctactgtcacctctgtgcgagggacaagcgctcactttgggattcagctgcgggggggcacccgtctgcccgaccggctgtcttggccatgtgggcccggtagtgccggctggcaacaggagttcgctgcgatggattcttcggagacacttgacgcctcatgggaggcagcctgcagcgacggtgccagacgggtgcgggcggctggctccctaccatctgccgaattgagttccaactcttgctctccaggatgcggaccagaagttccccctacaccccctgggtcccactcggcattcactagctcattttctttcataaggcttagccttggctctgcaggcgagagaggagaagctgaagggtgtcctccctctagggaggccgagagccactgtcagagtccccaggagatgggagccaaggccgcgtctctggacggcccacacgaagacccacgatgcttgtctcgacccttcagcctccttgctactcgggtgtcggccgacttagcccaggcggcccggaatagctctcgtccagagagagatatgcatagtctgcccgatatggatccgggcagctcttcatcactggacccatcactggctgggtgcggaggcgatggctcctccggcagcggtgatgctcattcatgggacaccctactacggaaatgggaacctgtgctcagagactgtttgttacgcaacagaaggcagatggaagttattagccttaggctgaaactccagaaactgcaggaagatgcagttgaaaacgacgactatgacaaagccgaaactctacagcagcgcctcgaggatctggaacaagaaaagatctctctgcactttcagttaccctcccgccagcctgctctctcctctttcctgggtcacctagccgcccaggtccaggcagcgcttcggagaggtgccacccagcaggctagtggcgacgatacacatacccctcttcggatggaacctcgattgctggaacccaccgcgcaggacagcctgcacgtgtccattacccgtagggactggctgctgcaggagaagcagcagcttcagaaggaaattgaagcgctgcaggctcgaatgttcgtcttagaagccaaggaccagcaactcagacgggagatcgaggaacaggaacagcaattgcagtggcagggatgcgatctcacacccctggttgggcagctttcattaggtcagctgcaagaagtgtctaaagcactgcaggataccctggcctccgctggtcaaattccgttccacgcagaacctccagagacgatacgcagtctccaagagcggatcaagtcgctgaacctgtctttaaaggaaattactaccaaagtctgtatgtcggagaagttttgcagcacattacggaagaaggtgaatgacatcgaaacccagctcccagcacttcttgaggcaaaaatgcacgctatcagcggcaaccatttttggacggcaaaagatctgaccgaagagattagatcactcacctccgagagagaggggttggaggggctactctccaagctgctggtactgtcatcccgtaacgttaaaaagctaggttccgtgaaagaggactacaaccgcctgagacgggaggtggaacaccaggagacagcctacgctgcctctgtgcactgtctgggcaagtgcggtaaattgacgtggaaacttgtggactgtctttctagggcttactccagccgtaagcctggagaagcttgcctgtag

SEQ ID NO: 185623 - DNA, 1680 bp, synthetic construct
  misc_feature 1..1680: note = Description of Artificial Sequence: Synthetic coding sequence
  source 1..1680: mol_type = other DNA
atgcccggcggcggcccccagggcgcccccgccgccgccggcggcggcggcgtgtcccacagggctgggagcagggactgtctgccacctgctgcatgtttccggagacggcggcttgcaaggcgcccgggatatatgcggtcatccactggacccggtattggcttcctcagccctgccgtcggcaccctgttccgatttccggggggggtctcaggggaggagagtcaccattcagagagccgcgcaagacagtgcggccttgatagcaggggactcttagtacgctctcctgtctccaaaagcgcagccgcccctactgtgacatcagtgagggggacttcagctcacttcgggatccagctccgggggggcacgcgcctcccggaccgcctttcttggccgtgtggaccggggtccgccggatggcagcaggagtttgcggccatggattccagcgagacccttgacgcatcctgggaggccgcatgcagtgatggggcaaggagggttcgggcggccggcagcttaccttcagcggagctgtcgtccaacagctgtagtccaggctgtggccccgaagtaccacctactcctcctggtagtcacagcgcctttaccagcagtttttcgtttatcagactgagtcttggttctgctggcgaaaggggcgaagccgaaggttgtcctcctagcagagaggctgaatctcactgccagtcacctcaggaaatgggggccaaagctgcttctctggatggtccccacgaggatcctaggtgcttgtccagaccgttctctcttctggccactcgtgtgtccgccgacctggcacaggcagctaggaactccagcaggcccgaacgcgatatgcattccttaccagacatggatcctgggtcttcttccagtctggaccccagcctggcaggatgcggaggtgacggctccagtgggagcggagatgcccatagttgggacacactgctccgtaaatgggagcctgtcttgcgggactgcctgctaaggaaccggcgccaaatggaagtgatctcactgagattgaagctccagaaactccaggaagacgccgttgaaaacgatgattatgataaggctgagaccctccagcagagattagaggacctggagcaagagaagattagcttgcacttccagctgccctctaggcagcctgccttgagtagttttctggggcacctggcggctcaggtccaggctgccctgcggcggggcgctacccagcaggcttctggggacgacactcacacccccctacggatggaacctcgcttgctggagccaacagcacaggacagcctccacgtgtcgataacgagaagggattggttactgcaggaaaagcagcagttgcagaaggagattgaagcgctgcaggcacggatgtttgtgctcgaagcaaaggatcaacaactcagaagagagattgaggagcaggaacagcaactgcagtggcaagggtgtgatttgacaccgctggtgggccagctgtcgcttggtcagctgcaggaggtgtctaaggcgttacaagacaccctggcttcagctgggcagatcccttttcacgcagaacccccagaaactatccgtcggaacaaatgcgagggtaaatactacgaggtgcacggcaatacatag

SEQ ID NO: 185624 - DNA, 1740 bp, synthetic construct
  misc_feature 1..1740: note = Description of Artificial Sequence: Synthetic coding sequence
  source 1..1740: mol_type = other DNA
atgcccggcggcggcccccagggcgcccccgccgccgccggcggcggcggtgtgtctcaccgcgccgggtccagggactgtctgcctccagccgcatgctttcgacgtagacgacttgctaggaggcccggatacatgcgcagctccacgggaccaggaattgggtttctgtccccagctgtcggcaccctcttccggtttccaggtggcgttagcggcgaggagtctcatcattccgaatccagggcgagacagtgcgggctcgattcccggggcctgctggtgagatcgcccgtctccaagagcgctgctgctccaacagtcacaagcgtcagagggacttccgcccactttggaatccagctgcgcggtggtaccagactccctgaccgcctttcttggccatgcggacctggcagcgccggatggcaacaagagttcgcagccatggatagctctgaaaccctcgacgcttcatgggaagccgcctgtagtgatggagcccgccgcgtgcgtgcggctggtagtctcccatccgccgaattgagttccaatagttgctctcctggatgcggtcccgaggtgccccccacccctccaggcagccatagcgcctttacctctagtttttctttcatccgattaagcctcgggtctgctggagaaaggggcgaggcggaaggttgcccgccttcaagggaggccgaaagccattgccaaagtccacaagaaatgggggccaaggctgcttccctggacgggccgcacgaggacccacgttgtctgagccgccccttcagccttttagcaacaagggtgagcgccgatttggcacaagcggctcgtaattctagcagacccgagcgggatatgcatagtctgcccgatatggaccccggcagttctagctccctggatccttcgcttgccgggtgtggaggtgacggatcatctggatcaggcgacgcccattcctgggatacactgctgcgcaagtgggaacccgtattaagggactgtctcctgaggaatcgccggcagatggaagtgatatctcttcgcctgaaattacagaaattgcaggaggatgcagtcgagaacgatgactatgataaggcagagaccctgcagcagcgcttggaagacctcgaacaggaaaagatctctctccactttcagctgccctctcggcagcctgcactgagctcgtttctgggtcacctggccgctcaggtgcaggctgctcttcggcggggagccacccagcaagccagcggagatgacacccacactcccttgcggatggagcccaggctgttagaacctaccgcccaggacagcctacatgtctctatcaccagacgggactggttgctacaggagaaacagcaacttcagaaggagatcgaagctctgcaagccagaatgtttgtgttggaggccaaagaccagcagcttagacgggaaatcgaggagcaggaacagcagctccaatggcagggctgtgacctgacccccctcgtgggacaattgagcctgggtcagttgcaggaggtgagtaaagctttgcaggacaccctggcatccgccggacagatcccatttcacgccgagcctcctgagacgatacggagcttgcaggaacggataaaatccctgaacttgtctctcaaagaaataaccacaaaggaaacgatttctggaagactgaagacttcccccaggaggctcgatcactag

SEQ ID NO: 185625 - DNA, 390 bp, synthetic construct
  misc_feature 1..390: note = Description of Artificial Sequence: Synthetic coding sequence
  source 1..390: mol_type = other DNA
atgaccatgaccaccatgcccgagagcctgaacagccccgtgagcggcaaagcagttttcatggagtttggaccacctaatcagcagatgagcccctcccccatgagtcacggccattatagcatgcactgtttgcactccgcaggccacagtcagcctgacggcgcatattcatcggccagctccttctctaggccactgggttatccgtacgtgaattccgtcagctcacacgcgagctccccctatatcagctctgtccaatcatacccaggctccgcgagtctggcccagagcagactggaggaccctggccaggacctcgtacccaaacaggctatccaggtgcaggaggcggacgaagccggatgggggggtagtggcgggtag

SEQ ID NO: 185626 - DNA, 516 bp, synthetic construct
  misc_feature 1..516: note = Description of Artificial Sequence: Synthetic coding sequence
  source 1..516: mol_type = other DNA
atgaccatgaccaccatgcccgagagcctgaacagccccgtgagcgggaaggccgtttttatggagtttggcccccccaaccagcagatgagtccttctcccatgtcccacggacattactcaatgcattgcctccactcggctggccactctcaacctgatggggcatatagctccgcctcttccttctcacgtcccctcggatatccctatgtcaattcagtgagcagtcacgcaagtagcccttacataagcagcgtgcaaagctatccagggagcgcaagcctggctcaatccagactggaggaccccggggctgatagtgagaaaagtactgtggtggagggaggggaggtgcgttttaatggaaaaggaaagaaaatccgtaagccccgcacgatctacagttcgttgcagcttcaggctcttaaccgcagattccaacagacccagtacctcgccttaccagagcgggccgaattggcggcatccctagggctgacacagacccaatag

SEQ ID NO: 185627 - DNA, 768 bp, synthetic construct
  misc_feature 1..768: note = Description of Artificial Sequence: Synthetic coding sequence
  source 1..768: mol_type = other DNA
atgaccatgaccaccatgcccgagagcctgaacagccccgtgagcggaaaggctgtgttcatggaatttggcccaccaaaccagcagatgagtcccagcccgatgtcccacggccactactccatgcattgcctgcactcagctggacattcccagccggatggtgcctacagctctgcgtcatcgttctcccgtcccttgggctacccgtatgtcaactctgtctcatctcacgcttcatccccgtacatttcttcagtacagagctatccggggagcgccagcctcgcacagtccaggttggaggatcctggggcagacagtgaaaaatcaactgttgtggaaggcggggaagtgcgattcaatggcaaggggaagaagatacggaagcctaggacaatttactctagtctgcagttacaggcgctgaacaggagatttcagcagacccaatatctggcccttccagagcgtgcagagcttgccgcaagtctgggtttgactcagacacaggtcaagatctggtttcaaaacaaacgcagtaagttcaaaaaattgatgaagcagggaggggcggccctcgaagggtcagccctggctaatgggagggcactttctgctgggagtccccctgttccgccagggtggaaccccaattcctcatccggcaaaggctccggcgggaacgcgggatcctatattccaagctatacatcgtggtatccctccgctcatcaagaggccatgcagcagcctcagttgatgtag

SEQ ID NO: 185628 - DNA, 564 bp, synthetic construct
  misc_feature 1..564: note = Description of Artificial Sequence: Synthetic coding sequence
  source 1..564: mol_type = other DNA
atgaccatgaccaccatgcccgagagcctgaacagccccgtgagcggtaaggccgtcttcatggaatttgggccacccaaccagcagatgtccccctcacctatgagtcatggtcactatagtatgcactgcctgcattctgccggacactctcagccggacggagcttacagcagcgcaagcagttttagtcgacctctaggttacccctatgtgaattcagtgtcctcccatgccagctccccttatatttcttccgtgcagagttaccccggctccgcaagtctcgcccagtcacggcttgaagaccccggagccgattccgagaaatccacagtcgtcgaagggggagaggtgcggttcaatggcaagggcaaaaagatcaggaagccgcgaaccatatattcctctcttcaactccaggccctgaaccgacggtttcagcagacacagtaccttgccctacctgaacgggccgagctggccgcctctctgggtctgacacagactcaggtcaagatctggtttcaaaacaagaggagcaagttcaagaagctgatgtag

SEQ ID NO: 185629 - DNA, 1722 bp, synthetic construct
  misc_feature 1..1722: note = Description of Artificial Sequence: Synthetic coding sequence
  source 1..1722: mol_type = other DNA
atgggcaagtgcctgagctgctgcaaggaggaccagagcttccagcgctgttctccggaagaccaggtcagtactgatgctcagcatagaggcgcctcgtcaatctctcagccttctattagtctgggacacaagacttcatattcccctgtgacccacaaagtgaacgccgctaaggctagtagaagattgctgtctgtgagttccccttcattctcagaacggcgttactcacttttcgttggattccagaagcgtaacgcctccccgtactggcaacagagccgcgctaactttgatagtgaggaagataccgggttcaccgatataaaaagcagctcagaccactgtggctcctttatctctcgtcggcgtagattctcttcccggaagctttcaatcgtgagctactataagtctgcaattttctttgaccctcaagcctctggccaaaatgtctttaacctcaacgaaatagaaattttttctaagacttcttccaatacggacgcaaagaaacatatcacaattagcgcaccagagtacaataccaagaactttaaaaatttcgagacgaataccacgagccccgcatttggcaacactatcgatacggcctcatatcagcagagcacctcctcattttttagcctcgcctccgatatctccagccccgatcaacagaacggcatcgctaatgacatccaacagaggggccaactctgcaaggacttaaaggatttcctccatccgagaccggaatcatacagtacaggacactctccaattatgatcccccagcaccccagccagtccggcacgttcccattcttacataaagctggattcagtagctcttataagaatagtggctgttttattccacctcagagcgagctgactagtggtttgttcgaagacgaagactttgcagtgctgttccaggacgaggacaggagctctcctattgagattcccaagattcggtatataacggcaaacaccgacaccgaggaacagagctttccagttcccaaggccttcaacacccgcgtcgaggaactcaatctagacgtgctgctccagaaggtggaccacttacggatgtcggagtcaggcaaatccgagagctttgaattgctgcgggaccacaaagagaagttcagggatgaaattgaatttatgtggcggttcgctcgggcttacggcgacatgtatgagctgagcaccaatacccaagaaaagaagcattacgctaatatcgggaaaaccctctctgagcgagccataaaccgagcccccatgaatggtcattgccacctttggtatgctgtcctttgcggatatgtttcagaatttgaaggcctgcagaataaaattaattacggtcatctgtttaaggagcacctggatatagctatcaaactactgcctgaggaaccattcctttactatttaaagggtagatactgctacactgtatccaagctaagctggattgagaagaaaatggccgctaccttattcgggaagattccctcctcaaccgttcaggaggccttacacaatttcttaaaagctgaagagctgtgcccaggttatagcaatcccaactacatgtacttggctaagtgttataccgacttggaggagaatcagaatgccctgaaattctgcaacctggcacttctcctgccaacagtaactaaggaagaactctag

SEQ ID NO: 185630 - DNA, 654 bp, synthetic construct
  misc_feature 1..654: note = Description of Artificial Sequence: Synthetic coding sequence
  source 1..654: mol_type = other DNA
atgaccggcgtgttcgacagcctggtggccgacatgcacagcacccaaattgctgctagttccacataccaccagcaccagcagcctccttccgggggtggcgccgggccgggggggaatagctcttcgagtagcagcctgcataaaccccaagaatcaccaaccctacccgtgtccactgccaccgattccagttactacacaaaccagcagcatcccgctgggggcggaggaggaggagggagtccttatgctcatatgggaagttatcagtaccaggcttcaggtttgaataacgttccatactccgcaaagagttcctacgacttgggctatactgccgcctatacaagctatgccccatatggtacctctagtagtccggctaataacgagccagagaaggaggacctggagccggagataaggattgttaacgggaagcctaaaaaggtgaggaagccgaggacaatctacagtagcttccagctggccgctctccagcgcagatttcagaagactcagtacctggcactccccgagagagccgaactggccgcatccctcggcctgacccaaacgcaagtgggcctggcaccgtgcaggggcgaggaaagcgcagggctgcgttggttgggctcccggcgggtgtag

SEQ ID NO: 185631 - DNA, 864 bp, synthetic construct
  misc_feature 1..864: note = Description of Artificial Sequence: Synthetic coding sequence
  source 1..864: mol_type = other DNA
atgagcggcagcttcgaccggaagctgagcagcatcctgaccgacatcagcagcagtctcagttgtcatgctgggagcaaagacagccccaccctcccggagagctccgtgactgacttggggtattactccgcccctcagcacgactactacagtgggcagccatatggtcagactgtgaacccatacacttaccaccatcagtttaacctaaatgggctcgcaggcacaggcgcctatagccccaagtcagaatatacctatggggccagctatcgccaatacggtgcttatcgagaacaaccgcttcctgctcaggaccccgtgtccgtgaaggaagagcccgaggctgaggtgagaatggtgaacggcaagcccaaaaaggttcggaagccccgtaccatctacagttcatatcagctggccgcacttcaaaggcggttccaaaaagcccagtacttggccctgcctgaacgagcagaactagccgcgcagctgggactgacccagacacaagtgaagatttggttccagaataggcgttcaaagtttaaaaagctctataagaatggagaggtacctttagagcactctcccaacaattccgactctatggcctgtaattcacccccttctcccgccctatgggataccagcagccactctactccagcgccggctcgtagccagctcccaccaccgttaccctactccgcctcaccttcctatttggatgacccgactaatagctggtatcatgctcaaaacctttcgggacctcatctgcagcagcagcctccccaacctgcaactctgcatcacgcttcaccaggccccccgccaaacccaggtgctgtctactag

SEQ ID NO: 185632 - DNA, 723 bp, synthetic construct
  misc_feature 1..723: note = Description of Artificial Sequence: Synthetic coding sequence
  source 1..723: mol_type = other DNA
atgaccagcctgccctgccccctgcccggccgggacgccagcaaggcggtctttcccgacctggctccagttccatccgtggcagcagcctatcccctgggactgtctccaacgacagcggccagccctaatctctcctacagccggccatatggacacctgctgagttacccctacacagagcctgccaatcctggcgattcatacttgagctgccagcagccagcagccctgtctcaaccactctgtggtcccgcggagcacccacaggagcttgaggccgatagcgagaaaccaagactctccccagaacctagtgaaaggaggccccaggcaccagccaaaaagttacgaaagccacgaaccatatattcaagtctccagttgcaacacctgaaccaacggttccagcacacccagtatcttgccctgccagaacgggctcagctcgcagcccaattagggctcacccaaacccaggtgaagatctggttccagaacaagaggagtaaatataagaagctcctgaaacagaatagcggggggcaagaaggtgatttccctggccggactttttctgtgtcaccatgctccccacccctgccatctctgtgggatcttcccaaggccggcaccctgcctacaagcgggtatggtaactctttcggggcctggtatcaacatcactcaagtgatgtactggcttctccccagatgatgtag

SEQ ID NO: 185633 - DNA, 507 bp, synthetic construct
  misc_feature 1..507: note = Description of Artificial Sequence: Synthetic coding sequence
  source 1..507: mol_type = other DNA
atgaagctgagcgtgctgcccccccggagcctgctggccccctacacagtactgtgctgccccccagattcggagaaacctcgcctgagcccggagccttccgagaggaggcctcaggcccctgccaaaaagctgagaaaaccgaggactatctactcttcccttcagctgcagcatctcaaccagaggtttcaacacactcagtacctggcactgcctgagcgagcccaactggccgcccaactgggcctcactcagacccaggtaaaaatttggttccagaataaacggtcgaagtacaagaaactgcttaagcaaaacagcggcgggcaagaaggcgatttccccggaagaacgttctccgtttccccctgttctcccccacttccatctttatgggatctacccaaagccggaaccctccccacatccggctacggcaactcttttggggcttggtaccagcaccacagcagtgatgtgctggcctcacctcagatgatgtag

SEQ ID NO: 185634 - DNA, 1473 bp, synthetic construct
  misc_feature 1..1473: note = Description of Artificial Sequence: Synthetic coding sequence
  source 1..1473: mol_type = other DNA
atggaccacaccgacaacgagctgcagggcaccaacagcagcggctccctaggcggtttagatgtgagacggcgaatcccgattaaattgatcagcaaacaggcgaacaaagcaaaacctgcaccacgcacacaacggaccatcaaccggatgcctgctaaagcaccaccgggggatgaggggtttgattataacgaggaggaaaggtacgactgcaagggtggagagctgtttgcaaatcaacggaggttccctggacacctcttttgggatttccaaattaatattcttggtgaaaaagacgacacgcccgttcatttctgcgataaatgcgggttgcccatcaaaatctacgggagaatgattccctgtaagcacgtgttttgctacgactgcgctatactgcacgagaagaagggcgataagatgtgccctggttgctctgatccggtgcagagaatagagcagtgcactaggggatcgctgttcatgtgtagcatcgtgcaaggatgtaaacgtacatatctgtctcagcgggatctgcaagcccacatcaatcaccgtcatatgagggctggaaagccggtgaccagggctagtctggaaaatgtgcacccacctattgctccccccccgactgaaatccccgagcggttcattatgccacccgataagcatcatatgagccatatcccaccaaagcagcacatcatgatgccacctccgcctctgcagcacgtgccccatgaacattacaaccagcctcacgaggatatcagggcaccccccgctgaactgtcaatggccccccctccgccacgcagtgtctcccaggaaacctttagaattagtacacggaagcactccaacctaattactgtgcctatccaggatgatagtaacagtggagcccgcgagccccctccaccagcccctgccccagcacaccaccaccctgagtaccaaggccagcctgtcgtgagccacccccaccacataatgccacctcagcagcactacgcaccaccaccccctcctcctccccccatcagccatcctatgccacatccaccacaggcagcaggaaccccgcacctggtctacagccaggcaccaccccctcccatgacaagcgctccgcctccgataacccctcctccaggccatatcatcgcccagatgcctccctatatgaatcacccccctcctggaccgcctccaccacagcacgggggcccccccgtgacagcaccaccaccccatcactataacccgaattccctaccacagttcacagaagaccagggaactctgtccccgccctttacacagccgggcggaatgtcacctgggatctggccggctccaagaggaccgccgccaccgccccgcctgcaagggcctccgtctcagacaccacttcccggaccacaccacccagaccaaacacggtatcgcccatattaccaatag

SEQ ID NO: 185635 - DNA, 798 bp, synthetic construct
  misc_feature 1..798: note = Description of Artificial Sequence: Synthetic coding sequence
  source 1..798: mol_type = other DNA
atgatgaccatgaccaccatggccgacggcctggagggccaggactccagtaagtctgcttttatggaattcggccaacaacagcagcagcaacacagtccagccatggccggcgcccattaccccctgcactgtctgcactccgcggccgccgctgccgcagccggcagccaccaccaccaccaccaccaacatcatcaccacggtagcccatacgcctccgggggcggcaacagctataatcataggtcactcgccgcatacccatacatgtcccactcccaacattctccctacctgcaaagctaccataatagttccgccgctgcccagacacgtggggatgacactgaccagcagaagactacggtcatcgagaacggggaaatcagattcaacggcaaaggcaaaaagattcgtaaaccgcggactatctactcgagtttgcagctgcaggctctgaaccatcggtttcaacagacccagtatctggcactgcccgagagagccgagctcgcagcctcacttgggttgacacagacccaggtgaagatttggttccaaaacaaacggtctaagttcaagaaattattgaagcagggatccaaccctcatgagtccgaccctttacaaggcagcgccgccttgagccctagaagtcccgccttacctcctgtgtgggacgtgagtgcctccgccaaaggcgtttccatgccacctaatagttatatgcccggctactcccattggtacagcagcccccatcaggacaccatgcagaggcctcagatgatgtag

SEQ ID NO: 185636 - DNA, 882 bp, synthetic construct
  misc_feature 1..882: note = Description of Artificial Sequence: Synthetic coding sequence
  source 1..882: mol_type = other DNA
atgatgaccatgaccaccatggccgacggcctggagggccaggactccagcaagtctgcttttatggagtttgggcagcaacagcagcagcagcaacaacagcagcagcagcagcagcaacagcagcagcagccgccccccccccctcctcccccgccacaacctcattctcaacagagttctccggccatggccggcgcgcattacccattgcactgcctccacagtgccgcagctgccgcagctgctggctcccaccaccatcaccaccatcaacaccaccaccatggcagtccttatgcttcaggtggcgggaacagttataatcacaggtccctggcggcctatccctacatgtcccacagtcagcatagcccatatcttcagagctaccataattctagtgcggcagcccagacaagaggagacgacaccgatcagcagaaaacgacagtgatcgagaatggagagatccgcttcaatggaaaggggaagaagatccggaaacccagaacaatttactctagcctgcagctgcaggctctgaatcaccgcttccaacagacacagtatctggccctgccggagcgggctgagttggcagcctctctggggctgacacaaacccaggttaaaatttggttccaaaacaagcggtctaaatttaaaaaacttctcaagcagggtagcaacccccacgagtctgaccctctccagggtagtgcggcattaagcccccgctctccagcgctgccaccggtgtgggatgtgagcgccagcgccaaaggagtctctatgcctcccaattcctacatgccagggtattcccactggtactcgtcgccccaccaggataccatgcagagaccgcagatgatgtag

SEQ ID NO: 185637 - DNA, 9084 bp, synthetic construct
  misc_feature 1..9084: note = Description of Artificial Sequence: Synthetic coding sequence
  source 1..9084: mol_type = other DNA
atgaacctgcaccaggtgctgaccggcgccgtgaaccccggcgaccactgcttttctgtgggcagcataggcgaccagagatttactgcctatgccagtggctgtgacatcgttatccttggctctgatttcgaaaggctgcagattatcccgggtgccaaacacggaaatattcaagtcggatgcgtcgactgctctatgcagcagggtaaaatcgcagctagttacggcaacgtgatcagcatttttgaacccgtaaaccttccaaagcagaagaagaatctggagttgtacagtcagtggcagaagagtggccagttctttctggaaagcatagcacataatattacctgggacccgacaggttcacgtctgttgacaggttccagctatctgcaactatggtcaaacacgaacttagaaaaaccaacagaagacgagaatctgaacaagaccgatctgaactttggcgactggaaatgtatctggcactgcaagactgcctcccaggtacacctcatgaaatttagccccgacggggagttctttgccacagccggaaaggacgattgtttactgaaggtttggtacaacgtggaaaattggcgcactgcggtgaccagccccgatggctcctcagagaaacagtctcagggcgaaatcgatttctcgttcgtgtaccttgcacaccccagagccgtcaatggcttttcatggaggaagacttctaaatacatgccccgggcctccgtgtgtaatgtcttgctgacatgctgcaaggataacgtttgcagactgtgggtagagacctttttacccaatgactgccttttgtatggcggagattgctctcattggacagagagcattaatttgaccaataacttcaagaggaacgctagctcaaaagagcgcgtccaaaacgctttagaagtgaaccttaggcacttcaggagaggtcgccggagatcacttgccctggtggcccatactggctatctgccacatcagcaggatccgcaccacgtgcacaggaatacgcctctacacgctaacgcgctctgtcactttcatatagctgcctctattaaccccgctacagatatccccttattaccgagcataaccagcctttcactaaatgaaaacgaggagaaaacaggcccctttgtagtgcactggctgaacaataaggagcttcactttacactgagtatggaggtgttccttcaacagttaagaaagtctttcgaacagccaagcagcgaggccagtgtcgaggactccaatcaagccgacgtgaaatccgatgaagagactgacgacggagttgatgatctgaaaattaatccagaaaaaaaggaactgggctgtgacaaaatggtgccaaattctagtttcaccagcctaagcagcgctgctatcgaccatcagattgaggtgttattgagcgagtggagtaagaacgccgacatgcttttttccatccacccgatggatggttctttgcttgtgtggcacgttgactggcttgatgaataccaaccgggaatgtttcggcaagtccaggtgtccttcgttagtagaatccccgtggccttcccgaccggagatgcaaactccctgtgtaagagtattatgatgtatgcttgtaccaagaatgtggatttggccatacagcaaggcaagcagaagccaagcggcctgactaggagtacctcgatgctgatttcatcaggacataataaaagtagtaattctctgaagctatcaatattcacaccaaatgttatgatgattagcaagcacgcagatggctccctgaaccagtggctggtttcctttgccgaggagtcggcgttctctactgtcctgtctattagccataagtcacggtactgcgggcaccggttccacctgaatgaccttgcctgtcattctgttctgcctctattattgaccacttcgcaccataacgccttacggacccccgatgttgacaatcccgaacagccattcgatgccctgaacatcgaagaatgctccttgacccaacagaacaaatccaccgtcgacgtggcttttcaggacccttcagccgtctacagtgaactgatcctttggagggttgaccccgtggggcctctatcctttagcgggggagttagcgaactggcacgtattaattcacttcatgtgagcgcattttccaacgtggcctggttgcccaccctgattccatcatactgcctgggagcctactgtaattccccttctgcctgtttcgtggcgtccgatggtcagtatttgaggctgtacgaggccgtcatcgatgccaaaaaactactgtccgagctaagcaaccccgaaatcagcaaatatgtaggcgaggtcttcaatattgtatcacagcagagcactgcgagaccaggttgtatcattgccctggacccgattaccaaactccacggccgtaagacccagctgttgcatgtgttcgaagaagattttatcttgaataaccttgagaagaagagccttggtaaagatagcatcttatctaacgcgggaagttcaccgaacggcttttcggaaaaattctacctgattgtcatagagtgtacccaggacaaccggagcctcttacacatgtggaaccttcacctcaaatctatccctgtgagtctggatgagaaagtggatactaagctgtccgaagctgtttggcagcctgaggaacattacagctctagcccagagaagatcctctcacctttttctcagaaataccaagcttgtcgagcaaacttgcagtcaacatcacggctgacactgttctccgaaatggtatattcacaagaacttcacttacccgaaggggttgaaatcatcagcatcaaaccttctgccggtcacctctctagctcctccatttaccccgcttgcagcgcaccatatctgctggctacatcttgttctgatgagaaggtgcgcttttggagatgccgagtaacagatggcgagtctgcaacctccaagaacgggaagatagacttagcttatatctgggaagagtggccattgctgatcgaggacgggctgcagtcaaattctagcatcacagtccctggtcggccagtagaggtgagctgtgctcatactaatcggctcgcggtcgcatacaagcagcctgccagcaacagcagatctagccaggactttgtgatgcacgtgagcatattcgaatgcgaatccacaggaggatcctgttgggttctcgaacagaccatccacctcgacgaactgtctacagtgctcgatagtggaatctccgtcgattccaatctcgtggcctataataagcaggacatgtacctctcctcaaaagagaatataacgtctaacacaaaacacctcgtacacctcgactggatgtcacgggaggatggctcccatattctgacagtaggcatagggagcaaattgttcatgtacggccccctagccggcaaggtccaggaccagacaggcaaggaaacgttagcattccccctctgggaatcgaccaaagttgttccgctgtctaagttcgtgctgctcaggagtgtcgacctggtgtccagtgtggacggctctccaccattccccgtatctcttagctgggtccgcgatggtattttagtggttgggatggattgcgagatgcacgtttattgtcaatggcaaccctcctccaagcaagagcccgttatcactgactcatactcaggcagtacaccctccataacctccctcataaagcagtccaattcctcttccggcctgcacccaccaaagaaaaccctgactcgatcaatgacatcactggcccagaaaatttgcggcaagaagaccgcttttgatccttccgtcgacatggaggattctggactgttcgaggccgcacatgtgctgtcccctaccttgcctcagtaccatcccttacagctgctggagctgatggatctggggaaggtgcggagggctaaggcaatactcagccatcttgtgaagtgcatcgctggagaagtcgtggccctgaacgaggccgagtcgaaccatgagcgccgcctgagatctcttacgattagcgcctctggttctaccacccgggatcctcaggcattcaataaagccgaaaacacagattacactgaaattgacagtgtgcccccgctccctctgtatgccctactggccgcagacgacgattcctgctattcatcacttgagaaatcatccaatgaatccacactgtccaagtccaatcaattatcaaaggaatcttatgatgagctgttccagacccagctcctgatgaccgacacacacatgttggagactgacgaagagaatactaaaccacgggttattgatctgagccagtacagccctacctattttggtcccgaacacgcacaggtcctatccgggcacctcctgcattcttctctcccgggcctcagccgaatggaacaaatgtcactcatggccctcgccgacaccattgccaccacgagcacggacatcggcgagagccgggacagatcacagggcggtgaaacactagacgagtgtggactgaagttcctgctagctgttagactgcacacttttctgactactagcctccctgcttatagggcacaacttctacatcaggggctttctacctcccacttcgcgtgggcttttcactcggtggcggaggaagagctactgaatatgctccccgcaatgcagaaggacgatcccacctggagcgaactgagagccatgggagtgggttggtgggtgcgaaacactcggattcttcgtaagtgcatcgagaaggtggcgaaagccgcgttttacagaaaaaacgatcccctagatgccgccatattttatcttgcgatgaagaaaaaggcagtaatttggggactgtacagggctgagaagaatacacggatgacacagttcttcggacacaatttcgaagatgaacgctggaggaaagctgcgcttaagaacgccttcagcctcctggggaagcaacgattcgagcactccgcagccttctttctgttggccggctgcttgagagacgccatcgaggtctgccttgagaaactgaatgatatccagttggcccttgtgatcgctcgactctatgagtctgagttcgatacttctgctgcttataaaagtatactcagaaagaaagtcctagggattgattcccctgtgtctgaactgtgctccctcaacatcaacatgcatcatgatccgttcctgagaagcatggcgtattggatcctggaagactactcaggcgccctggaaaccctgatcaaacagcccatccgagagaacgatgatcaagtgctatcagcatctaaccccaccgtgttcaacttctataattacctgcggacacaccctctcctcctgcgtagacattttggcagctcggacaccttttccacccatatgagcctgactggcaaaagtggcctcgccggaactataaacttgtctgaacggcggttattcttcactactgcctcggcccacctaaaagccgggtgcccaatgttagcgctggaggtgctctccaaaatgccgaaagtgattaaaaagacccgccctttttacagagcaagttcctttctggacacttcaaaggattgttccccgagctcgccactgaagctggacgcaagagaggataaatcttcagccgtagactggtcccaatcactgattaatggatttggaagctctagcgaaggttcttccgagaagcagagcaactcaactctgtctttcgactggagtcaaccctccgtggtttttcaagacgacagcctcgaactcaagtgggactccgacaatgacgaagagaatgaggacgtgcccatcagcatgaaagagctcaagcccctgcagcggaagactgataagaagttagatgacatctcttcaaactacacggaaagtttttctaccctcgatgaaaatgacttgcttaatccctccgaggatatcattgctgtccagctaaagttccgggcatgtttgaagatcttgactgtcgaactcaggacactcagtaccggctacgaaatcgatggtgggaaactcaggtaccagctgtaccactggctggagaaggaagtgatcgccctccagcgcacgtgtgatttttgcagcgacgcagaggagctccaatcagcctttgggaggaacgaggatgagtttggattaaacgaagacgcagaagacctgccccatcaaaccaaggtaaaacagctgagggagaacttccaagagaaacgtcaatggttgctgaagtaccagtctctgctacgtatgttcctttcttattgtatacttcacggatcacacggaggtggcctcgccagcgttcgcatggagttaattctgcttcttcaggagtcacagcaggaaacgagcgagccgctgtttagcagcccactgagcgagcaaacttccgtacccctgctcttcgcctgcacagcaaatgcaaagacggttgtagcgaatccattacttcacttatcaaatcttacacacgacattctgcatgcaattatcaactttgattcgccaccacatcctgacatccagtctaacaaagtgtatgtaatgcacacactagcagcttcactctcagcctgcatttaccagtgtctctgtggctctcataactattcttcatttcagacgaaccaatttaccggaatggtttatcaaactgtgcttctgccccacagacccagcctgaagaccgggagccttgacgaagctctgacgccgaatacctcgccggcccagtggccagggattacctgcctaattcggctactgaatagtagcggcgaggaagcacagtcgggactgactgtgctcctctgtgagattctgacagctgtctacttgagcctcttcattcatggcctcgcaactcatagttctaatgagctgttcagaatcgtagcccaccctctcaatgaaaaaatgtggtcggctgtgttcggtgggggcgcccacgtgccatcaaaagaacagactcactccaagactctgccagtctcctctctggtggaagagggtgaaaaacaaaacaagcgattccggccgtccaagatgagctgcagagagagtgctcctttgaccccctcctcagcgcctgtgtcacaggagagtctggccgtgaaagaaaagtttatcccgcccgaactcagcatttgggactattttatagccaaaccatttttgcctagctcccagagccgtgctgaatatgactccgaagagagtctggggagtgacgacgatgataatgatgacgacgatgacgttctcgcatccgacttccacctccaagaacattcaaattccaattcctacagttggtctctaatgcgcctggcaatggtgcagctggtgttaaataacctgaagaccttttatccgttcgcggggcacgacctagctgagctgcctgtgagttcacccctgtgccacgctgtgttgaagaccctgcagtgttgggagcaggtactgctgcgccggttggaaatccacggcgggcccccccagaactatatcgcttctcacacagccgaggaaagtcttagcgcaggccccgctatactgcgccacaaggcactcctagagcccaccaacacgccctttaagtctaagcaccacttggctttgagcgtgaaacggctatggcaatacctagtgaaacaggaagagattcaggaaacattcatcaaaaacatcttcactaagaagcggtgcttgaatgaaatcgaggctgatctggggtatcccggagggaaggctcgcattatccacaaggaatctgacattatcaccgcatttgcagtgaataaggctaatagaaattgtattgctatcgctagttcccacgacgtacaagagctggacgtgtctggtattctggccacccaagtttatacctgggtcgacgacgacattgaggttgagactaagggaagcgaggactttctggtgatccatgctcgagatgatctcactgcagtccagggaacaacgccctacacacacagtaaccccggcacacccattaacatgccgtggctcggaagtacccagacaggaaggggtgcttctgttatgatcaaaaaggcaattaataacgtgcgccgaatgacaagccatcctacactgccatactacctgaccggggcccaagatggctccgtgaggatgtttgaatggggacactcacagcaaatcacctgcttccgtagcggaggcaattcccgggtgacacggatgaggttcaattatcaggggaataaatttgggatcgtggatgcagatggctacctcagcctctatcagacaaactggaaatgctgtccagtgacaggcagcatgccaaaaccatatctgacctggcaatgtcacaacaagactgctaatgatttcgtgtttgtgagttcgagcagtctgatagccacggccggtctgtccaccgataatcggaatgtctgcctatgggatactttggtggctcccgccaattcactcgtgcatgcgttcacctgccacgattcaggagccaccgttctcgcttatgccccaaagcatcaactgctcatatctggtggacgaaaaggcttcacttatgtttttgatctctgtcagcgtcaacagagacaattgttccagtcccacgactcccctgtgaaggcggtcgcagtcgaccctaccgaggaatattttgtcaccggtagcgcggaaggcaatattaagatatggagtttgtcgacctttggattgctgcacacgtttgtcagcgagcacgccagacagtccatcttccgcaacatagggaccggggtgatgcagattgagaccggtcccgccaaccatatcttctcctgtggagctgacggcacaatgaaaatgcggatcctccccgaccaatttagccctttgaatgaagttctgaagaatgatgtcaaattcatgctatag

SEQ ID NO: 185638 - DNA, 1770 bp, synthetic construct
  misc_feature 1..1770: note = Description of Artificial Sequence: Synthetic coding sequence
  source 1..1770: mol_type = other DNA
atgaacctgcaccaggtgctgaccggcgccgtgaaccccggcgaccactgcttcagcgtggggtcaatcggggatcagcggtttaccgcatatgcttcaggttgtgacattgtgatcctgggttcagattttgagagactgcagataataccaggagctaaacatggaaacattcaagtcggctgcgttgattgcagtatgcagcaggggaagatcgctgccagctacggcaacgtgatttctatttttgagcctgtgaacctaccgaaacagaagaagaatctcgaactgtactcgcaatggcagaaatctggccaattttttcttgaaagcatcgcccataatataacctgggatcccacaggctcccgtcttctgactggatcatcctacctgcagctgtggtccaatacaaatctcgaaaagccaaccgaagacgagaacttaaataagaccgacctgaactttggagattggaagtgtatctggcattgcaagacggcttcacaggtccaccttatgaagtttagcccggatggagaattcttcgctacggcaggcaaggacgactgtcttcttaaggtgtggtacaacgtagaaaactggcgcacagccgtgactagcccggacggatcatccgaaaaacagagtcagggggaaatcgacttctcttttgtgtacctcgcacacccccgcgctgttaacggtttttcttggcggaagacctccaagtatatgccaagagcgtccgtgtgcaatgtgctgctaacctgctgtaaggataatgtctgtcgactgtgggtggaaacttttctcccaaacgactgtttgctgtatgggggggactgcagtcactggacagagtcaatcaatctgacaaataatttcaagagaaatgcttcctccaaggaacgagttcagaacgctttggaggtgaacctgagacatttcaggagggggagacgaagatcactggccttggttgcacacacaggttatctcccacatcaacaggaccctcaccacgtgcaccgaaatacccctcttcacgcgaatgcgttgtgtcactttcatatcgcagcgagcattaatcctgcaactgacatcccgcttcttccatctatcacctccctttccctgaacgagaacgaagaaaagacaggtccatttgtggtccattggttaaataataaagagctgcatttcacactctccatggaggtcttcctgcaacaactacggaagtctttcgagcagccctccagtgaagcctctgtagaggatagtaatcaggcagacgtcaagtccgacgaagaaaccgatgacggcgtggatgaccttaaaattaaccccgaaaaaaaggagttgggctgtgataaaatggtcccgaattcttcattcacctcattaagctctgcggccatcgatcaccagatcgaagtgctgctgtctgaatggtccaaaaatgccgatatgctgttctcgattcatcccatggacggtagcctgctcgtttggcacgtcgattggttagacgagtatcagccaggcatgttcaggcaagtgcaagtctcatttgttagtcgcatacccgtcgctttcccgacaggcgatgcaaatagtctctgcaaatccatcatgatgtacgcctgtacgaagaacgtggatcttgctatccagcagggtaagcagaagcccagtggcctcacacggagcacctcgatgctgatttcatccggccacaataaaagttcaaatagccttaagtag

SEQ ID NO: 185639 - DNA, 9147 bp, synthetic construct
  misc_feature 1..9147: note = Description of Artificial Sequence: Synthetic coding sequence
  source 1..9147: mol_type = other DNA
atgaacctgcaccaggtgctgaccggcgccgtgaaccccggcgaccattgctttagtgtgggcagcattggcgaccaacgatttaccgcctatgcttccgggtgtgatatcgttatattggggtcagacttcgaaaggctccagatcatcccgggcgcgaaacacggcaatatccaggtgggttgcgttgattgtagtatgcagcaaggtaagatagccgcttcttacggaaacgttatcagtatctttgaacccgtgaacctgccaaagcagaagaagaacctggagctgtattctcaatggcagaaaagcggacagttcttcctggaaagcattgcccacaatatcacctgggatcccacagggtctcgcttgctaacaggctcatcctatttgcagctgtggtcaaatactaatcttgagaaacctactgaagacgaaaatttgaataagactgacctgaatttcggggattggaagtgcatctggcactgcaagactgcttcccaagtgcacttaatgaaattttctcctgatggggagttttttgccaccgctggaaaagacgattgtctgctgaaagtgtggtataatgtcgagaactggcgcacagccgtgacgtcacccgatggatcttccgaaaagcaatcccagggagaaattgattttagttttgtgtatctggcccacccacgggctgtcaacgggtttagctggaggaaaacatctaagtatatgcctagagcttcagtgtgtaacgtgcttctgacatgctgcaaagacaacgtctgtagactttgggtcgaaaccttcttacccaacgattgcctcctctacggtggcgactgctctcactggaccgaatcaataaacttgaccaataactttaaaagaaacgccagcagtaaggaacgtgtccaaaatgcactggaagtcaacttaagacactttagacgtgggagacggagatcacttgcactggtcgcccacaccgggtacctgccacatcaacaggatcctcatcacgtgcataggaacacccccctgcatgccaatgccctctgccacttccacatcgcggcctccattaacccggcaactgatatccccctcctgccaagtatcacctccctaagcttaaatgagaatgaagaaaagaccggacccttcgtagtccactggctgaataacaaagaattgcatttcactctgtctatggaggtgttcctgcagcagttaagaaagagttttgagcaaccatcgagcgaggcatctgtggaggatagtaatcaggctgacgtgaaatccgacgaggaaactgacgatggggtcgacgacctcaagataaaccctgaaaaaaaagagctcggctgcgataaaatggtccctaacagttctttcactagcctctcctccgcagcgatcgatcaccagatcgaggtgctgcttagtgaatggtctaaaaacgctgacatgttattttcaatacaccccatggatggcagcctactggtctggcacgtcgactggctggatgagtaccaaccaggtatgttcaggcaggtccaagtgtcttttgtaagccgcattccggtggcatttcccaccggggatgcaaacagcctctgcaaaagtatcatgatgtacgcatgtactaaaaacgtagatctcgccatccagcagggtaagcagaagccatctgggcttaccaggagcacttctatgctcatttcaagcgggcacaacaagtcctctaactccctgaagcttagcatcttcacacctaacgttatgatgatatctaaacatgcagacgggagcttaaatcagtggctagtgagcttcgctgaagaatccgctttctccaccgtcctgtccatctcacataaatctcgatattgcggccaccgctttcatctgaatgacttggcctgtcatagtgtgctgccgctgctcctgacgacttcccatcacaatgccttacgaactccggatgtggataatccggagcaaccattcgatgcccttaatattgaggagtgctcacttacacagcaaaataagtctactgtcgatgtcgcctttcaggaccccagcgcggtgtacagtgagctgattctctggagggtggatccagtcggaccacttagtttctccggcggagtcagcgagcttgctcgtattaactccttacatgtttccgccttcagcaatgtggcttggctccccaccttaattccttcgtattgccttggagcttactgcaactcacctagcgcctgctttgtcgcgagcgacggccagtatcttcggctttacgaggcagtgatcgatgcaaagaaattgttatcagaactctcaaatcccgagatatccaagtatgttggtgaggtgtttaatatcgtgtcgcagcagagtaccgcccgacccgggtgtatcatcgcactcgacccaatcacaaaactacatggacgcaagacacagctgctccacgtatttgaagaggacttcatcctaaataacctggagaaaaagagtctgggcaaggacagtatcctgtctaacgccggatcttcccccaatggcttctcagagaagttctacctgattgtgatcgagtgcactcaagacaatcgatccctattacacatgtggaacctgcacttaaagagcataccagtgtctcttgatgaaaaagtggatactaaactttctgaagctgtgtggcagcctgaggagcattattcatcttcccccgagaaaattttgagtccattctcccagaagtaccaagcctgccgcgctaatctccaaagcacaagccgtctgactttatttagtgagatggtgtacagtcaagagctccaccttcccgaaggcgtggagatcatctccattaagcccagcgctggacacttgtcgtcttccagcatataccccgcctgctccgcgccttacctgttagccacatcttgcagtgatgagaaggtgaggttttggcgctgccgagtcaccgacggtgagagcgccacatcaaagaatggcaaaatcgatttggcgtacatatgggaagaatggcctctattgatcgaagatggtctccagtctaattcctcaattactgtgcctgggaggccagtggaagtcagctgcgctcatacaaaccgattggcagtggcctacaaacagcctgcatcgaactcccgcagtagtcaagactttgtcatgcacgtctcgatttttgagtgcgagagtactggtggttcttgttgggtgcttgaacagaccattcacctcgacgaactgtcaacggtgcttgatagtggtattagtgtggattcgaacctcgtagcatataataagcaggacatgtacctctcatccaaggagaatattacttccaatacgaaacacttagtgcacctggattggatgagtcgggaggacggttcccacattctcacggtgggaattgggtcgaagctgtttatgtatggccccctagccggtaaagtgcaggaccagacagggaaggaaacactggcattccccctttgggaaagcacgaaagtggtgcccctcagcaaattcgtgttactgaggtccgtagaccttgtttcatctgtggacgggtccccgccctttcctgtctccctgagctgggtgagggatggaattctggtcgtcggcatggactgcgaaatgcacgtatattgtcaatggcagcccagttctaagcaggagcctgtaattactgactcttacagcggatcaacgcctagtatcacgtccctgatcaagcagtccaactccagcagcggccttcatccaccaaagaaaacgttaaccagatcaatgaccagcctcgcgcaaaagatttgtggtaagaaaaccgcctttgatcccagcgtagacatggaagattcaggactttttgaggcagcgcatgtgctatcacctacactccctcaataccatccattacagctgttagagcttatggatctcggcaaggtgcggcgtgcaaaagcaatactgtctcacttggtgaaatgcatcgcaggagaggtagtcgcccttaatgaggccgagtcaaatcatgagaggaggctccggagtctgacaatctcagcttctgggtccacgacgagggacccccaggccttcaataaagccgagaacacagactatacagaaattgactcagtgccccctctgccgctttatgcccttctggcagccgatgacgattcctgctattcatccttagagaagtctagcaacgaaagtacgctgtctaagtcgaatcaattgagcaaagaaagttatgacgagctctttcaaactcagctcctgatgacggatactcatatgctggagactgacgaagagaacacaaaacctcgtgtgattgacttatctcagtactcccctacttacttcggacctgaacacgctcaggtgcttagcggacacctgctccattcaagtctgcctggcctgtcaaggatggaacagatgtctctgatggcactagctgatacaatcgcgaccactagcacggacataggcgaatcccgagaccgaagccaggggggggagacgctggacgagtgtggattaaagtttttgctggccgtgaggttgcacacctttttgacgacgtcattaccggcgtaccgtgcacagctgctccatcaggggctttccacatcccactttgcttgggccttccattctgtcgcagaagaggagctgctgaacatgttgccagctatgcaaaaggacgaccccacctggtccgagttgcgcgcgatgggagtcggttggtgggtgcgcaacacccggattttgaggaaatgtattgaaaaagtggccaaggccgcattttatcggaagaacgatccactcgacgccgccatcttttacctggccatgaaaaagaaagccgttatatggggtctgtaccgggcagagaaaaacactcggatgacgcagtttttcggacataatttcgaggatgaaagatggcgcaaagcagcattaaagaacgccttcagcctgctgggcaagcaaaggtttgagcactcagcggcattcttcctccttgccggctgtctcagagacgccattgaagtttgtttggagaaattaaacgacattcagttagcactggttattgctaggctgtacgagagcgaattcgatacatcggcagcttataagtccattctgagaaagaaagtcctgggtatagacagtcccgtttcagagctttgttccttgaacattaatatgcaccacgaccctttcctccgctccatggcctactggatcctcgaggactatagcggcgcactagaaacactaatcaaacagccaatccgggagaatgatgatcaagtgctgtcagcgagtaaccccaccgtcttcaacttttacaactacctccgtacccaccctctactcttgagacgccattttggatcatccgacaccttctcaacccatatgtcgctgaccggtaagtccgggcttgccggaaccatcaatcttagtgagcgcagactcttctttacaaccgctagcgcccacttgaaggctgggtgccctatgctggctttggaggtactttctaagatgcctaaggtcatcaaaaaaacccggccgttctacagggcctcgagcttcctggacacttctaaggactgcagcccaagttcccctctgaaactggatgcccgcgaagataaatctagcgcagtggattggagccagagcctgattaatgggttcggctctagtagtgagggatcttctgagaaacaaagcaactctactctgagttttgactggtctcagccctctgtcgtcttccaggacgattccctcgagctcaagtgggatagcgataacgacgaagaaaatgaggatgtgcccatcagcatgaaagagctcaagccccttcagcgcaagactgataagaaactggacgatatcagctcgaactacactgagagcttctcaactttggacgaaaatgatcttttaaatccttcagaagatatcattgccgttcagctgaagtttagagcttgtctgaaaattcttaccgttgaattgcgcaccctaagcaccggctatgaaatagacgggggaaagcttcggtaccaactgtatcactggcttgaaaaagaagttatagctcttcagcggacctgcgacttctgctctgatgcagaagaactgcagtctgctttcggacgaaatgaggacgaattcggcctaaacgaggatgccgaggatctccctcatcaaaccaaggtgaagcagttgagggaaaactttcaagaaaaaagacagtggctcttaaagtatcagtccctcctgcgcatgttcctctcctattgtatccttcacggaagccacgggggagggttagccagcgtgagaatggagttgatattgttgctacaagagtctcaacaggaaacatcggagcccctgttttcttcccctctgtccgagcagacctcagtgccactcctattcgcctgtaccgctaatgccaagacagtggttgcaaacccgctcctgcacctctcaaacttgacccacgacattctgcatgctatcattaactttgacagtccaccccatccagacattcagagcaacaaagtgtacgtaatgcacactcttgcagctagtttgagtgcctgcatctaccagtgcctgtgtgggagtcataattattcctcgttccagaccaatcagttcacaggcatggtctatcagactgttctgctgcctcatcgtcctagtctgaaaacagggtctttggatgaggctctgacacccaacactagccccgcacagtggccgggaatcacttgtttaatccggcttctgaactcgtctggagaggaggctcagtccgggctgactgtgctgttatgtgagatcttgactgcagtttatctgagcctctttattcatggcctggccacacacagctcaaatgaactgtttaggatcgtggcacatcccctcaacgaaaagatgtggagcgcggtctttgggggtggcgctcacgtcccctctaaagagcagacccattctaaaactttaccggtctcctctcttgtggaggaaggcgagaagcaaaataaacggttcaggccctctaaaatgtcctgccgggagtctgctcccctaaccccatcatcagcccccgtgtcacaagaatcactggccgttaaggaaaagtttattcctcccgaactgagtatttgggactactttatagcaaaaccgttcctgccttcatcccagtctagggctgagtacgattccgaggaatctctcggcagcgacgatgacgacaacgacgacgacgacgatgtgctggcctcagactttcacctgcaagaacacagcaactcaaattcgtattcttggtcgcttatgcggctggccatggtccaacttgttctaaataacctcaagaccttctacccgttcgcggggcatgaccttgccgagttacccgtgagctctcctctatgtcatgcagtgcttaagacacttcagtgttgggaacaagtacttttgaggcgcctggagatacacgggggacccccacagaattacattgcttcccataccgccgaagaatctctttcggctgggcctgcaatcctcaggcataaggccttactcgaaccaactaataccccttttaaatctaagcatcatctggccctctccgttaaacgtttatggcagtacctcgttaagcaagaagaaattcaggaaacatttatcaaaaacatttttacgaaaaaacgctgtctcaatgaaagcttggaggataactcagagaccatcaagaactctatgatggaggaacccaatattaataaaatagaggcagatctgggctaccctggaggcaaggcccgcatcatacataaagaaagtgatatcatcacggcatttgctgttaataaggctaatcggaattgcatcgcaattgcgtcttctcacgatgtgcaggaactggacgtctctggcatattggctacccaggtgtacacttgggtggacgatgacattgaggtggagacaaaaggctccgaggactttctcgtgatccatgcgagggacgatctgacagccgtgcaggggactactccatatactcacagcaacccagggacacccatcaatatgccctggcttggtagcacacaaaccgggagaggcgcaagtgtgatgatcaagaaggctattaacaatgtcagacggatgacgtctcacccgacacttccatattacctcactggcgcacaggacggatctgtccgcatgttcgagtggggccactctcaacagatcacgtgctttagatctggcggaaatagtcgtgtgacccgcatgcgcttcaattaccagggtaacaaatttggtatcgtcgacgctgacggttacctgagcctgtaccagacaaattggaagtgctgccccgtgacagggagcatgccaaaaccttacctgacctggcagtgccataataagaccgccaatgacttcgtgtttgttagctctagctcccttattgctaccgctggactctcaacagacaaccggaacgtctgtctgtgggatactctcgtggcgcctgcgaacagcctggtccacgccttcacatgtcacgatagtggcgcgaccgtgctggcctacgcccccaagcaccagctgctgatcagcggcggtaggaaagggttcacatacgtatttgatctctgtcagcgacagcagaggcagctctttcagtcgcatgatagcccagtgaaggctgtggctgtggacccaaccgaggagtacttcgtgactggctccgctgagggaaatatcaaaatctggagcctaagtacttttgggctccttcacacatttgtcagtgagcacgctcggcaatcgatctttagaaatatcggtacaggggttatgcagatagaaacgggccctgccaaccatattttctcctgcggtgctgacggaaccatgaagatgaggattctcccggatcagtttagccctttgaacgaagtcctgaagaatgacgtgaagtttatgctttag

SEQ ID NO: 185640 - DNA, 9111 bp, synthetic construct
  misc_feature 1..9111: note = Description of Artificial Sequence: Synthetic coding sequence
  source 1..9111: mol_type = other DNA
atgcacctgcaccaggtgctgaccggcgccgtgaaccccggcgacaattgttactccgtagggtcagtgggggacgtccctttcaccgcctatggttccggctgcgatatcgtcattttagccaatgatttcgaatgtgtgcaaatcattcccggcgctaaacacggtaatatccaggtgagttgcgtggagtgttccaaccagcagggccgtatcgcagctagttacggcaacgccgtctgcatctttgagcccctgggcatcaacagccataagcgcaactgccagctgaagtgtcaatggctgaagacgggacagttcttcctatctagcgtcacttacaacttggcctgggacccccaagataaccgtctgctgacagctacagactccattcagctgtgggcccccccgggggatgatattctggaggaagaagaagaaatcgataatactgtcccccctgtgcttaacgactggaagtgcgtgtggcagtgtaagacaagcgtatccgtgcacctgatggaatggtcacccgatggtgagtactttgctacagccggcaaagacgattgcctgctaaaggtctggtatcccatgactggatggaagtctagcataatcccccaagaccaccacgaggtcaagcgacgtcagtcatcaacccaattcagcttcgtatatttagctcatccccgggccgtgaccggattctcatggcgaaagacatccaagtacatgccaaggggctccgtgtgtaacgttctgctgacatcatgtcacgacggagtttgtagattgtgggccgagaccctgctgcctgaggattgtctccttggggaacaaatctgcgagacaacgacctcctctattgcgtcttcactgtctcatgcaggccgacataaagatcgaatccagcacgcccttgaaaccatccaccatttaaagaatctcagaaaggggcaaaggcgttctagtgtcttggtgacacacgcagaactgatgccagatcagaccgccatgcacgaagtgcagcggcatatctcacaccacgcgaacgcattgtgtcactttcatatcgctgctagtatcaaccccgcgaccgatatccctaatgtgctggttggaaccgctttcaacgtagacgatggaaacggaggatttgtggtgcactggcttaataacaaggaattccacttcacctccagtacagaggtcttcatgcaccagctgaggaagctaagcgacaagcaggtcgaccacgaaaatgatgatgccgatcgagaggacgaagagcattcccaggaagatagagagagagggttacacatgaagctggaccacgacttgtccctggatcgggaatctgaggctggcacaggctcttctgaacacgaggatggggagagagaaggcagcccacggacctactccagactatcagtccccatgccactgccaactgtcttgcttgatcgaaaaattgaaaccctccttacagagtggaacaaaaaccctgatatgctctttaccatccaccctgtcgacgggacctttctggtgtggcacgttaaatacctggacgagtacaatccgggtatcttcaggcaggttcaggtgtctttcagctcccgaattccagtcgcttttccctccggcgatgcctcctcactatctaagaacatcatgatgtatgcctgcattaacgcgaccaaagattcgcatcacacccttctgcaccaggaggggatgagcgtggggagccctcacggaagtcagcctcattcacgcagtcactctactcacatgaatatcctggctcctacggttatgatgatttcaaagcatatcgacggctcattaaaccagtgggcagtcacatttgccgataaaagcgccttcacaacagtgttaacagtgtcccacaagttccgatactgtggacaccgctttcacctcaacgatttggcctgtcatagcgttctgcctcttctgctgactagctcccaccacaacgctctgctgacccccgaattggattgtcagtgggatagtgataataaactttctcgactgatggacccagttaagcacattaaaggcagctccaagcaaccactgaggaacgccgctacgcgcacattccatgaccccaatgcgatttactctgaactgatcctctggcgcgtggatccaattggccccctgtcatacaccggcggcgtgtcggaactggctaggatcaactcattgcacaccagcgcttttagcaacgttgcatggcttccgacattgatacccagttactgcctgggtacctattgcaattctgcgtccgcctgtttcgtcgcctcagatgggaagaacctccgactctaccaggcagtagttgatgcccggaagcttctcgacgagctttccgatcctgagtccagcaagttaataggtgaagtattcaacatcgtgagtcagcagagtactgccaggcccggatgcatcattgagctggatgccattaccaaccaatgtggaagtaatacacagctcctgcacgtgttccaggaggatttcattattgggtacaagcctcataaggaggacatggaaaagaaagaaacagagatcttttttcagccctcacagggctacagacctccgcccttttccgagaaattcttcctggttgtcatcgaaaaggatagcaataacaattcgatcctgcatatgtggcacttgcatttaaaatcagttcaggcttgccttgccaaagcttctgaaggtgcctcatcggaaagccttctctccgtgccaggccagaaaaacgttgatagcagtccggagactagcccatcggtcagccccatgccccacagttcatccattgctaatctccagacagcttcaaagctgatcctgtcatcacgcctagtgtacagccagccactcgatctaccagaaagtgttgaggtgattcgcgccactccaagcgctggccacttatctagctcatcgatctaccctgtgtgtctggccccctacctggtggtgacaacttgttccgacaataaggtcaggttttggaagtgctgcatggaggccaatcctgagtgtaacaagagtgacgagaaagaaatttatcattggaagcggtggcctctgatgaatgatgagggcgaggataatagcagcacagtttcaatcgtggggaggcctgtggcagtcagctgttcatacacgggcaggttggccgtcgcttataagcagccaatccaccataacggcttcgtgtccaaggagttcagcatgcacgtgtgcatctttgagtgtgaatccacggggggctccgaatgggtactggagcaaaccatccacttagacgatctggtcaaggtcggcagcgttctggactcaagagtttccgtcgattcgaatttatttgtctatagtaagtcggacgcattgctctcgaaagatcggtacttaatcccaaacataaaacaccttgttcatttggactgggtatccaaggaagacgggtcccacattctcacagtgggcgttggcgcaaacatctttatgtacgggcggctgtctggcatcgtgacagagcagacaaactctaaggatggagttgcagtcattacccttcccttggggggcagcatcaagcagggagtgaagagccggtgggttttacttagatcaatcgatcttgttagcagtgtggatggaacaccgagcctgcctgtatcactctcctgggtcagggacggtattctggttgtaggtatggattgcgagatgcatgtctatgcccagtggaagcacgcagtgaaattcggtgatacagaggcagattcctctaacgccgaagaagcagccatgcaggaccattccacctttaagtcaaacatgctggcccgcaagtcggtggtagagggcaccgcgatttccgacgacgtcttttgcagtccaaccgtgattcaggatgggggactgttcgaggccgcccatgtcctgtcgccgacattacctcagtatcatcccacgcagcttttggaactgatggacttagggaaagtccggagggctaaagccatcctttctcatcttgtcaaatgcatcgctggggaggtagccatagtacgagatcccgatgccggagaaggtactaagcgccacctctctagaacaatttcagtgtcaggaagtaccgccaaggagaccgtcacagtcggtaaggacggaacgagggattataccgagatcgattctatccctccattacctttgtacgcgcttctcgccgcagatcaagacaccagttatagaatcagcgaagagagtaccaaaatcccgcagtcctacgaggatcagaccgtgagtcagcccgaggatcagtactcagagttattccagatacaggatattcctactgacgacatcgatttagaacccgaaaaacgcgaaaataaaagcaaggttatcaacctatcgcagtatgggcccgcatacttcggtcaagaacacgcgcgggttctatccagccatctgatgcacagctcgctccctggcctgaccagactggagcaaatgttcctcgtagctcttgctgacactgtagctaccacaagcaccgagctagacgaatcaagagacaaatcctgcagcgggagggatacccttgacgagtgcgggctgagatacttgctggccatgagactgcacacctgcctcctgaccagccttcctcccttgtatcgagtacagttgctgcatcagggcgtttccacttgtcactttgcctgggcgtttcactcggaagcggaggaggaactgattaacatgatcccagcgatccagagaggtgatcctcagtggtccgagttgcgcgccatgggcatcggctggtgggtgcgtaacatcaataccctccggcgctgtattgagaaagtcgctaaggcgagctttcagcgcaataacgacgctctggatgctgcattattttacctatccatgaaaaaaaaagccgtcgtgtgggggctctttaggagccagcacgacgagaaaatgaccactttcttttcacataatttcaacgaagatcgttggcggaaggcagcgctgaagaacgcattctccctgctgggcaaacaacgcttcgagcaatccgccgcatttttcctcctggctgggtcactgaaggacgcgattgaggtatgccttgaaaaaatggaggacatccagctggccatggtgatcgccagactctatgagagcgaattcgaaacaagctctacgtatatcagtattctcaaccagaagatcttggggtgtcaaaaggacggttccgggttctcctgtaagagactccaccctgatccttttctccgaagtcttgcctattgggtgatgaaagattacactcgtgctctcgacactctgcttgaacagacaccaaaggaggacgacgagcaccaggtgataataaagagctgtaatccagtcgcattctcgttttataactacctgcggactcacccactcctgatacgaaggaatctggccagcccagagggaacactggcaacactggggttaaagactgaaaagaacttcgttgacaaaatcaacctgattgagaggaagcttttctttacaaccgcaaatgcgcacttcaaggtgggctgcccagtcttggcactggaggtactttctaagatccccaaggtgactaaaactagtgcgctaagtgccaagaaggatcagcctgacttcattagtcacagaatggacgatgtgcccagtcactcaaaagcactttcggacggcaatggatctagtgggatcgagtggtccaacgttacatcctcccaatatgactggtctcagccaatcgtgaaggtagatgaagaaccactcaacctggattggggggaggaccacgacagtgccctggatgaggaggaagacgacgccgttgggttggtgatgaaaagcactgacgcccgagaaaaggacaagcaatctgaccagaaggcctccgaccctaacatgttattgactccacaggaagaagacgacccggagggggacacagaagtcgacgtcatcgcagaacagctgaagtttcgcgcgtgcctcaagatactgatgaccgagctcaggaccctggcgacggggtacgaagtagatggtgggaaactccggttccagctgtataattggctggagaaggagatcgccgcccttcacgagatttgcaaccatgaaagtgtcattaaggagtattccagcaaaacctactccaaggttgagagtgacctactggaccaggaagagatggtcgataagcctgatattggtagttacgagagacaccaaattgagcggcgtcgactgcaggctaaaagagagcacgccgaacggcgcaagtcctggttgcaaaagaatcaggatttgctgagggtgtttcttagttattgctcccttcatggtgctcagggcgggggcctggcaagcgtacgcatggaactgaaattcctgttgcaggagagccaacaggagaccactgtgaaacagttgcaatctcctctaccccttcccacaacccttccactgctgtctgcatccatcgccagtaccaaaacagtgatcgcgaatcccgtattgtatttgaacaatcatattcatgacatcctgtataccatcgtccaaatgaagacacccccccacccaagtatcgaggacgtgaaagtgcacaccctacactcccttgccgcaagcctgtccgcgtccatttatcaagctctgtgtgatagccactcatacagccaaacagagggaaaccagttcaccggcatggcctaccaaggactgttgctgtctgacaggcgccgactccgcacagagtctattgaggaacacgctactcccaattccagtccagcccagtggccaggtgttagttcgttgataaacttgttgtcatccgcacaagacgaagaccagccgaagcttaacattctgctgtgcgaggcagtggttgccgtgtatctctccctgttgattcacgccctggcgaccaattcctcctccgagcttttccgcttggcagctcatccattgaacaacaggatgtgggccgctgtctttggtggaggagtgaagctagtcgtgaagccgcgcagacagtccgaaaacatcagcgcgccaccagttctttcagaggatattgataaacaccgtagacgttttaacatgcgcatgctggtgccaggtaggcctgttaaagacgcaacacccccaccggtcccagctgaacgcccctcctacaaggagaagtttataccccccgaactgagtatgtgggattatttcgtggcgaaaccttttctgccactctccgactccggagttatatatgacagcgacgaatcaatacactccgacgaggaggacgacgctttcttcagcgacacccaaatccaggaacatcaggaccccaattcttactcctgggccctgctgcacctcaccatggtcaagctggccctgcacaatgtgaagaatttcttcccaatcgccgggctggagttcagcgaacttccagtgacttccccgttggggattgcagtgatcaagaatctcgagaactgggaacagattttacaagagaaaatggatcaatttgaaggtccccccccaaattacattaacacctacccaacagacttatcagtcggcgcaggcccagctatcctgagaaacaaggccatgctcgaaccagagaatacccctttcaagtcacgagactctagtgcttttcccgtgaaacgactgtggcactttctggtcaaacaggaggtcttacaggagacctttatccgctatattttcactaagaaacgcaaacagagtgaggtggaagccgacttaggatatcctgggggtaaggcgaaagttattcataaagaatctgatatgataatggccttctccgttaataaggctaactgcaatgagatagtcttggcctccacccacgatgttcaggaactggatgtcacgtcactgcttgcctgccagagctacatttggatcggagaagagtatgatagagagtcgaagtcaagcgatgatgtcgattaccgcgggtctacgactacactataccagccaagtgctacctcttacagcgcctcccaggtacaccctccgagttccctgccctggctcgggacaggccagacatccacaggcgctagtgtgcttatgaagcgcaatcttcataacgtgaaacgaatgacttctcaccccgtacaccagtattatctcacaggtgcccaggatggatccgttcggatgtttgaatggacccgccctcaacagctcgtgtgtttccgccaggctggcaacgcgcgcgtgacccgactgtactttaattctcagggcaacaagtgcggtgtcgcagatggagagggattcttatcaatctggcaagtgaatcaaacagccagtaaccccaagccatacatgagctggcaatgtcactcgaaggccacctccgacttcgccttcataaccagtagtagcctggtcgcaacttctggccactccaacgataacagaaatgtgtgtctgtgggacactctgatatctcccggaaacagcctgattcacggattcacatgtcacgatcacggtgcgaccgtcttgcagtatgcccccaaacagcagttactgatttctggcggcaggaagggccacgtttgcatcttcgacatcaggcagcggcaactgattcacacatttcaagcgcacgactccgccatcaaggctctcgcactagacccctatgaggagtactttacaaccgggagcgccgaaggaaacattaaggtatggaggttgacaggtcacggactaatacatagcttcaaaagtgaacacgccaagcagtccatctttcgcaatattggtgcaggagtgatgcagattgatatcattcagggaaaccggctcttctcatgcggggctgatggtacactgaagacgcgcgtgctgcccaacgcattcaacattcctaatcgaatactggacattttgtag

SEQ ID NO: 185641 - DNA, 1809 bp, synthetic construct
  misc_feature 1..1809: note = Description of Artificial Sequence: Synthetic coding sequence
  source 1..1809: mol_type = other DNA
atgtgggactacttcgtggccaagcccttcctgcccctgagcgacagtggagtgatctatgactcagacgaaagcatacacagtgacgaagaagatgacgccttcttctctgacactcaaattcaggagcaccaggacccaaactcatactcatgggcccttctgcatctgactatggtcaaactggccctgcacaatgtcaaaaatttcttcccaatcgctggcctcgagttcagtgagctgccagtcacttcaccactcggaatcgccgtgattaagaatctggaaaattgggagcaaatcctgcaagaaaagatggatcagtttgaagggccaccaccgaactacatcaatacatacccaacagatctgtccgtcggagccgggcctgctatcctcaggaacaaagctatgctcgaaccagaaaatacacctttcaagagtcgggactcaagtgcattcccagtcaagcgcctctggcacttccttgtgaaacaggaagtccttcaagaaacattcattaggtacatttttactaaaaaaagaaaacaatccgagtctatcgaggaacacgtggagcaggtcaaccaaaactgcatcgccgaagactgccatatcaaagtggaagcagatctgggctatcccggaggaaaggcgaaggtcatccacaaggagtctgacatgatcatggcttttagtgtgaacaaggcaaattgcaatgagattgtactagcctctactcatgacgtccaggaactcgatgtcacatccctgctggcctgtcaatcctacatttggatcggcgaagaatatgatcgtgagtccaaatccagtgacgacgtagactacagaggttctacaaccaccctttaccagccctcagccacctcatatagcgcttcgcaggttcacccccccagctccctgccctggctgggtacggggcagacgtcaacgggagccagcgtgttgatgaagcgcaatctgcataatgtgaaaaggatgacctcccaccccgttcaccaatactacctgactggcgctcaagatggctctgtgcgaatgtttgagtggactcgccctcagcagcttgtgtgcttcaggcaggcaggtaacgcgcgggtcactaggttatactttaatagccaggggaacaaatgtggagtagctgacggggaaggctttctgagcatttggcaggttaaccagaccgcgtccaatcccaagccatacatgagttggcagtgccactcgaaagccaccagcgactttgcattcattacatcctcgtcccttgtggctacatcaggccacagcaatgacaataggaatgtctgtctctgggacaccctcatttcaccaggaaattctctgattcacgggtttacatgccacgaccacggggccactgtgcttcaatacgctcctaagcagcagctgctgatctcgggaggacgaaaggggcacgtgtgtatattcgacatcaggcagaggcagcttatccatactttccaagctcacgactctgctatcaaggccctagcccttgacccctacgaagaatattttactacaggtagcgcagaggggaacataaaggtgtggagactaactggacacgggctgattcattccttcaagagcgaacacgctaagcaatccatttttagaaacatcggggccggagtgatgcagatagatatcattcaggggaatcggttgttttcatgcggggccgacggtaccctgaagacacgtgttttgcctaacgcattcaacattcctaatagaatactggatatcttatag

SEQ ID NO: 185642 - DNA, 7203 bp, synthetic construct
  misc_feature 1..7203: note = Description of Artificial Sequence: Synthetic coding sequence
  source 1..7203: mol_type = other DNA
atgcacctgcaccaggtgctgaccggcgccgtgaaccccggcgacaactgttattccgtgggtagcgtgggtgatgtgcctttcaccgcttatggatctggatgcgacatcgttatccttgccaatgactttgagtgtgtacagatcatccccggagcaaaacacggaaatatacaggtgagctgcgtcgagtgtagtaatcaacaagggcgcatcgcggcatcatatggtaacgcagtgtgtatcttcgagcctctgggcatcaactcccacaagcgtaactgtcagctgaaatgccagtggcttaagacagggcagttctttctttcatctgtgacttacaacttggcctgggacccacaggataacagactcctgaccgccacagatagtatccagctttgggcccccccaggcgatgacatcttggaagaggaggaagagatcgataatacagtgcccccagtgttaaatgattggaagtgcgtctggcagtgtaagacctcggtgagcgtgcacttgatggagtggagcccagacggtgaatatttcgcaaccgccggcaaggacgactgcttgctgaaagtctggtaccctatgaccggttggaaatcatcgatcattcctcaagaccaccacgaagtgaagaggcgacagagttctactcaattttcttttgtctatttagcccatcctcgggctgtcaccggattctcctggaggaaaacttcgaaatatatgcccagaggctcggtctgcaatgtactgcttacctcctgccatgatggcgtttgtagattgtgggcagaaacactcctgcctgaagattgcctgctcggggagcagatctgcgaaactacaacgtcgagtattgcatccagtctatcccatgcgggaaggcataaggatcggatccaacacgctttggaaactatacaccacctgaagaatctcaggaaaggccagaggcgctcctccgtcctggtaacgcacgccgagttgatgcccgatcagacagccatgcatgaagttcagcgtcatatttcacatcatgccaacgctctgtgtcatttccacatcgcagcgtccattaatcctgccaccgatattcccaacgttctggttgggaccgcgttcaacgtggatgatggaaacggcggctttgttgtgcactggctgaacaataaagaattccactttacttcaagcacggaggtttttatgcaccagctcagaaagcttagtgacaagcaggtcgatcatgagaacgatgatgccgaccgcgaggacgaggaacactctcaagaggaccgggagagaggcctccatatgaagttggatcacgatttgtctttagatcgcgagtcagaagccggcaccgggtcatccgagcatgaagacggggagagagagggtagcccccggacttatagccgcctttccgtgccaatgcctctgccaacagttctgctggatcgtaagatcgaaaccctgctgacagaatggaacaagaaccctgacatgctatttaccatccaccccgtggacggtacttttcttgtgtggcatgtcaaatacctcgacgaatacaaccccgggatttttaggcaggtgcaggtgtccttttcctcccgcatacctgtagcattccctagcggagatgccagttctctgtctaaaaatattatgatgtacgcctgcatcaatgctaccaaggattcacaccacaccctgctccaccaggaaggaatgtcagtgggaagcccacatggatctcagccacactccagaagccatagcacccacatgaacatcctcgcacctacagtcatgatgatatcaaagcacatcgatggatcattgaatcagtgggctgttacattcgccgacaaaagcgcctttacgacagtgcttaccgttagccataaattccgctactgcggccaccgtttccacctgaatgaccttgcctgtcattccgttctacccctgctgctaaccagcagtcaccacaacgccctgctgacccctgagctggattgccagtgggactccgataacaagttgagcaggctgatggatcctgttaagcacatcaagggctcctccaaacaaccactgcggaacgccgccacgaggacttttcacgatccgaatgcaatctattccgaattaatcttgtggcgggttgaccccatcggccccctttcatacacaggcggagtgtctgaattggctcggatcaatagcctgcacacctctgctttttccaatgtagcctggctgcccacactcataccttcatactgtctcggaacatactgcaattctgcctccgcctgcttcgtagcttccgatgggaagaatctcagactttaccaagcggtcgtggacgctcgaaagttgctcgacgagctgagtgaccctgagtccagtaaactgataggggaagtctttaatattgtcagccaacagagcactgcacgcccggggtgtatcatcgagctagacgccataaccaaccagtgtggatcgaacacacagctattgcacgtattccaagaagactttataatagggtacaaacctcataaggaggatatggagaaaaaggagactgagatatttttccagccatcccagggctatagacccccgccattcagcgagaaattcttcttggtggtcatagagaaagacagtaacaataactccattcttcacatgtggcatctgcacctgaaatctgtccaagcatgcctaggtcgggataccttggacgagtgcggcctgcggtacctgcttgctatgagattgcatacatgcctgctgaccagccttcctcccctctatcgcgtacaattgcttcatcagggtgtttcaacgtgtcattttgcttgggccttccattcagaagccgaagaggaattgatcaacatgatcccagccatccagcgcggagatccacagtggtcagaactccgggccatggggatcggttggtgggtcagaaatataaacacattgcggcggtgtatcgagaaagtggctaaggcgtccttccaacgcaataacgatgcactcgacgcggccctcttctaccttagcatgaagaagaaagcagtcgtctggggtcttttccgctctcagcatgatgagaagatgacaacttttttttcacataactttaacgaggatagatggcggaaggccgccctgaaaaacgccttttctttacttggtaaacaacggttcgaacagtcagcagcattttttctactggctggctccctcaaggatgccatcgaggtatgtttggaaaaaatggaggacatccagctggctatggtgattgcaaggttgtatgagagcgagttcgagacctcctcaacctacatctcaattctgaaccagaaaattttgggctgccagaaggacgggtctgggttcagctgcaaacgcttacacccagatccatttcttcgctccctagcctactgggtgatgaaggactacacgcgcgcactggatacgcttctggaacagactccgaaagaggacgatgagcatcaggtcatcattaaatcttgtaacccagtagccttcagtttttataactaccttcgaacccaccctctgctgatcaggcggaacctggcctccccggaagggaccctagctacattaggtcttaaaaccgagaagaatttcgtcgacaaaatcaatctgattgagcgaaaattgttttttacaacagctaatgcccattttaaagttggctgccctgtcttagctcttgaggtcttaagcaaaatccccaaagttacaaagacatctgccctttccgccaagaaggatcagccagactttatttctcacagaatggacgatgttccaagtcatagtaaggctctgtcagacggaaacggctcctctggcatcgagtggagtaacgtgacttccagtcagtacgattggtcgcagcccatagttaaagtggacgaagagcccctgaatctagactggggagaagaccacgattctgctctcgacgaagaggaagacgatgctgtaggcttagtgatgaagtcaacggacgcccgcgaaaaggataaacagagcgaccagaaagcctctgatcccaacatgctcctgaccccccaagaggaggatgacccagaaggcgataccgaagtggatgtgatagctgagcagttgaagttcagagcctgtctcaagatacttatgacagaactgcgaaccttggctacaggatacgaggttgacggagggaagctgcggttccagctgtacaattggctggaaaaagaaattgctgccctgcacgagatctgtaaccacgagagcgtgattaaggagtacagctctaagacatacagcaaggtcgagagcgatctcctggaccaggaagagatggtggataagcccgacatcggatcttacgagcggcaccagatcgagcgacgcaggttgcaagccaaaagagaacacgctgagcggaggaagtcctggcttcagaaaaatcaggatctgttacgcgtcttcctaagttattgttccctccatggtgctcaggggggtggactggccagcgtccgcatggagttgaaatttctcctccaagagtcccagcaggaaaccacagtgaaacagttacagtcccccttgccattaccaaccacacttcctctcctgtccgcttcaatcgcatctaccaaaacagtaatagccaacccggtgctttatctgaacaatcatatacacgacatcttatatactatagtacagatgaagacaccccctcatccatctattgaggacgtcaaagtgcatactctgcactccctggctgctagcctgtctgcttctatttatcaagcactgtgcgacagccattcctactcacagaccgaggggaatcagtttactggcatggcttaccagggcctgctcctcagtgatagacggcggctcaggaccgagagtattgaggaacatgctacgcctaacagtagccccgcccaatggcctggggtgtcatcacttataaacttactgtcctccgctcaggacgaagaccagccaaaactgaatatcttgctatgcgaggccgtggtcgccgtatatctgtcgttgctgattcatgctctggccactaactcttcctcggagttgtttcgcctggctgcacacccgctgaataaccgcatgtgggctgccgtttttggtggaggggtcaaactcgtggtgaagccaagaaggcagtctgaaaacatctccgctcctcccgtgctttccgaagatatcgataaacaccggcgtcggttcaatatgcgtatgctggtcccaggtcgccccgtcaaagacgcaaccccacctcccgttcctgccgaaaggccctcgtacaaggagaaattcataccaccagagctgtccatgtgggactactttgtagctaagccgttcctgccacttagcgacagcggcgtaatctacgactctgatgagtcaatccactccgacgaagaagacgacgccttcttctccgatacgcaaatccaggagcatcaggatcctaactcttatagttgggccctgttgcatctcaccatggtaaaactggctttgcataatgtcaaaaacttttttcctatagctgggttggaattttccgaacttcccgtcaccagcccattgggcatagccgtaatcaagaatctcgagaattgggagcagattcttcaggagaaaatggaccagttcgaggggccccctcccaactacatcaacacgtatcctacagatttatcagtcggcgcaggcccggcaatcctgcggaataaagccatgctggagccagaaaatactccctttaagagccgagactcatccgcgttccccgttaagagactgtggcacttcctcgtgaagcaggaggtattgcaggaaacttttattcggtacatttttacaaagaagcgtaaacagagcgaggttgaggctgatttagggtatcccggtgggaaggccaaggtgattcacaaggagagtgacatgataatggcattctccgtgaacaaggccaactgtaatgaaatagtacttgcttctacacatgatgtgcaggaattggacgtgacatcgcttcttgcatgccaatcatatatatggattggggaagagtatgaccgcgagtccaagtcaagtgacgatgtagactaccgcgggtccactacaacactatatcagccaagcgcaactagctattctgcatctcaagtacaccccccaagctcgctgccttggctggggaccggccagacgagcactggggcttctgtgctgatgaaacgcaacctgcacaacgtgaaacgcatgacgtctcacccagtgcatcagtactacctaacaggagcccaggacgggagtgtcagaatgttcgaatggacccggccacagcaattagtctgcttcagacaggcaggcaatgcccgggttactagattgtactttaactcccaggggaacaagtgcggagttgcagatggcgagggctttctctccatttggcaagtgaaccagacagcctctaatcctaagccttatatgagctggcagtgtcactctaaagccacatccgatttcgcctttattacgtcgtcatccctggttgcgacaagcggccactcaaatgacaacaggaacgtgtgtctatgggacaccctgattagccccgggaacagcctgatacacggattcacatgccacgaccatggggctacggtgctccaatacgcacctaagcagcagctccttatttctggtggccgtaaggggcacgtttgcatatttgatatccggcagaggcagctgatccacaccttccaggcccacgactcagcaattaaggcgctcgcgctggacccttacgaggagtacttcactactggctctgccgagggcaatatcaaagtctggagactgacaggccacggtctgattcactccttcaaatctgaacatgcgaaacagtctatctttcgaaatatcggcgcgggtgtaatgcaaatcgacatcattcaggggaatcgccttttttcgtgtggcgcagacggtacattgaagaccagagtcctacccaacgccttcaatatccctaatcggatccttgatattctctag

SEQ ID NO: 185643 - DNA, 9114 bp, synthetic construct
  misc_feature 1..9114: note = Description of Artificial Sequence: Synthetic coding sequence
  source 1..9114: mol_type = other DNA
atgcacctgcaccaggtgctgaccggcgccgtgaaccccggcgacaattgctactccgtgggctcagtcggggatgtccccttcaccgcatacggtagtggctgcgatatcgttatcctagcaaacgactttgagtgcgtgcaaataataccgggagctaaacacggaaacatccaggttagctgcgtagaatgcagcaatcaacaaggtcgtattgctgccagctacggtaacgcagtttgtatattcgagcctctgggtataaatagccataaaagaaactgtcagctgaaatgccagtggctgaagaccggtcagttttttctcagtagcgtcacttataatctggcctgggacccccaagacaatcggttgttaaccgcaaccgacagtatccaactgtgggctccccctggggacgacatcctggaggaagaggaggagatcgataataccgtgccaccagtactgaacgattggaaatgcgtgtggcagtgcaagacaagtgtgagcgtgcatctgatggagtggagtccagatggtgaatactttgcaacggcaggaaaggatgactgcctcctgaaagtctggtaccccatgaccggttggaagagctctatcattccgcaggatcatcatgaggtaaaacggcggcaatcatccacacagttttcttttgtatatctggcacacccaagagctgtcaccggattctcttggcgcaagacctctaaatacatgccaagaggctctgtgtgcaatgtcctcttgaccagttgtcatgatggtgtctgtcggctgtgggctgaaactctgctccccgaagattgtctgcttggcgaacagatttgtgagactacgaccagctccatcgccagtagcctgtcccatgctggacgtcacaaggatagaatccaacacgccctcgagactatccaccatctgaagaatctcagaaaggggcaacggagaagcagcgtacttgttacacacgcggaactaatgccagatcagacggccatgcatgaggttcagcgacacatctctcatcacgccaacgctttatgccactttcatatagccgcttcaataaaccctgccaccgatatccctaacgtattggtaggcactgccttcaacgtggacgacggcaatggggggttcgttgtgcactggctcaacaacaaggaattccacttcacgagtagcaccgaagtatttatgcaccagctgcggaaattgagtgataaacaggtcgatcacgaaaatgacgacgctgacagagaggatgaagagcattcccaggaagatcgcgaacgcggactccacatgaagctagaccatgacctgtccttggatcgagagtccgaggctgggacggggtcgtccgagcacgaggatggagagagagagggctccccaaggacatactcaaggttgtcagtgcccatgcccctgccaacagtactgttggataggaagattgaaactctcctgactgaatggaacaaaaaccccgacatgctttttacaatccatccagttgatggcacctttctggtttggcacgtaaaatatttggacgaatataatcccggcatatttcgacaagtacaggtcagtttttcttccagaatccccgtagcgtttccaagtggtgatgccagctctttgtcaaagaacatcatgatgtacgcatgcattaatgccaccaaggattcacaccacactctgttacatcaggaagggatgagcgtggggtcaccgcatggctcccaaccccacagccggagccattccacccacatgaacattttggcaccaaccgtgatgatgatcagcaaacacattgatggaagcctgaaccagtgggcagtgacgttcgcagacaagtccgctttcacaactgtgctgacagtctcgcacaaatttaggtactgcggccacaggttccatctcaacgacctggcctgtcactcagttctgccattgcttctgacttcctcccatcacaacgcactactgacaccagaactggactgtcaatgggactccgataataagttgtctagactgatggatcccgtgaagcacatcaaaggatcctccaagcagcctctgcgtaacgcagcaactagaactttccatgatcctaatgccatctatagcgagttaatcctctggcgggtggaccctatcggcccactttcatataccgggggcgtctctgaacttgcacgtatcaatagcctgcatacaagcgccttttccaacgtagcctggctcccaaccctgattccctcctactgcctggggacgtactgcaacagtgcaagcgcatgctttgtggcttctgatggaaagaatctgagactttaccaggctgtggtggatgccagaaagctcctagatgaacttagcgaccctgagtcctccaagttgataggcgaggtgttcaacatcgtctcacagcagtcaacagcccggcctggatgcattatcgagctggacgcgatcaccaatcagtgtggttcaaatacacagctacttcacgtgttccaggaggacttcatcatcggctacaagccgcataaggaggacatggaaaagaaggaaacagagatcttcttccagcccagccaaggatatcgcccccctccgttctcagaaaaatttttcctcgtggttatcgagaaggacagcaataacaattccatactacacatgtggcacctgcacctgaagtcggtgcaagcttgtctggctaaagccagtgagggtgcctctagcgagtctttactgtctgttccaggtcaaaaaaatgtggactcctctccagagacctccccgtccgtaagtccgatgccccacagttcatctatagcgaacttgcagaccgcctctaaattgattttgtcctcacgcttggtctacagccaaccgctcgacttgccggaatccgtggaagtgatccgggccacgcccagcgcgggtcacttgtctagcagctccatataccctgtctgtttggctccctacttagtggttacgacttgttccgacaataaagtccggttctggaaatgttgtatggaagccaatcctgagtgtaataagtcagacgagaaagagatttaccattggaagcggtggcctctaatgaacgacgaaggggaggataattccagcactgttagtatcgtgggccgcccggtggccgtgagctgcagctacaccggaagactagccgtggcttacaaacaacccatccaccataatgggtttgtgtcaaaagagtttagcatgcatgtatgcatttttgaatgcgaatctactggtgggagcgagtgggtgttggagcagactatccatcttgacgatctggtcaaggtcggatccgtcctggactctagagtgtctgttgattctaatctgtttgtgtatagcaaatcggacgccttacttagcaaagatcgatatctcatcccgaatatcaagcatctcgtgcatcttgactgggtcagcaaggaagatggttctcacattctgacagtcggcgtaggcgctaatatcttcatgtatgggagattaagcgggatagtgacggagcaaactaactcaaaagatggggttgcagtgatcacactacctctgggaggaagtatcaaacagggggttaagagcagatgggtattactccggtccattgatctggtttccagtgtggacggtacaccctcccttccagttagtctaagctgggtccgggatgggatcctggtggtgggcatggactgcgagatgcacgtctatgcacagtggaagcatgccgttaaatttggagacaccgaggcggactccagcaacgccgaggaagcagccatgcaagaccattccacattcaagtccaacatgttagcaagaaagagtgtggtcgaagggacagccattagcgatgatgtgttctgcagtccaactgttattcaggacggcggcctgttcgaagcggcacacgtactgagcccgaccctgccacagtaccatccgactcaactgctcgagctgatggacttggggaaggttcgccgcgcgaaggcgattttgtctcacttggtgaagtgcatcgccggtgaggtggcaatcgtgagggaccctgacgccggtgaggggacgaaacggcacttatcacggacaatctccgtcagcggatctacagcaaaagagacagtcacagtgggcaaggacggcacgcgggactacacagaaattgactcaatccctcctctccccctttacgcacttctcgcagctgaccaggacaccagctacaggatctctgaagaatctactaagatacctcagtcttacgaagatcagaccgtgtctcagcctgaagaccagtactccgagctgtttcaaatccaagatatacctaccgatgacattgacctcgagcccgagaagcgagagaacaagtctaaggtcatcaacctgtcgcagtacgggccggcttactttggtcaggaacatgccagggtgctctcctcccacttaatgcacagctctttgcccggcctgactaggctggagcaaatgtttctagtggcactcgcagatacagtcgcaaccaccagcaccgaactggatgagtcacgcgacaagagctgctcaggcagagacactctagatgagtgcggcttgaggtacttactcgccatgcggctgcacacttgcctgctgacttctctgccgcccctataccgcgttcaacttctacatcagggcgtctctacttgccatttcgcctgggcgtttcacagcgaggctgaagaagaacttattaacatgatccccgccatacagagaggcgaccctcaatggtccgagctgcgagctatgggtatcggttggtgggtccgtaacatcaacaccctccggcgatgtatcgaaaaggttgcgaaggcctccttccagcgtaataatgatgcgttagatgctgcccttttctatctgtcgatgaagaaaaaggcagtcgtgtggggactgtttcgcagccagcacgatgagaaaatgaccacgtttttttctcataactttaacgaagaccgttggcgcaaagccgcgctgaaaaatgcattttcccttctcggtaagcagcgctttgagcagtcagctgccttctttttactggcaggcagtctgaaagacgctatcgaagtctgtcttgagaagatggaagatattcagctggccatggtcatcgctcgcctctacgaatcagaattcgagacaagtagcacctacattagtatccttaatcagaaaattctcggctgtcagaaagacggttctggattctcctgcaagaggcttcacccagacccatttctccggagtttagcctattgggtgatgaaggattatactcgcgcgttggacacactgttagagcagaccccgaaagaagacgatgaacatcaggttatcataaagtcttgcaatccagtggctttcagtttttacaattaccttagaacgcatcccttactgattagacgcaacctggcatctccagagggaaccttagctaccctgggcctgaaaacagagaagaattttgtcgacaagattaacctgatcgaacggaagctgtttttcacaaccgctaacgcccacttcaaggtcgggtgtccagtccttgccctggaagtcctttcgaaaatccccaaggtcactaagacctcagcactcagtgcgaaaaaagaccaaccagatttcattagtcatagaatggatgatgtgccctctcactctaaggctttatctgacggcaacgggtcaagtggaatcgaatggagtaatgtgacctcttcccagtacgactggagccagccaattgttaaagtggatgaggaaccactgaacctggattggggagaagatcacgactccgcactggatgaagaagaagacgatgccgtcggtttagtgatgaagagtactgatgcgcgggagaaagataagcaaagcgaccagaaagcctccgatccgaacatgttgctcactccccaggaggaagatgatccagagggggacactgaggttgatgtcatcgccgaacagttgaagtttcgcgcctgtttgaaaattctcatgaccgagctgcgaacgctcgcaacaggttatgaggtcgacggtggcaaactccgattccaattatataactggctggagaaagagatcgccgcattgcacgagatttgtaatcacgaatcagtcattaaagagtattcaagtaagacctatagcaaagttgagagcgacctgctcgaccaagaagaaatggtggataagcctgacatcggatcttatgaacggcaccagatcgaacgaaggcgtttacaggctaagagggagcacgccgagaggagaaaaagttggctgcagaagaaccaagatcttttgagagtgtttctctcttattgcagtctgcatggagcacagggcggcggtttggcctctgtgcgaatggagcttaaatttctgttacaagaaagtcagcaagaaacaactgtgaagcaattgcagtctcctttgcctttaccaaccacccttcctctgctgtctgcaagcatcgcctccacgaaaacggtgattgctaaccccgtgctttatctaaataatcacattcacgatatactgtatacgattgtgcagatgaaaacccctcctcatccttctatcgaggacgtcaaggtccataccctgcactcgctcgccgctagcttatcagccagtatataccaagctctatgcgacagccactcctactcctcacaaaccgagggcaaccagttcactggtatggcctaccaagggttgctcctttctgataggagacgcctcaggaccgaatcaatcgaggagcatgcaacccccaacagttcacctgcacagtggcccggagtgtcctctctgatcaacttactttcaagtgcacaagatgaggatcaacctaagctgaacatcctgctatgtgaggccgtcgtagccgtgtacctatcccttctcatacatgcgctggctaccaattccagcagtgagctctttcgcctggccgcacaccccttgaacaataggatgtgggctgcggtgtttggcggcggcgtgaaattagtagtaaagccacggcgacagtcagaaaacatctcagcccccccagtcctcagtgaggacatcgataaacatcgacgccggtttaatatgcgcatgttggtgcctgggagacctgtgaaggacgcaacaccaccaccggtccccgctgaacgcccctcctataaagaaaaattcattccgcctgagctgagcatgtgggactactttgtggcaaagccgtttctcccactaagtgactcaggagtaatctacgacagcgacgagagcatccattccgacgaggaagacgatgctttcttctctgatacgcagatccaggaacaccaggacccaaacagttactcttgggccctgctgcatctgaccatggtcaaactggctctgcacaacgtcaagaacttcttccccattgcaggtttggagttcagtgagttacccgtcacttctccactaggcatcgctgttattaagaacttagagaattgggagcaaatactccaggagaaaatggatcagtttgagggcccccccccaaattatataaacacctatccaactgacctatctgttggagcgggcccagcaatcctccgcaataaagccatgctggagcccgaaaatacacctttcaagtctagggacagctccgccttccccgtaaaacggctgtggcacttcttagtaaaacaagaagtattgcaggaaaccttcattagatatatttttacaaagaaacggaagcagagcgaggtagaagccgacctggggtatcctggtgggaaagccaaagttatccacaaagagtccgatatgattatggcattttccgtcaataaggccaattgcaatgaaatcgtacttgcgtctacacacgatgtccaggagctggacgtgacctcactgctggcgtgccagtcttatatttggattggagaagagtatgatagagaaagcaaatccagtgacgatgttgattataggggttccaccactactttatatcaacccagcgccacctcttattccgcctcgcaggtgcatccaccgagttccctaccgtggttgggcactggccagaccagcacaggcgccagcgtgctgatgaaaaggaacctccataacgtcaagaggatgacaagtcacccagtgcaccagtattatctaactggtgcccaggacggaagcgtgagaatgttcgagtggacccggccccagcagcttgtgtgtttccgacaagcaggaaatgctagggttacgcgcttgtacttcaacagccagggaaacaagtgtggcgtggcagatggagaagggtttttgagcatatggcaggttaaccagacggccagcaaccccaaaccttatatgtcttggcaatgccatagcaaggctacgtccgattttgcttttattacctcctcaagcctggtcgccacctcaggacacagcaatgacaaccgcaatgtgtgcctgtgggacacactgatctccccaggcaacagccttatacatggatttacatgtcacgatcatggcgcgaccgtgctgcagtacgccccaaagcagcagttgctgatcagtggaggacgaaagggccatgtgtgtatttttgacatccggcagaggcagcttatccacaccttccaagcacatgacagtgccatcaaagctctcgcacttgatccctatgaggaatactttaccaccgggagcgccgagggcaatatcaaggtttggagactgacaggtcatggcctcattcacagctttaagtcagagcacgcgaaacaaagtattttccgaaacatcggggccggggtcatgcaaatcgacattatccagggcaataggcttttctcctgtggtgcagacggaacactgaagactcgagtgttgcctaatgcgttcaatattcccaaccgcatcctggacattctgtag

SEQ ID NO: 185644 - DNA, 4851 bp, synthetic construct
  misc_feature 1..4851: note = Description of Artificial Sequence: Synthetic coding sequence
  source 1..4851: mol_type = other DNA
atgcccgcccggaccgcccccgcccgggtgcccaccctggccgtgccagccatctccctgccagacgacgttaggagaagactgaaagatctggagcgcgactccctgactgagaaagaatgtgttaaggaaaaattaaacctgctgcacgagtttctgcagactgagattaaaaaccagctttgcgacctggagacgaaactcaggaaggaggaactttctgaagagggttatcttgccaaagtgaaatcactgcttaacaaggacctgtcgctcgagaacggagctcatgcatataaccgggaggtgaacggccggctggaaaacggtaaccaggcacgctcagaggcacggagagtcggtatggccgatgcgaacagtccccccaagccactctcgaagccccggactccaagacgcagcaagtctgacggtgaggcaaagccggagcctagcccaagcccccggattacccgaaaatctacgcgccagactacaattacaagtcattttgcaaagggtccggctaagagaaaaccgcaggaggaaagcgagagagctaagtcagacgaatcaattaaagaggaagacaaggaccaggatgaaaaaaggaggcgcgtcacttcaagagagagggtagccaggccactgcctgccgaggagcccgaacgggccaaatctggcactcggacagagaaagaagaagagcgcgatgagaaagaggaaaagcgcctgcggtcgcaaactaaggagcccacacccaagcaaaaactgaaagaagagccagatcgggaagcccgggcaggggtacaggccgatgaggacgaggacggcgacgaaaaagacgaaaaaaagcaccggagtcagcccaaagacctggcggcaaaaagacgccccgaagaaaaggaaccagagaaagtcaatccccagatttcagacgagaaagacgaagacgagaaagaagagaaaaggcgaaaaacaaccccaaaagaacccaccgagaagaaaatggcccgggcaaagaccgtcatgaactcaaagacccacccgccgaagtgtatccagtgtggccagtatctcgacgacccggacctgaaatatggtcagcacccaccagatgccgtcgacgaaccccagatgctgaccaacgaaaagctgtccattttcgatgctaacgagtcagggttcgaaagttatgaagccctgcctcagcacaaactgacctgcttctccgtgtattgtaagcacgggcatttatgtcccatcgacactgggctcattgaaaagaatattgagctgtttttctccggctccgccaagcctatatacgacgacgacccctcactggaaggtggcgtcaatggaaagaatctcggacctatcaacgagtggtggatcacgggttttgatggcggtgaaaaagcactgattggtttttctacatccttcgctgaatacattcttatggacccaagccccgagtacgctcctatatttgggctcatgcaggagaaaatctacataagtaagatcgtggttgagttcctccagagtaattctgactcaacttacgaagatttgattaataagatcgaaaccaccgtgcctccttcagggctcaacctcaatcgattcacggaagattctcttttgcgacacgcccagtttgtggtggaacaggtcgaaagttatgacgaggccggagattccgacgaacagccgatcttcctgacaccatgtatgagggacctcattaagctcgctggtgttacccttggtcagagacgggcgcaggcccggcggcagaccatccggcactcgactcgggaaaaggaccgagggccaaccaaggccacgacaactaaactggtataccagatctttgatactttttttgcagagcagatcgagaaggacgacagggaggataaagagaatgcttttaagagaagacgttgcggcgtgtgcgaagtctgtcagcaacctgaatgcggcaaatgtaaagcatgcaaagacatggtcaagtttgggggatctggccgctctaagcaagcctgtcaagaacggagatgtcccaatatggccatgaaggaagctgacgatgatgaagaagtggacgacaatatcccagaaatgcccagccccaagaaaatgcatcaggggaagaagaaaaaacagaacaaaaatcggatttcttgggttggtgaggctgttaagacagacggaaagaagtcttattacaagaaggtctgcatcgacgcagagaccctggaggtcggagactgcgtctctgtcattccagatgactcgagtaaacccctctacctggcaagggtgacagctctgtgggaggacagttccaacgggcaaatgttccatgcacactggttttgcgccggtactgatacagtgttgggcgcgacttcagatccgctcgagctgttcttagtcgacgaatgtgaggacatgcagttgtcttatatccactctaaagtcaaggtgatttataaggcaccaagtgagaactgggccatggaggggggtatggatcccgaatcactccttgaaggggatgacggcaaaacctacttttaccagctgtggtacgatcaggattacgcccggtttgagtcaccacctaagacacagcctacagaggacaacaaattcaagttttgcgtttcatgcgcccgtcttgcagaaatgcgccagaaggagataccaagagtgctcgaacagctagaggatttagactcacgcgtgctttactactcggccaccaaaaatggaattctgtaccgggtgggagatggcgtgtatttgcccccagaggcttttaccttcaacatcaagcttagcagtccagtgaagcggccccgaaaggaacccgttgacgaagacctttaccctgagcactacaggaagtactcagattatatcaaggggagcaatctggacgctcctgaaccctatagaattggcagaatcaaagaaattttctgccccaagaaatcgaatggccgacctaacgagaccgacattaagatccgcgtgaacaagttctatcggcccgaaaatactcataagagcactcctgcctcatatcacgccgacattaatctactgtactggtcggacgaagaggccgtggtcgattttaaagcagtccagggtagatgtacagttgagtatggggaagacctgcccgagtgcgtgcaggtctatagcatgggcggaccgaaccgtttttacttcttggaagcatataacgccaagagcaagtccttcgaagatccacccaatcatgcacgttctcctggtaacaaagggaaaggcaagggaaaaggcaaggggaagcctaagagtcaggcttgcgaaccaagtgagcccgagattgaaatcaagctccctaaactgcggaccctggacgtgtttagtgggtgcggtgggttgtctgagggcttccatcaggccggaatctccgatactctttgggccatcgagatgtgggacccagcagctcaggcttttcgcctcaataatcccggtagcaccgtctttaccgaagattgcaacatccttctgaagcttgtgatggctggcgaaacaaccaatagcaggggacagcgtctccctcagaagggcgacgttgagatgttgtgcgggggcccgccatgtcagggcttctccggaatgaatcggttcaatagccggacctatagtaaatttaagaatagcttggttgtaagcttcttgtcctactgcgactattataggccccgattttttctccttgaaaatgtacgaaattttgtgtctttcaagaggtcgatggtgctgaagctgacattgagatgtttagttaggatgggctaccaatgtacctttggggttctgcaggccggacagtacggcgtcgcccagacgcgaaggagggccatcatacttgctgcagcaccaggggagaagctaccactgtttcccgagccactccatgtattcgctccacgagcctgccagttgagtgtcgtcgtcgacgacaagaaattcgtgagcaatattacaaggctgagcagtggacccttcaggaccatcaccgttagagataccatgtcggacctgcctgaggtgaggaacggcgcatctgcactggagatctcgtataacggcgaaccgcagtcttggttccagcgccagctgcgaggcgcccagtaccagcccattctccgcgatcatatctgcaaagatatgagcgctttagtcgccgctcgaatgagacatatccctctcgccccaggctctgattggagggatctacctaacattgaggtgcgcctcagcgatggtactatggcaaggaaactccgctatactcatcatgatcgaaaaaacgggcgttcctcctccggcgccctacgcggcgtgtgctcttgcgtcgaagcgggcaaggcatgtgacccagcagctagacagttcaacacattgattccgtggtgtctcccccacaccgggaatcgccacaaccattgggccgggctgtacgggcgcctcgaatgggatggcttcttcagcaccacagtcactaatcctgaacccatgggaaaacagggtagagttcttcacccagagcaacatcgggttgtaagcgttcgcgaatgtgccagatcacaggggtttcccgatacttataggctgttcggtaacattcttgacaaacatcgccaagtcggcaacgcggtgccacccccactggcaaaggctatcggactcgaaataaaactatgtatgttggccaaggcaagagagtcagctagcgctaagataaaggaggaggaggcagcgaaagattag

SEQ ID NO: 185645 - DNA, 4899 bp, synthetic construct
  misc_feature 1..4899: note = Description of Artificial Sequence: Synthetic coding sequence
  source 1..4899: mol_type = other DNA
atgcccgcccggaccgcccccgcccgggtgcccaccctggccgtgccagcaatttccctgcccgacgacgtgaggaggcgcttgaaagatttagaacgtgactccctaacagaaaaggaatgcgtgaaagagaaactgaatttgctgcacgagttcttacagacagagattaagaatcaactgtgcgacttggaaacgaaactgaggaaagaggagctgtccgaggaaggttatctggctaaagtaaagtccctgctgaataaggatctctcactggagaatggcgctcacgcgtataacagagaagtaaatgggaggcttgagaatggcaaccaggcaaggtctgaggctagaagggtaggaatggccgacgcaaactctcctcctaagcccctgagtaagccgagaacacctcggcgctcgaagagcgacggagaggctaaacgaagtcgggacccccctgcttctgcgtcgcaggtcactggcattcgcgccgagccttcacccagcccacgaattaccagaaaaagcactcgacagactactattaccagccactttgccaagggccctgccaagcgaaagccccaggaagagagcgagagggcgaaatccgacgagagtattaaagaggaggataaagaccaggatgagaagcggcgccgagtgactagtcgggaacgcgtggctcggccattgcccgccgaggagccggagagggccaagtccggcacgcgcactgaaaaggaggaagagcgcgatgagaaggaggagaaaagactcaggtctcagacgaaagagcccactcctaagcaaaagctgaaggaagagcccgaccgggaagcaagagctggcgtccaggccgacgaggacgaagacggcgatgaaaaagatgagaagaaacatcgaagccaacccaaagatctcgctgctaaacggaggccggaggagaaggagcctgagaaggtgaacccccaaatcagtgacgagaaggatgaggacgagaaggaagaaaaaaggagaaaaactacacccaaagaaccaacagaaaaaaagatggccagagcaaagacggtaatgaatagtaagacccatccgcccaaatgtatccagtgcgggcaatacttggatgacccggacctcaaatatgggcagcacccccccgacgctgtcgacgagcctcagatgctgacgaacgaaaagctgtccattttcgacgcaaacgagtccgggttcgagtcttatgaagcgttgccccagcataaactcacctgttttagcgtgtactgcaagcacggacacttgtgccccatcgacactgggttgattgaaaagaacatcgaattatttttcagtggaagcgcaaaacccatttatgatgatgaccctagtctggagggcggcgttaatgggaaaaatctgggtcctattaacgagtggtggatcacgggctttgacgggggtgaaaaggccctcatcggctttagcacatcatttgccgagtatattttaatggatcctagccctgaatatgctccaatcttcggactcatgcaggagaagatctacatctcaaaaatcgtggtggaattcttgcagagcaacagcgatagtacatacgaagatctgattaataagatcgagacgaccgtcccacccagtggcctgaatctgaacaggtttactgaggattcactgctgaggcacgcccaattcgttgttgaacaagtggagtcttatgacgaggccggtgactcagacgaacagccaatttttctcaccccatgcatgagagatctcatcaagttagcgggcgtgactctcgggcagcgtagagcacaagcacgccgacagacaattcggcactcaacccgagagaaagatcgaggacccacgaaggcaacaaccacgaagcttgtctaccagatcttcgataccttttttgccgagcagattgagaaggacgacagagaagacaaagagaatgcttttaagcgaagaaggtgtggtgtgtgtgaggtgtgccagcaaccagagtgcggcaagtgtaaggcttgtaaagacatggtcaagtttggcggcagcggtcggtcaaaacaggcatgtcaggaacggcggtgtcctaatatggctatgaaggaggccgatgacgacgaggaggtggatgacaatatccccgagatgccatcaccaaaaaaaatgcaccaaggcaagaagaagaaacaaaataagaacagaatctcttgggttggggaagccgtaaaaaccgatgggaagaaaagctattacaagaaggtgtgcatcgatgcggagacgctcgaagtcggagattgcgtctccgttattcccgatgattctagtaaaccactgtacctggccagagttaccgcactttgggaggattcatccaacggacagatgtttcacgcccattggttctgtgccggtaccgacaccgtgttgggggccaccagtgaccctctcgagttattcctcgtcgatgagtgcgaagacatgcaactctcttacattcattctaaggtgaaggttatatacaaggcgcctagcgaaaactgggccatggagggagggatggacccagagtccctgcttgaaggtgatgacggcaaaacttacttctaccaactatggtacgaccaggactatgctagatttgagagcccccctaaaacacagcccactgaagacaacaaattcaagttctgcgtgtcctgtgcccgcttggccgagatgcgccagaaagaaattcctcgtgtgctggagcaactggaagacctggactcccgcgtgctctactatagtgcaacaaagaatggaatcctatatcgcgtcggcgacggcgtgtatttgccaccagaagccttcacattcaacattaagctctcctctcccgtgaagaggccacggaaggaacccgtggacgaagatttgtatcccgagcactacagaaaatactcggactatatcaaaggctctaacttggacgcaccagaaccttacagaattgggcgcattaaggagatcttctgccctaagaaatccaacgggcgccccaatgaaactgatattaaaattcgggtgaacaaattttaccggcccgaaaacacccacaaaagcacccctgcaagttaccacgctgacattaacttactgtactggagcgatgaggaggcagttgtcgacttcaaagctgtgcaaggccgttgcactgtcgagtacggagaggatctcccagaatgcgtgcaggtgtattccatggggggccccaaccgtttctactttttagaggcctacaatgccaagagcaaaagctttgaagacccgcctaaccatgctcgctcaccaggcaacaagggaaaggggaaaggcaaaggaaaaggaaagcctaagagccaggcttgcgagccttctgagcctgaaatcgagattaaattgcccaaactgcggaccctggatgtgttctccggatgcggaggtctttcggaaggattccatcaggctggcatcagtgataccctctgggctatagagatgtgggatccagccgcacaggctttccggcttaacaatcctggctcgaccgtttttaccgaggattgcaatatcctcctgaagcttgttatggccggcgagactactaactccagaggacagcgcctgccgcagaagggtgatgtcgagatgctatgcggcgggccaccttgccaggggtttagcggaatgaaccggtttaactcgagaacatactcaaagttcaaaaattctttggtagtgtccttcttgagctattgtgactattacagacctagattttttcttctcgaaaacgtccgaaattttgtctcattcaaaagatccatggttttgaaacttacactgcggtgcctggtgcggatgggttatcagtgtacattcggcgtgctgcaggccggacaatatggtgttgcccagacaaggagacgcgccattattctcgcagccgcaccaggcgagaaactgcctctgtttccggagccactgcacgtgttcgctccacgggcctgtcagctgtctgttgttgtcgacgacaagaagttcgtgagtaatatcacccgcctttctagcggaccttttcggacaattacggtgagggatacgatgtctgatctgcctgaggtgcgcaatggcgcgtccgccctggaaattagctataacggagaaccccaaagttggttccagagacagctaaggggggcccagtatcagccgatccttcgagatcacatctgtaaggacatgtcagcgctggtggcagccagaatgaggcatatccctctggcaccggggtctgattggcgggacttaccaaacatcgaggtcagactcagcgacggaacaatggcccgcaagttgcgctatacccatcacgatcggaaaaatggacggtcgtccagtggcgctcttaggggagtttgctcctgcgttgaagctggaaaagcatgtgatccggctgcccggcagtttaacacacttattccctggtgtcttccacataccggcaataggcacaatcactgggccgggctgtatgggaggctcgagtgggatgggttcttcagtactactgttaccaatccagagcctatgggcaagcaggggcgggtgctgcaccccgaacagcatagggtggtctccgtacgcgagtgcgctagatcacagggcttccccgatacgtacagactctttggcaatattctcgacaagcatcggcaggtcggcaacgcagtcccacctcctctggctaaagcaattggattagagatcaagctatgtatgctggcaaaggcccgcgagagcgccagcgccaagatcaaggaggaagaagccgccaaagactag

SEQ ID NO: 185646 - DNA, 4860 bp, synthetic construct
  misc_feature 1..4860: note = Description of Artificial Sequence: Synthetic coding sequence
  source 1..4860: mol_type = other DNA
atgcccgcccggaccgcccccgcccgggtgcccaccctggccgtgcctgccatcagcctgcccgatgatgtgcggcgacgcttgaaagacctcgaaagagacagtttgacagagaaagaatgcgtgaaggagaaactcaatctgcttcacgaatttctgcagacagagatcaaaaaccagctatgtgatctggagacaaaattgcgcaaagaggaactgagcgaggagggctacctggcgaaagtgaaaagtctgcttaacaaagacctgtctctggaaaatggcgcccacgcctataatcgcgaggtcaacggaaggttagaaaacggaaaccaggcgaggtccgaagctagacgggtggggatggccgacgctaatagtccccccaaacctctcagtaaaccacgcacaccccgcaggtctaaaagcgatggagaagccaagcccgagccgtccccatcaccaaggataacccgcaagagcacgcggcagacgacgattactagccacttcgccaaggggccagccaagcgcaagccgcaggaagagtccgaacgggccaaaagtgatgagtcaatcaaagaggaagataaagaccaggacgagaagaggcgacgggtgacatcccgcgagagggttgcccgacctttgcctgccgaggagccggagagggctaagtctggcacccgaaccgaaaaagaagaagaacgggatgaaaaagaggaaaagcggctgcggtcccagaccaaagagccaacacccaagcagaaactgaaagaggagccagacagagaagccagagctggggtgcaggccgacgaagacgaggatggggacgaaaaagacgagaaaaagcaccggtcccaacctaaggatctagctgcaaaacgccgaccagaggagaaagagcccgagaaggtgaatccgcagatatctgacgagaaagatgaggatgaaaaggaggagaagcggcggaaaactaccccaaaagaacccacagaaaaaaaaatggcgcgggccaagaccgtgatgaattctaagacacacccgccgaaatgtatccagtgtggtcagtacctcgatgatcccgatctcaaatacggccagcacccacctgacgctgtggatgagccacagatgctcactaacgagaagctcagcattttcgatgcaaacgagtctggcttcgaatcctatgaggcccttccccagcataaactgacttgcttcagtgtttactgcaagcatggccacctgtgtcctatcgacaccggcctgattgaaaagaatatcgagctttttttttcaggaagcgccaaacctatctatgacgacgatccgtccctggagggtggggtgaacggcaagaacctgggaccaataaacgaatggtggattaccggattcgacggcggtgagaaagcgctaattgggttttctacctccttcgctgagtacatcctgatggatcctagcccagagtacgcaccgatctttggcttaatgcaggagaagatctatatatctaagatcgtcgtggagttcctccagagtaactctgatagtacttacgaggacttgattaataaaatcgagaccacagtgcccccttcaggattaaacttgaaccggttcaccgaagacagcctgcttagacacgcccagttcgttgttgagcaggtcgaaagctatgatgaagctggtgactcggacgagcagcctattttcctcaccccctgcatgagagatttgatcaaactcgctggagtgaccttaggtcaaaggcgtgctcaagcccgaaggcagacgatcagacattccactcgggagaaggatcgtggcccaacaaaagctacgaccacaaagctcgtctaccagatcttcgacactttttttgccgagcagatcgaaaaagatgacagagaggataaagaaaatgcgttcaagcggcgccggtgtggcgtgtgtgaggtatgtcagcaaccagagtgcggcaagtgcaaagcctgcaaggatatggttaagtttggtgggagtggccggagtaagcaggcctgccaggaaaggagatgcccaaacatggctatgaaagaagcagacgacgacgaggaggtagacgataacattccggagatgcccagtccaaaaaagatgcatcaggggaagaaaaaaaaacaaaataaaaacagaatatcttgggttggggaggcagtaaagaccgatggcaagaaaagttattacaagaaggtgtgtattgatgcagagactctggaggtcggcgactgcgtcagtgtcatacccgacgattcttcaaaaccactgtacctggcacgagttacagccctttgggaagattccagtaacggtcagatgtttcatgcccattggttttgtgcgggcacagatacagtcctcggtgccacgagcgacccacttgagttgttcctggttgacgaatgtgaggacatgcagctgtcctatatccactcgaaagtgaaggtaatctataaagcacccagcgagaattgggctatggaaggggggatggacccagagtctctccttgaaggggacgacggcaaaacatacttctatcagctgtggtacgatcaggattatgcgcgctttgagagcccccccaagactcagcccacagaggacaacaaattcaagttctgtgtcagctgcgcccggcttgcagaaatgaggcagaaggaaattccccgggtcctggagcaactcgaagacctcgattcccgtgtcctgtactatagcgctactaaaaatggtatcctgtaccgtgtgggggatggcgtgtatctgccccccgaagcgttcacatttaacataaagctctccagtcccgtgaagcgacccagaaaggagcccgtagacgaggatctgtaccctgaacactaccggaaatatagcgattacattaagggcagcaacctggatgcccccgagccctaccgcatcggccgcatcaaggaaattttttgtccaaagaagtccaacggccgtcctaacgagacagatatcaaaatcagggtaaacaaattttatcgcccagagaacacacacaagtccacacctgctagctaccatgctgatattaaccttctatattggtccgatgaagaagcagttgttgattttaaagcggttcagggcagatgtactgttgagtacggggaagatctcccagagtgcgttcaggtgtactccatgggtggacccaacaggttctattttctggaggcctataatgccaagtccaaaagcttcgaggatcccccaaatcatgcacgaagccccggaaataagggcaagggaaagggtaaaggcaaggggaaacctaaaagccaggcttgcgaacccagcgagcctgagatcgagattaagctaccaaaattgcggacccttgatgtgttcagcggatgtggtggactttccgagggttttcatcaggctggcatctccgatacactgtgggcgattgagatgtgggaccctgcggcgcaagccttcagattgaacaatcccggcagcactgtttttacagaggactgtaacatcctgctgaaattagtaatggccggcgagacaaccaatagcagagggcagcgcctgcctcagaagggtgatgtggaaatgctgtgtgggggacccccatgtcaaggattctcaggcatgaaccgatttaattcacggacctactctaagtttaaaaattccctggtagtgtctttcctgtcctactgcgactattacagaccgcggttctttctgcttgagaatgttagaaacttcgtctcctttaagaggtccatggtattgaaactgaccttgcggtgcttggttaggatgggatatcaatgtacgttcggcgtacttcaggccggtcaatatggcgttgctcagacgagaaggcgggccattattcttgccgcagcccccggcgaaaaactcccgctgtttccagagcccctccacgtgtttgcaccccgggcctgtcagttatcagtggtggtggatgataaaaagttcgtatctaatattaccagattaagttctggccctttcaggacgattacagtccgcgataccatgtctgacttgccggaagttaggaatggcgcatctgctctggagatttcttataacggggagccacagagctggtttcagaggcagttgaggggcgcccagtatcagccaatcctgagagaccacatatgcaaagatatgtcagccttggtggctgccagaatgcgccatattcctctcgcacccggtagcgactggcgggatctgcccaatattgaggtaagactgtctgatggcacaatggctcgcaagctgcggtacactcaccacgacaggaaaaatggacggtcatcctccggtgccctccgcggagtgtgcagctgtgtagaaggaggctcctccggcaaggcctgcgatcccgctgcccgccagtttaacactctaattccctggtgtctgccacacaccggcaataggcacaatcactgggccggcctctatgggcggttggagtgggatggtttcttttcaacaacggtcaccaaccctgagcccatggggaaacagggcagggtgcttcatcctgaacagcatagagttgtatctgtgcgcgaatgtgccaggagtcaggggttcccggacacctaccgactgtttggaaatatcctggataaacaccgtcaggttggaaacgccgtgcctcccccactggctaaagcaatcggattagagatcaaactttgcatgctggctaaggcgcgagaaagtgccagcgccaaaatcaaagaagaggaggcagctaaggactag

SEQ ID NO: 185647 - DNA, 4455 bp, synthetic construct
  misc_feature 1..4455: note = Description of Artificial Sequence: Synthetic coding sequence
  source 1..4455: mol_type = other DNA
ggcagctgccacagccccgccagcgccagccaggtggccggcaccaccgctgaacctagcccttcaccccgcatcacaagaaaatcaacccggcagactacaatcacttcacacttcgccaaaggaccagccaagaggaagccgcaggaggagagtgagcgggcgaagagcgacgagtctatcaaagaggaagataaagatcaggatgagaagcgcaggagagtgaccagcagagaacgggtggctcgcccattgcctgccgaggagcctgagcgcgcaaagtcgggcacccgcaccgaaaaggaagaagaaagagacgaaaaggaagagaagcgcctccgctcccagactaaggagcccacccctaaacagaagttgaaggaggaacccgaccgcgaagctcgggctggagtgcaggctgatgaggatgaggacggcgatgagaaagacgaaaagaagcaccgcagccagcctaaagatttggcagcgaagcgcagaccagaggaaaaagagcctgagaaggtaaatccacaaattagtgatgaaaaggacgaagacgagaaggaagagaaacgtaggaaaaccacccctaaggaacccacggaaaaaaaaatggcccgtgctaagaccgtaatgaatagtaaaacgcatccacctaaatgcattcagtgcgggcagtacctggacgatccagatctgaagtatgggcagcacccaccagacgctgtggatgaacctcagatgttgactaatgagaagctgtcaatctttgacgctaatgagtccggcttcgaaagctacgaggcgttgccccagcataagctaacctgcttctctgtctactgcaagcatggacatttatgccccatcgacaccggtctgattgaaaagaacatagaactgttctttagtggcagtgcaaaaccgatttatgacgatgacccctcgctggaggggggagttaacggcaagaacctcggccccattaatgagtggtggattacagggtttgatggtggagagaaagctcttatcggcttttcaacctcattcgctgagtacattttgatggatccatcgccagagtatgccccaatttttggtttgatgcaggagaagatctatatttctaaaatcgtcgtggaatttctgcagagcaattctgattccacgtacgaagacctgataaataaaatcgagactacagttcccccttccggtctgaacctcaatcgtttcaccgaggatagcttactacgacacgcccagtttgtggtggaacaggtggagagctatgatgaggccggcgactccgatgagcagccgattttccttaccccatgtatgagggacttaattaagcttgctggcgtgacacttggccaacgacgtgctcaagcccggagacagactattagacacagcactcgggagaaagaccggggccccacaaaggccactacaacgaagctggtgtaccagatttttgacaccttctttgcagaacagatcgagaaggatgaccgcgaggacaaagaaaatgcattcaaaagaagacggtgtggggtctgtgaagtgtgccagcagcctgagtgtggcaaatgtaaagcttgcaaagacatggtgaaattcggcggctctgggcggtccaagcaggcttgccaggagagacggtgccctaatatggcgatgaaggaggccgatgacgatgaggaggtagatgataatatacccgagatgccatctccgaagaaaatgcaccaggggaaaaaaaagaaacagaacaaaaatagaatctcatgggtgggggaagccgttaaaaccgacgggaagaaatcatattataagaaggtgtgcatcgatgccgaaactttggaggttggtgattgcgtgagtgtgatccccgatgattccagcaaacctttgtacctggctagagtgacagccctgtgggaagacagttctaatggccagatgttccacgcccactggttctgcgctggcaccgatactgtgctaggcgcaacttctgacccattggaactatttcttgtcgacgaatgcgaggatatgcagcttagctacatccacagtaaggtcaaggtgatctataaagccccatctgaaaattgggcaatggaagggggtatggacccggaaagtttactcgaaggtgatgacgggaagacctatttttatcagctgtggtacgaccaggactatgcaaggtttgagagtcctccgaagacccagcccacggaggataataagtttaagttctgcgtgtcttgtgctagacttgcagagatgagacagaaggagatcccaagggttttggagcagttggaggatcttgatagtagggtattatattactcagcaactaagaatgggattctgtaccgggtaggggacggcgtgtaccttccaccagaggcctttacttttaacatcaaactgagctccccggtgaagcgcccccggaaagaacccgtagatgaggacctctatcctgaacactataggaaatattcagattatatcaaaggcagcaatctggacgcgccagagccctaccgtatcggacgaatcaaggaaatcttctgccctaagaagagcaacggacggcccaacgaaactgatatcaaaatccgggtgaacaagttttaccgccctgaaaacacccacaaatcaacacccgcttcctaccatgccgatatcaacctgttgtattggtctgatgaagaggctgtcgttgattttaaagccgtacagggaagatgtacagtggaatacggagaagacctacccgagtgtgttcaggtatatagtatgggagggcctaacaggttctattttctcgaagcttacaatgccaaatcaaagtcgtttgaggaccctcccaatcatgcccgatctccagggaacaaggggaaaggtaagggcaaggggaaaggaaaacctaagagccaggcctgcgagcctagtgaacctgagatagaaattaagctccccaaacttcgaactctcgatgtttttagtgggtgtggaggactatccgaaggcttccatcaggccggcatcagcgataccctctgggctattgaaatgtgggaccctgccgcccaggcatttaggctgaacaatcctggaagcaccgtgttcactgaagactgtaatattctcctgaaattagtgatggccggggaaaccacaaactcacgtgggcagcgtctgccccagaagggggacgtggaaatgctctgcgggggtccaccctgtcagggcttcagcgggatgaataggtttaactcccgcacctactcaaagttcaaaaattctctcgtcgtgagctttctgtcctactgtgattattacagaccaaggtttttcctccttgaaaacgtcagaaactttgtgtcatttaaacgaagcatggtgctcaagctgacgttaaggtgtcttgtcagaatggggtatcaatgtactttcggagtgcttcaagctgggcagtacggtgtagcccagactcggcggagagctatcattctcgctgcagcccccggtgagaagctacctttgttccctgaaccactccatgttttcgccccacgagcgtgtcagctgtcagtcgtggtggacgataagaaattcgtgtctaacatcaccagattgagcagcggtccgttcagaaccattactgttcgcgatacgatgagcgacctgcccgaggtcaggaatggagcctccgccctggagatctcatacaacggcgagcctcagagctggtttcagcgccaactgcggggcgcccaataccagccgatccttcgagatcacatctgtaaagacatgtctgccttagtagcggcccgtatgaggcacattcccctggctccaggatccgattggcgtgatctgccaaatatcgaggttagactcagcgatggcaccatggctaggaaattacggtatactcaccacgataggaagaatgggcgaagctcgagtggcgcactccgcggggtgtgttcttgcgtggaggccggcaaggcttgcgacccggccgctcgtcagttcaacaccctcataccatggtgtcttccgcacacaggcaatcgtcacaaccactgggcgggcctttacggacgcctggaatgggatggatttttctccacaacagttaccaaccctgagccaatgggcaaacagggtagagtgctgcatcctgaacagcacagagtagtgtcagtccgcgagtgtgctcgcagtcaagggtttccagacacctaccggctgtttggtaacatcctcgataaacaccgacaggttggaaacgccgtacccccccccttagctaaggccataggactcgaaattaagctgtgcatgttggcaaaagcacgtgaatccgcctctgccaaaattaaagaagaggaggccgctaaggattag

SEQ ID NO: 185648 - DNA, 2739 bp, synthetic construct
  misc_feature 1..2739: note = Description of Artificial Sequence: Synthetic coding sequence
  source 1..2739: mol_type = other DNA
atgcccgccatgcccagcagcggccccggcgacaccagcagcagcgctgcagaacgcgaggaagataggaaggacggcgaggagcaagaggagcctaggggaaaagaggagcgacaggagccaagcacaaccgcccgcaaggtgggccgacccgggagaaaacgtaaacacccacctgtggaatccggcgacacacctaaagacccagcagtaatctccaagtctccttcaatggcccaggactccggtgctagcgaactgcttcccaacggcgacctcgagaagaggtccgaaccccaaccagaagaaggttcacctgccggcggtcagaaaggaggagcacctgccgaaggcgagggtgcagccgaaacgctgcccgaagccagccgggcagtggagaacggctgctgcacacctaaagaggggagaggagcaccagctgaggccggtaaagagcagaaggagactaatattgagtctatgaagatggaaggaagtcgcggacgcctccgaggcggtttgggatgggagtcaagcctcagacaaagaccgatgcccagactgaccttccaagcaggtgacccgtattatatcagtaagaggaaacgcgatgaatggctggccagatggaaaagagaggcagaaaagaaggctaaagtcattgccggcatgaatgccgtggaggaaaaccaagggcccggtgaatcacagaaagtcgaagaggcatctccaccggcggtgcagcagcccactgatccagctagcccaacagttgcaacgactccagaacccgtgggcagcgacgcaggagataaaaacgctaccaaggccggcgacgatgagccggagtatgaagatggccggggcttcggtatcggagagctcgtgtggggcaagctccgcggttttagctggtggccagggcgcattgtgagttggtggatgaccggtaggtccagagccgctgagggcacaaggtgggtgatgtggtttggggatggaaagttcagcgtcgtctgcgtggagaaactcatgccgctctctagtttctgttcagccttccatcaggccacatacaacaaacaacctatgtatcggaaggccatttatgaagtcttacaggtcgcttcgagccgagctggtaagctcttccctgtctgccacgacagcgatgaaagcgataccgccaaggccgttgaggtgcagaataagcccatgatcgagtgggcactcggcggcttccagccaagcggccccaaggggctggaaccacctgaggaggaaaaaaacccctacaaggaagtatataccgacatgtgggtggaaccagaagctgctgcttacgcacccccacctcctgcgaaaaagccccgcaagtccaccgccgaaaaacctaaagtgaaggagattatcgatgaacggacccgcgaacgtctggtctacgaagttaggcaaaaatgccgcaacatagaagacatctgtataagttgtggtagcctaaacgtgactctggagcatccactcttcgtgggcgggatgtgccagaactgcaagaattgtttcttggagtgcgcctaccagtatgatgatgacgggtatcagtcctactgcaccatttgctgtggggggcgggaagtactcatgtgtggaaacaataactgttgccgatgtttttgtgtggaatgtgtggacctcctcgttggccctggagcagctcaagcagctattaaagaggacccttggaattgttatatgtgtggacacaagggtacttatggcctcctgcggcgccgcgaggactggccaagcaggctccaaatgttttttgctaataaccatgaccaggaatttgacccaccaaaagtgtacccaccagtgcctgcggagaagaggaaaccaatcagagtactgagcctcttcgacgggatagccactgggctattagtgctgaaagacttggggatccaagtcgatcggtatattgcatccgaggtctgcgaagatagcattactgtgggaatggttcgtcaccaggggaagattatgtatgtgggagacgtccgatcggtcacacagaagcatattcaggagtggggaccctttgaccttgtgattggtggttcaccctgcaacgatctatcaatcgttaaccctgccaggaagggcctttatgagggcactggacggcttttcttcgagttctacagactgcttcacgatgccagacccaaggagggtgatgaccggccatttttctggctgtttgagaatgttgttgcaatgggagtgtcagataaacgcgatatcagtcggttccttgagtcgaatcctgtgatgatcgacgctaaggaggtttcagcagcacaccgtgcccgttacttctgggggaacctaccaggaatgaatcggcctctagccagcaccgtgaacgacaaactggaactgcaggaatgtctggagcacggcagaatagccaagttcagtaaggtgcgaaccattacaacccggtccaactccattaaacagggaaaggaccagcactttccagtgttcatgaatgagaaagaagatattctgtggtgcaccgagatggagcgcgttttcggattccctgtacattatactgacgtctcaaatatgagcagattagcacgtcagcgtttgctggggagaagttggtcagtgcccgtaattagacacctctttgctcccttaaaagagtactttgcttgtgtctag

SEQ ID NO: 185649 - DNA, 2739 bp, synthetic construct
  misc_feature 1..2739: note = Description of Artificial Sequence: Synthetic coding sequence
  source 1..2739: mol_type = other DNA
atgcccgccatgcccagcagcggccccggcgacaccagcagcagcgctgccgagcgggaggaggaccgaaaagacggcgaggagcaagaggagcctagaggcaaagaagagcgtcaggaaccttccactaccgcccgtaaagtcggccgcccaggacggaagcgcaagcacccacctgtggagtctggcgacacccctaaagacccggccgtgatatcaaagtccccgagtatggcccaggactctggcgcctctgagctgctgccaaacggcgatctcgaaaaaagatcggaaccacagccagaggaagggagccccgcaggcggccagaaagggggagccccagccgagggggaaggagcggctgagacgctccctgaggcttcccgggccgtagaaaacggatgctgtacacccaaagaggggaggggggcgcccgcagaggccgggaaggaacaaaaggagactaatattgaaagcatgaagatggagggctcacgaggcaggctgcgtgggggactcgggtgggagtcatccctgaggcagaggcccatgccccggctgaccttccaggctggtgatccctactatatttctaagcgcaaaagggacgagtggttagcgagatggaaacgcgaggctgagaagaaggcaaaagtgatcgccggtatgaacgccgtcgaggagaatcaggggccaggagagagccagaaagtggaagaggcctctcctcccgcagtgcaacagccaaccgacccagcctctccaaccgtggctaccacccccgaaccagttggatccgatgctggtgacaaaaatgctaccaaggccggagacgatgagcccgagtatgaggatggccggggattcggaattggggaactggtgtgggggaaattacgcgggttctcctggtggccgggaagaattgtttcctggtggatgaccggccggtcacgcgctgccgagggcacaagatgggtgatgtggtttggtgatgggaagtttagcgtggtttgtgtggagaagctgatgcccctcagtagtttctgcagtgcctttcaccaggcaacctataataagcagcccatgtaccggaaagccatatatgaggtgctccaggtcgcatcttcacgcgccggcaaactgttccctgtgtgtcatgactcagatgagtctgatactgctaaggccgtggaggtgcagaacaagcccatgatcgagtgggctcttggagggtttcaaccgagtggccctaaggggctggagcctcccgaggaggaaaagaacccctataaagaggtgtataccgatatgtgggtggagccagaggctgctgcctatgcccctcctccccctgccaagaagcctcggaaatcaaccgctgagaagcctaaggtgaaggaaataatagatgagaggactagagagagacttgtctacgaggtgaggcaaaaatgtcgcaacatcgaggatatctgtatctcttgcggcagcctaaacgtgacactggagcacccactgttcgtcggcggaatgtgccagaactgtaagaattgttttctcgagtgtgcataccagtacgacgatgacgggtaccaatcttactgcaccatctgctgcgggggccgcgaggttttaatgtgtggaaataacaattgctgccgttgcttttgtgtggaatgcgttgacctgttggttggacctggtgccgctcaggccgcgatcaaagaggatccatggaactgttatatgtgcggccacaagggaacatacggcctgctgcggagacgcgaggactggccctccagattgcagatgtttttcgcgaacaaccacgaccaggaatttgacccaccaaaagtctaccctccagttcctgctgaaaaaagaaaaccgatacgtgtgcttagccttttcgacggtatagctacgggccttctggtactcaaagatctcggaatacaggtcgatcggtacatcgcctctgaagtctgtgaggattccattacagtgggtatggtccgccatcagggtaagatcatgtacgtcggtgatgtcagatctgttacccagaagcacatacaggagtggggacccttcgatctggtcatcggcgggagcccatgtaatgatctgtccatagtaaatccagctagaaaaggcctgtatgaggggacaggaagattgtttttcgagttctacaggttgttacacgatgctcggccaaaggaaggagacgatcgtccattcttctggctgttcgaaaatgtcgtggcgatgggagtgagtgataaacgggatatctcgcgcttcttggaaagcaatccagtgatgattgatgcaaaggaagtgagtgccgctcacagagccaggtacttttggggcaacctgcctggaatgaacaggcctttggcaagtactgtcaacgataagttggagctacaggaatgcctcgaacacgggcgtatcgcaaagtttagcaaggtgagaaccatcaccactagatcgaactcaattaagcagggcaaggatcagcacttccctgtttttatgaacgagaaagaggacattctttggtgcacagaaatggagcgggtgttcggattccccgttcactacacagatgtgtccaacatgagtcgccttgcacgtcagcggctactcggcaggtcatggagcgtccccgtgatccgccacctgttcgcccctctgaaggagtacttcgcttgtgtctag

SEQ ID NO: 185650 - DNA, 2172 bp, synthetic construct
  misc_feature 1..2172: note = Description of Artificial Sequence: Synthetic coding sequence
  source 1..2172: mol_type = other DNA
atgggcatcctggagcgggtggtgcggcggaacggccgggtggaccgctctttaaaggacgaatgcgacaccgccgaaaagaaggctaaagtgatagcagggatgaacgccgtagaggaaaaccagggccccggcgaatcacagaaggtggaagaggcctccccccccgcagtgcagcagcctactgaccccgccagtcccaccgtggccactaccccagagcctgtcgggagcgatgcaggggataagaacgctaccaaggccggtgatgatgaaccagagtacgaggacggccgaggattcggtataggcgagctggtgtgggggaagctgcgtggattctcctggtggccaggccgcatcgtctcctggtggatgaccggtcgatcgcgagctgctgaaggcacaagatgggtcatgtggttcggagatggcaagttctcggtagtgtgtgttgagaaactgatgcctctgagttccttttgcagcgcatttcatcaggccacttataataaacagccaatgtacagaaaggcgatctatgaagtactgcaggtcgccagtagtcgagcaggtaaacttttccccgtgtgccacgactcggacgagagtgacaccgctaaagctgtagaggttcagaataaaccgatgatcgagtgggccctgggggggttccagccctcggggcccaaaggtctcgagccgcccgaggaggagaaaaacccctacaaggaggtgtatactgacatgtgggtagaacctgaggcggccgcctatgcgcctccccccccagccaagaaaccaagaaagtccacagctgaaaagcctaaggttaaagaaattattgatgagcggacaagggagagactcgtgtatgaagtcaggcaaaaatgccggaacattgaagacatctgcatcagttgcggcagccttaacgtgacgctggagcaccctctgtttgtcgggggtatgtgccagaattgcaagaactgctttctggagtgtgcttaccagtacgatgacgacgggtatcagtcgtactgtacaatttgttgtggagggcgagaggtgctcatgtgtggtaataacaactgttgtcgctgtttctgcgtggagtgcgtagacttgctggttggtcccggtgcagctcaggccgccatcaaggaggatccatggaattgttatatgtgcgggcacaaaggaacctatgggttactaaggcggcgtgaagactggcctagccggctccagatgttcttcgctaataaccacgaccaagagtttgaccctcccaaggtgtatcccccagtacccgccgagaaaaggaagcctattcgggtactgagtctttttgacgggatagccactggactgcttgttttgaaagatcttggtatccaggtcgatcgctacattgcgtcagaggtatgcgaggactctataaccgtcgggatggtcaggcaccagggaaagatcatgtacgtgggtgacgtgagatctgtgacacaaaagcacattcaagagtggggaccgttcgacttggtgatcggggggagtccgtgtaacgatctctcaatcgtaaatccagctcgcaagggcctgtatgaaggcaccggcagactgttctttgaattctacaggttgttacatgacgccaggccgaaggagggcgacgaccggcccttcttttggctgtttgagaatgtggtagccatgggcgtgagcgataaaagagatataagcaggtttttggagagtaacccagtcatgattgatgccaaagaggtcagcgcggcacatcgggctaggtatttctggggaaatcttccaggaatgaacaggccactggccagcaccgtgaatgataagctcgagcttcaggaatgtctagaacatggcagaatcgccaaatttagcaaggttagaacaatcacaactaggtccaacagtatcaagcagggaaaggatcaacatttccctgtttttatgaacgagaaggaagatatactttggtgtacagagatggagcgcgtgttcggttttccagttcactatacggatgtgtctaacatgtcacgactcgctaggcagcgtctgctgggacgcagttggagcgtgcctgtgatccgccatttgttcgcccccctgaaggaatattttgcttgcgtgtag

SEQ ID NO: 185651 - DNA, 2070 bp, synthetic construct
  misc_feature 1..2070: note = Description of Artificial Sequence: Synthetic coding sequence
  source 1..2070: mol_type = other DNA
atgaacgccgtggaggagaaccagggccccggcgagagccagaaggtagaagaggcaagccctcccgcagtccaacagcccacagatcctgcatctccaacggttgcgaccacacccgaacccgtcggatccgacgcaggtgataaaaacgcaaccaaagccggcgatgatgagcctgagtacgaggacggccgcggtttcggtataggagagctggtttggggaaaactacgaggtttcagctggtggcccgggaggatcgtgtcatggtggatgacaggccgatctagagcagccgaaggcacacgatgggtgatgtggttcggcgatgggaagtttagtgttgtgtgcgtggagaagctcatgcccctgtcctctttttgtagcgcatttcatcaggccacatacaataaacagcccatgtacaggaaggccatttacgaagtgctacaagtagcgtccagccgcgcagggaagcttttccctgtctgtcacgactctgatgagtctgatactgccaaggcggtggaggtgcaaaataaacctatgatagagtgggcattggggggcttccagccgagtgggccaaaaggtctggagcccccagaggaggaaaaaaacccctacaaggaagtgtacacagatatgtgggtggaaccagaggcggcggcatatgctcctcctccccctgctaaaaagccaaggaagtccacggctgagaagcctaaggtgaaagaaattatcgacgagcgtactagggagcgattggtgtacgaggtacgccagaagtgcaggaacattgaggatatctgcatttcctgcgggtcactcaacgtcacgcttgagcatccgctcttcgtaggtggaatgtgccagaattgtaagaactgtttccttgagtgtgcataccagtacgatgacgacggataccagtcctattgtactatctgctgcggcggcagagaggtgttaatgtgcggcaataataactgttgccgatgcttctgcgttgagtgcgtcgaccttctggtgggccccggcgctgcccaggctgctattaaggaggacccctggaactgctatatgtgtggccacaagggaacctacggcttgctcaggcgccgcgaggattggcctagccgtctccaaatgtttttcgccaacaaccatgaccaagagttcgacccccctaaggtataccctcctgtgccagccgagaagcgaaagccgataagggtcttgagtctctttgacggtatcgccacaggtctgctggtgctgaaggacctcgggatccaggtggacagatacatcgcatccgaggtctgtgaagactcaataaccgtgggcatggttaggcatcagggaaagattatgtacgtcggcgatgtcagatctgtcacacagaaacacattcaggagtggggacctttcgatttggtcatcggaggatctccgtgcaacgatttatcaatcgtgaacccagccaggaaggggctttatgaaggcaccggtagactgtttttcgagttctatcgcctcctgcacgatgcaagaccaaaagagggagatgatcgcccattcttctggctattcgagaacgtggtggctatgggcgtgagcgataaaagagacatctccaggttcctcgagtctaatcccgtgatgatcgatgcgaaggaggtctcggctgcccatcgagcccgctacttctgggggaacctccccgggatgaataggcctctggcttccaccgtgaacgacaagctcgaactgcaggagtgtttggagcatgggcggatagctaaattctccaaggttcgcaccattactacccgatccaatagtattaaacaggggaaagaccaacatttccccgtcttcatgaatgaaaaggaagatatattatggtgcacagagatggaacgagtctttgggtttcctgtccactacaccgatgtttccaacatgtcccggctcgcgagacaacgacttctcggacgatcttggtcagttccggtgatccgccacctcttcgccccattaaaggagtacttcgcatgcgtgtag

SEQ ID NO: 185652 - DNA, 501 bp, synthetic construct
  misc_feature 1..501: note = Description of Artificial Sequence: Synthetic coding sequence
  source 1..501: mol_type = other DNA
atgcccgccatgcccagcagcggccccggcgacaccagcagcagcgccgcggaaagagaagaagatagaaaggatggagaggagcaagaggaaccaagaggcaaagaggagaggcaagaaccctcgactaccgccaggaaggttggaagacccggtcgtaaacgaaaacaccctcccgtggaaagcggcgatacacctaaggacccagccgtgatttcaaagtcacccagtatggcgcaagattcaggagcaagcgaactgttaccaaatggggatctcgaaaaacgatccgagcctcagcctgaggaaggaagtcccgcgggagggcaaaaagggggcgctcctgctgagggggaaggcgccgctgagactttgcctgaggctagcagggcagtcgaaaacggctgttgcacccccaaagaagggagaggggcgcccgccgaggctggggagagttcggccccgggcgcagcgagttctgggccgacaagcatcccttag

SEQ ID NO: 185653 - DNA, 2538 bp, synthetic construct
  misc_feature 1..2538: note = Description of Artificial Sequence: Synthetic coding sequence
  source 1..2538: mol_type = other DNA
atggagcccagccccgagccccccagcctggagagcatgaagggcgatacccgccatcttaatggagaggaggatgccgggggtcgagaagattcaatccttgtcaatggcgcgtgctccgatcaaagtagtgattctcccccaattttggaggccatacgaacccctgaaatccggggccgcaggtcctcttcacgactcagcaagcgcgaagtcagctccctactgtcttatacacaggatttaaccggtgatggagatggcgaagatggggatggctctgataccccggtcatgccaaaattgttcagagagacccggacccggtccgagagccccgccgtgaggaccagaaacaacaattctgtgagctctagagaacgccatcggcctagcccacggtcaacgagagggcgtcagggacgtaatcacgtggacgagtctccagtggagtttccagccacgagaagtctgagaaggcgtgccaccgcatctgcgggaacgccttggccaagccctcctagcagttacctgacaatcgacttgacagacgacactgaggacactcacggcaccccccaatccagtagtactccctacgcccgtctggcccaggacagtcagcagggaggcatggagtcaccacaggtcgaagccgacagtggtgatggcgattctagcgagtatcaggacggaaaagagtttgggattggcgacctggtgtgggggaagatcaagggcttttcctggtggccagctatggtggtgtcatggaaagccacttctaagaggcaagccatgtccgggatgcgttgggttcagtggtttggcgatggcaagttttcggaggtctccgcagacaagttagtggctctcggcctcttttctcagcatttcaatcttgccacttttaacaaactcgtgtcctatagaaaagccatgtatcatgccttagaaaaggcacgggtgagggcgggcaagactttcccctcttctcccggagattcactggaggatcaactgaagcctatgctagagtgggcccatgggggcttcaaacccactggtatcgagggcctcaagcccaataacacccagccagaaaacaaaaccagaagacggactgcagatgacagcgcaaccagtgactactgtccagcccccaagcgccttaagacaaactgctacaataacggcaaagacagaggcgatgaggatcagtcccgagaacagatggcctcagacgtggctaataacaaatcctctttagaggacggctgcttgtcatgtggtcggaaaaatccggtctcatttcatccactatttgaggggggcctttgccagacatgccgggataggtttttggagctgttttacatgtacgacgatgatggatatcagagctactgtaccgtttgctgcgaagggcgtgagctcctgctctgctccaacacctcctgttgtcgctgtttctgcgtcgagtgcttggaagtgctggtgggcaccggtaccgccgcagaggcaaaactgcaagaaccttggtcatgctacatgtgcctgcctcagcggtgtcacggcgtcctccggagacgcaaagattggaacgtccgcctccaggcgttcttcacctctgacacaggcttggagtacgaagctcctaagttatatcccgctattccagcagcgagacgccgcccaatacgcgtgctgtctttgtttgacggtattgccactggatacctggtgcttaaggaattgggtattaaggttggcaagtacgtcgccagcgaggtgtgcgaggagtcaatagcagttggcaccgtcaagcatgagggaaacatcaaatatgtgaacgacgtaaggaacatcactaagaagaatatcgaagagtggggccccttcgacctagtgatcggggggtcaccctgtaacgatcttagcaacgtgaatccagccagaaagggactctatgaaggtacaggcaggctctttttcgagttctaccatctgctgaattatagccgaccgaaggagggcgacgaccgaccattcttctggatgttcgagaacgtggtggcaatgaaggtaggcgacaaacgggatatcagccgctttctggaatgtaatccggtgatgatagacgcaattaaggtgtcagcagcacatcgtgccagatacttttgggggaatctcccgggcatgaatcggccagtgatagcaagtaagaacgacaaacttgagctacaggattgcctcgagtacaaccggattgccaaattaaagaaagtgcagaccattacaactaagtccaattccatcaaacagggcaagaaccaactgtttccagttgtgatgaatgggaaagaagatgttctgtggtgcactgagctcgagcgaatctttggttttccagtgcactatacagacgtgtcaaatatgggacgtggggctcgccagaagttattaggtcgctcatggagtgtgcccgttatccggcacctttttgctcccttgaaagactatttcgcgtgcgagtag

SEQ ID NO: 185654 - DNA, 2562 bp, synthetic construct
  misc_feature 1..2562: note = Description of Artificial Sequence: Synthetic coding sequence
  source 1..2562: mol_type = other DNA
atgaagggcgacacccggcacctgaacggcgaggaggacgccggcggccgtgaggattcaatcctggtgaatggtgcctgtagtgatcagagcagtgattctcctcctatcctcgaagcaattaggactcccgagattaggggtagacgttctagcagcaggctgtcaaagcgcgaagtgtcgagtcttctgtcctacacgcaagacttaaccggggatggggacggcgaggatggagacggtagtgataccccggtgatgccaaagttgttccgggagacccgtacccggtctgagtctccagctgtgcggactagaaataataattcggtgagctcacgcgagcggcaccgcccttcgccaaggtcaacacgcggcagacaaggacgcaatcacgtggacgagagccctgtcgagtttccagccaccaggtcgctgcgtcgtagggcaacggcatccgccggaactccgtggccctccccccccagcagctatctgactatcgacctgacggacgacaccgaggatacacatggcacaccgcagtccagttccactccctacgccagactggcccaggacagtcaacagggcgggatggagagccctcaggtggaggccgattccggcgatggggacagttccgagtaccaggatggaaaggaattcggcatcggcgacctagtctgggggaaaatcaaaggatttagttggtggccagctatggttgtgtcatggaaggccactagcaaaaggcaggccatgtctggaatgcgctgggtgcagtggtttggagacggcaaattttctgaggtgtccgccgataaactggtagcactgggcctcttctctcagcactttaacctggctacattcaataagttagtatcgtatcggaaggccatgtatcacgccctggaaaaagcccgcgtacgagctgggaagacttttccatccagcccgggcgatagcttagaagaccagttgaaacccatgttagagtgggcgcatggtggctttaagcccactggcattgagggcttgaaaccgaataatacacagcccgtcgtgaataagagtaaagtgagaagagcagggtcgagaaagttagaatccaggaagtacgagaacaagactcgccggcgtaccgctgatgacagtgctacatctgactactgtcccgcccccaagcggttaaagactaattgctataataatggcaaggataggggtgatgaggaccagtcaagggagcagatggcaagcgatgtcgcgaataacaaatctagcctcgaagatgggtgcttaagttgtggccggaaaaacccagtttcattccacccgctcttcgagggagggttgtgtcagacatgccgagatcgcttcttggaacttttctacatgtacgacgacgacggctaccagtcttattgcacagtgtgttgcgaaggccgggagcttctgctgtgttccaacacgtcctgctgcagatgcttctgcgttgagtgcctagaggtgctcgtcggtactggcactgctgccgaagccaagctgcaggaaccctggtcatgctacatgtgccttccgcagcgatgtcacggcgtactgcgacgcagaaaagattggaatgtgcgcctgcaagccttctttacctcggatacaggactggagtatgaagcacctaaactttaccctgcaataccagcggcccgacgaagacctatcagagtcctgagcctattcgatggcatcgccaccggatacttagtgctaaaggagctaggaatcaaggtgggcaagtacgtggcaagcgaagtatgtgaggagtctattgccgtaggcacagtgaaacacgaaggcaatataaagtacgtgaatgacgtgcgcaacattacaaaaaaaaacatagaggagtggggtccattcgatttggtcatcggcggatcaccctgtaatgacctgtccaatgtgaatccagccagaaaaggtctgtacgagggtacgggccggctctttttcgagttctatcaccttctgaactactctagacctaaggaaggtgatgacaggccattcttctggatgttcgagaatgtggtggccatgaaagtgggtgacaagcgtgacataagccgttttctcgaatgtaatccagtcatgattgacgcaataaaagtctccgctgcccatagggctaggtatttttggggcaatcttccgggaatgaatcgaccagttatcgcttcaaaaaacgataagcttgagctgcaggattgcctggagtataatagaatcgctaagcttaaaaaagtgcaaactatcactacaaagtcaaacagtatcaaacagggtaagaatcagcttttcccagttgttatgaacgggaaagaggacgtgctgtggtgcacagagctcgaaagaatctttggatttccagtgcactataccgatgtctcaaatatgggcaggggagcgcgccagaagctgctcgggagaagttggtccgtcccagtgatacggcacctgtttgcacccctcaaagactacttcgcatgtgagtag

SEQ ID NO: 185655 - DNA, 2379 bp, synthetic construct
  misc_feature 1..2379: note = Description of Artificial Sequence: Synthetic coding sequence
  source 1..2379: mol_type = other DNA
atgaagggcgacacccggcacctgaacggcgaggaggacgccggcggcagagaggatagtatcctggtaaatggagcctgctcagaccagtcttctgatagcccgccaatcctggaggctatcaggactcctgagatccgcggaagaaggtcgtcctctagactgtctaaacgggaagtcagttctttgctgtcatacacccaggatctcacgggagatggggatggcgaggacggcgatggatctgacacccctgtaatgcctaagctgtttagagagactcgaaccagatcagagagtccagctgtacgcaccagaaacaataatagcgtgagttcccgcgagaggcacagaccaagtcctcggtccactcgtggcagacagggtaggaatcatgtggatgagtctcctgtggaatttcccgcgacacgtagtctaagacggcgagctaccgctagcgcaggcactccatggccttcccctccgtcctcctatctgacaatcgatctcacagacgacaccgaagatacacacgggaccccacagtcctctagcacgccatatgcccgcctggcccaggactcacaacaaggtggaatggaatcgccacaggtggaggcagactcaggcgacggagacagcagcgagtatcaggatgggaaagagtttgggatcggagatctggtgtgggggaagattaagggattctcttggtggcctgcgatggttgtctcttggaaagccacttctaagagacaggctatgagcggcatgcggtgggtacagtggtttggtgatggcaagtttagcgaggtctcagctgacaagctcgtggccctgggactcttctcccagcattttaacttggccactttcaacaagttggtgagttaccgaaaagccatgtatcacgctctagagaaagcacgtgtcagggctgggaagacattcccctcaagccctggagattctctggaggaccaactcaagcctatgttagagtgggcccacggcggttttaaacccactgggatagaaggtctgaaacccaataacacccagccagagaacaaaacgagacggcgaaccgctgacgactcagcgacatcagattattgccctgcaccaaagagacttaaaaccaattgctataataatggcaaagatcggggtgacgaggatcaatccagggagcaaatggccagtgacgtcgcgaataataaaagttccttagaagacggctgccttagctgtgggcgtaaaaacccagtctctttccatccactgtttgaaggcgggctctgtcagacatgccgggataggttcctcgaactgttctacatgtatgatgacgacggttaccaaagttactgcaccgtgtgctgtgaaggtcgcgaactgttgctgtgttccaatacctcatgctgtagatgtttctgcgtggaatgcctcgaggttctagtcggaacggggacagcagccgaagccaaactgcaggaaccctggtcctgctacatgtgcctgccacagagatgccatggcgtcctgcgccgtcgaaaggattggaatgtgcgcctccaggccttctttaccagcgacaccggactggagtatgaagccccaaagctctaccccgctatccccgcagcaagaagaagacccattagggtgctgtctctgtttgacggaattgcgaccggatatctggtgctcaaggagctcggcatcaaagtgggaaagtacgttgcctcagaggtttgtgaagagagtatcgcagtcgggacagtgaaacatgaaggaaacattaagtatgtcaatgatgttagaaatattactaaaaagaacatagaggagtggggcccgtttgacctcgtcattggcggctctccctgcaatgatctgtcaaacgtgaatccagcacgtaagggcctctatgagggtactggacggctcttctttgaattttatcacctactcaactactctaggcctaaggaaggggatgatcggccattcttctggatgttcgagaatgtagtcgcaatgaaggtgggtgacaaacgcgacatatctcggttcctcgaatgcaacccggtcatgattgacgctatcaaagttagcgcagctcatagagctcgctatttttgggggaaccttccaggcatgaataggccagttattgcttccaagaatgataagctggaattacaggattgtctggagtacaatcggatcgccaaagatctgtggctgagttgtgctcttcacagacgggtccaacacggaccctggtgtccaccagaggctgccggaaaggtgttagagcgggcctgtcatcccactcctctccggcctagcgaggggctgctctgcatgtag

SEQ ID NO: 185656 - DNA, 2313 bp, synthetic construct
  misc_feature 1..2313: note = Description of Artificial Sequence: Synthetic coding sequence
  source 1..2313: mol_type = other DNA
atgaagggcgacacccggcacctgaacggcgaggaggacgccggcggtagggaggactcgattctggtgaacggcgcctgcagcgatcagtcgtcagactcccccccaattctagaggctataaggacacccgaaatccggggaagacgatcctccagtaggctgtcaaaacgagaagtgtcctcgctgctttcctatacacaggacctgaccggtgacggggatggcgaagacggagatggaagcgacacaccagttatgcctaagttatttagagagacgcgaacacggagcgagagccctgccgtgcgcacgagaaataacaattccgtgagcagcagggaacggcataggccgtcaccccgttccactagaggacgccaggggaggaatcacgtcgacgagagcccggtcgaattccctgccaccaggtccctccggcggagagcaaccgcctcagcaggcacgccatggccatcaccaccatcaagttaccttaccattgatttgactgacgacacagaagatacacatggcaccccacagtcatcctccaccccctacgcccgccttgctcaggactctcagcagggcggtatggagagtccgcaagtggaggccgactcgggcgatggggatagctccgagtaccaggatggaaaggagttcgggataggggatcttgtgtggggtaaaatcaaaggtttctcatggtggcccgccatggtggtaagctggaaggccacctctaagcggcaagccatgtctggtatgcgctgggttcagtggtttggagatggaaaattctccgaggtttctgctgacaaactcgtggctctggggcttttttcccagcactttaatctggctacatttaataaattggtgagttacaggaaggctatgtatcacgccctggagaaggcacgcgtgcgcgcaggaaagaccttcccaagttcacctggagactcacttgaagaccaacttaagcctatgctggaatgggcacatggcggatttaaacccactggaatcgagggattgaagcccaataacacacagccagagaataaaacgcgcaggcgcactgccgatgattctgctacttccgactattgcccagcgcctaagagactcaagaccaactgctacaacaacggtaaagaccgtggtgatgaagaccaatcgcgggagcagatggcctcagacgtggctaacaataagagtagcctggaggatgggtgtctgtcttgcggcaggaagaacccggtatctttccatccgctctttgaaggaggcctgtgccagacctgccgcgataggttcctcgagctcttctatatgtacgacgacgatggctatcagagctattgcacagtgtgctgtgagggcagagagctactgctgtgttcaaacacaagctgttgcaggtgtttctgcgtggagtgcctagaagtgctagtcggtacaggcaccgcagccgaggctaaattgcaggaaccctggagttgctacatgtgcctgccgcaacgctgccacggggtgctgaggcgcaggaaggactggaatgtcagacttcaagcgtttttcaccagcgatacggggttggaatatgaggccccgaaattgtatccagccatcccggcggctcgtagacgccctatccgtgtgctgagcctgtttgacggcatcgccactggctatctcgtcctgaaagagttaggcattaaggtagggaagtacgttgcgagtgaggtatgcgaggaaagcattgcagtgggaaccgttaaacacgagggcaatatcaagtacgtgaacgacgtaaggaacattacaaagaaaaatatagaggaatggggaccctttgatctagtgattggaggttcgccttgcaacgatctatccaatgtcaaccccgcccggaagggcctttacgagggcaccggacgactgtttttcgagttttaccaccttctcaactatagccgacccaaggagggcgacgaccgcccgttcttttggatgtttgagaatgtcgttgcgatgaaagtgggtgacaaacgggacatcagccgctttcttgaatgtaacccggtgatgatcgatgctatcaaggtgtctgcagcacaccgagctagatacttttggggaaacctgccgggaatgaacagaattttcggtttcccagtgcactacactgacgtgtccaacatggggaggggagcccgccaaaagttgctgggacggtcctggtccgtgccagtcatccgtcatctcttcgcccccctcaaagactatttcgcttgcgaatag

SEQ ID NO: 185657 - DNA, 2502 bp, synthetic construct
  misc_feature 1..2502: note = Description of Artificial Sequence: Synthetic coding sequence
  source 1..2502: mol_type = other DNA
atgaagggcgacacccggcacctgaacggcgaggaggacgccggcggccgagaagactcaatccttgtaaacggcgcatgctcagaccaatcttcagacagtcctccaatcctggaagccataagaacccctgagatcaggggccggcgtagctccagccggctgagcaaacgagaggtgtcaagtctgctctcctatacccaggatctgacaggggatggggacggcgaggatggagatgggtccgatacacctgtgatgcccaagctgttccgcgagaccaggacaaggagcgagtcaccagcggtcagaacgcgtaataacaactcagtaagtagcagggagcgccataggccgagtcccaggagtaccagaggacgacaagggcgaaaccatgtggatgagtctcccgtcgaattccccgctacccgctccctgcgaaggcgtgcaaccgcctctgccggcaccccttggcccagtcccccttctagttacctcacaatcgacctgactgacgacaccgaagacactcacggaacccctcagtcctcatctacaccttatgcgcgcctggctcaagattcgcagcaaggggggatggagtccccccaagtggaggccgattctggagatggcgacagtagtgaataccaggatggcaaggagtttgggatcggagatctcgtgtggggtaaaatcaagggctttagctggtggccagcaatggtggtgtcctggaaggcaaccagcaaacgacaggccatgtctggcatgcggtgggttcaatggtttggcgatgggaagttctctgaggtgtccgcagacaagctcgtggccttgggcctgttttcccagcactttaatctggccaccttcaataagctggtaagttacaggaaggctatgtatcacgccctggagaaagctcgagtaagagccggaaagacctttccatcaagccctggggattccctcgaggaccagttaaaaccgatgctggaatgggcacacggaggttttaagcccaccggcatcgagggtcttaagccaaataatacccagcctgagaataagactagacggcgtaccgccgatgactcagcaacctctgactactgtccagcaccaaaacggctgaagaccaattgttacaataatggcaaggatcgtggcgatgaggatcagagcagagagcagatggcttcggacgtggccaataacaagagttccttagaagacgggtgcctgtcctgtggacgtaagaatcccgtcagttttcatcccctgttcgagggcgggctgtgccaaacttgccgggatcggttcctggaactgttctacatgtatgacgatgacggataccaaagctactgcacagtgtgttgcgagggccgggaactactcctgtgttctaacacatcatgttgccgatgcttctgtgtggagtgtctggaagtgcttgtgggtaccggcacggctgccgaagcgaaactgcaggaaccttggtcctgctacatgtgcctcccacagcggtgccacggcgtcctacgcagacggaaagactggaatgtgcgcctccaagcttttttcacctcggatacgggtctggagtatgaagcccccaaactctacccggctataccagctgctcgccgacgccccatcagggtcctcagcctgtttgacggaatcgctaccgggtatctggtactcaaagagcttgggatcaaggtgggcaagtacgtagcctctgaggtatgtgaagaatcaatagctgttgggactgtcaagcacgagggtaatattaagtacgtaaacgacgtgcggaacataaccaaaaagaatattgaggaatgggggccctttgacttagtgattggaggatctccttgcaacgatctgtccaacgtgaacccagcccgcaaggggctgtatgagggcacaggacgactcttcttcgaattttaccaccttctgaactactctcggccaaaggaaggcgacgaccgcccatttttctggatgttcgagaacgttgtggcaatgaaggtgggcgacaaacgtgatattagcaggttccttgagtgcaaccccgtcatgatcgacgctatcaaagtgtctgcggctcacagagcacggtacttctggggaaatctgcctggcatgaatagacccgtgattgcatccaaaaatgataagttggagcttcaggactgtttggaatataatcgaatcgccaaacttaagaaagtccagactatcacaactaagtccaatagcattaagcagggcaagaaccagctctttccagtggtcatgaatggaaaagaggatgtgttatggtgtactgagttagaacgaattttcgggttccccgtccactacactgacgtctccaatatgggcagaggggctaggcagaagttactggggcggtcttggagtgtgcccgtcatccgtcaccttttcgcccctctgaaggattacttcgcctgtgaatag

SEQ ID NO: 185658 - DNA, 999 bp, synthetic construct
  misc_feature 1..999: note = Description of Artificial Sequence: Synthetic coding sequence
  source 1..999: mol_type = other DNA
atgaagggcgacacccggcacctgaacggcgaggaggacgccggcggtagggaagactcaatcctggtaaacggggcatgttctgaccagagttccgatagcccccccatactcgaggccattagaactcctgagattaggggccggagatctagcagtcggttgtcaaagagagaagtgagcagtctcctttcttacacacaggatctcaccggtgatggagacggcgaggatggagatggcagcgatacccctgtgatgcccaagctgttccgcgagactaggacacggtcagaaagccctgcttccctgagacggcgtgccacagccagcgctggaacgccttggcccagcccaccttcgtcttacctgacaattgatctgacagatgacacagaggacacccatggcaccccgcagtcatctagtaccccttatgccagactcgcccaggactcccagcagggcggaatggagtctccccaggtggaggccgacagcggggacggcgattcctcagagtaccaggatggcaaggagtttgggataggagacctggtgtggggaaaaattaaaggcttctcttggtggcccgctatggtggtcagttggaaagctacctcaaagaggcaggcaatgtctgggatgcgatgggtgcagtggtttggagacgggaagttttctgaggtatctgccgataaactggttgctttaggtctgttctctcagcatttcaacctggcgacctttaataagttagtgagctaccgcaaggcaatgtaccacgctcttgagcggaccaggcttgaggacgcacagttgaccactcagcccccgttaacaaccgcaccacatccaagcgctagccgtcaaatcgccattaccacagctaaaaccgaaggaatgaagatcagagcagaaaacaagtggttgcagatgctgcctactaccagggcggcttggaaagagaaacctagagtactgccaccctccctgtag

SEQ ID NO: 185659 - DNA, 2187 bp, synthetic construct
  misc_feature 1..2187: note = Description of Artificial Sequence: Synthetic coding sequence
  source 1..2187: mol_type = other DNA
atgaagggcgacacccggcacctgaacggcgaggaggacgccggcggtcgcgaagacagtatcttggttaatggggcttgcagcgaccaaagctccgactctccacccatactggaagccatccgcaccccagaaattagggggcgccgcagcagtagcagactgtcaaagcgcgaggtgtcatctttgctatcatacacacaggacctcacgggtgacggtgatggcgaggacggagatggttctgacaccccagtgatgccaaaactgttcagagaaacgcggacacggtccgagtcaccggcaagcctgcgaaggcgcgctacagcctctgctggcacaccttggccctcgccaccttcctcatacctcaccattgatctgactgatgataccgaggacactcacggaacgccacagagttcttctaccccctacgcccgactcgctcaggattctcagcagggcgggatggagtcgcctcaggtggaggctgattctggagatggggatagctcagagtatcaggatggcaaagagttcgggattggagatttagtctggggcaagatcaaaggcttttcatggtggcctgccatggtggttagttggaaagcgacatccaagcggcaggccatgagtggcatgcgctgggtacagtggtttggagatggtaagtttagcgaagtgtcagccgacaagttagtggctctgggcctcttttctcaacattttaatttagccaccttcaacaagctggtaagctatagaaaagccatgtatcacgcgctggagaaagctagagtcagggctggcaaaacctttcccagctcacctggcgactccttggaagaccagcttaaacccatgctggaatgggcccacggagggttcaagcccactgggattgaggggctaaagccaaacaacacacagcctgagaataaaactcgccgacggactgccgacgattcagccactagtgattactgtccagcaccgaagcgcctgaaaaccaactgttataacaacggtaaagaccggggcgatgaagaccaatccagggaacagatggccagcgatgtcgctaataacaaatcttctctagaggatggctgcctgtcctgtggcagaaagaatcccgtgtcctttcatcctcttttcgagggagggttatgccagacgtgtcgggaccggtttctggagctcttctatatgtatgatgacgatggctatcaaagttactgtaccgtttgctgcgaaggtagggaactcctcctttgttcaaacacgagctgctgcaggtgtttctgtgtggagtgtctggaagtcctggtgggtaccggaactgcagccgaggccaagctgcaggagccttggtcgtgctacatgtgtctaccgcaacgctgccacggtgtgctgcgtagacggaaggattggaatgtccggttacaggcttttttcacatccgataccggattggaatatgaggctccaaagctgtatcccgcaattcccgccgcccgccggcgccccatccgggtactatccttatttgatggcattgcaactggttacttagttttaaaggagttaggaattaaagtggggaagtacgtggcttcagaagtttgtgaagagagtattgccgtcggaaccgtgaagcacgagggtaatattaaatacgttaatgacgtgcggaacataactaagaaaaatatagaagagtgggggccatttgatcttgtgatcgggggatcgccttgcaacgacctgtctaacgtgaatccagcacggaaaggtttgtacgaaggcactgggcggcttttcttcgagttctaccacctgttgaattactctcgcccgaaagagggcgacgaccgtccttttttttggatgtttgagaatgtcgtcgcgatgaaggtgggggacaagagggacatatcaaggtttttagagtgtaatccagtgatgatcgacgctatcaaggtttccgccgcgcacagggcacggtacttctggggcaacctccccggaatgaatcggatttttgggttccctgtgcattatacagatgtcagtaacatgggtcgcggtgctaggcaaaagctactcggcagatcctggtcagttcctgtgataagacacctgtttgccccgctcaaagactatttcgcttgcgagtag

SEQ ID NO: 185660 - DNA, 2085 bp, synthetic construct
  misc_feature 1..2085: note = Description of Artificial Sequence: Synthetic coding sequence
  source 1..2085: mol_type = other DNA
atgaagggcgacacccggcacctgaacggcgaggaggacgccggcggacgagaggactctatacttgttaatggcgcctgctctgatcaatcatcagacagccccccaatcctcgaggccattagaacgcccgaaatccgaggccgacgttcgagtagtcgcctaagcaaacgcgaagtgagttcactgctgtcttacacacaatcactaaggcgccgggctactgcaagtgccggcacgccatggccttctcctccttcttcataccttacaatagatctgactgatgacaccgaggatacacacgggacgccgcagagtagttcaaccccctacgcgcgactggctcaggacagtcagcaggggggcatggagtcccctcaggttgaagcggactctggcgacggcgattctagtgaataccaggacgggaaagaatttggcatcggcgacctggtgtggggaaaaatcaaggggtttagctggtggccagccatggtcgtgtcttggaaagccacgtcaaagaggcaagcgatgtccggcatgcgctgggtccagtggttcggggatggaaaattttcagaggtgtctgcagacaagctggtcgctctgggactgttttcacagcatttcaatctagcaactttcaataaactcgtttcttaccggaaagccatgtaccacgcactcgaaaaagctcgtgtgcgcgccggaaagaccttcccctccagtcccggtgattccttggaagaccaactgaagccaatgctcgagtgggctcacggaggtttcaagcccaccggaatcgaaggattgaagccaaacaacacacagccagaaaacaagaccaggcggagaaccgccgatgattcagcaacttcagactactgccccgccccaaagcgacttaagacgaattgttacaacaacgggaaagataggggcgacgaagatcagagtcgcgaacagatggcgagcgacgtcgccaacaataagtcaagcctggaagacggttgcttgagctgcggaaggaaaaatcctgtctcttttcacccattgtttgaggggggtctctgccagacatgccgtgatcggtttctagaattgttttacatgtacgacgacgacggatatcaatcctactgtactgtgtgctgcgaaggtagggagctcttgctctgctctaatacttcttgctgtcgatgcttctgcgtggagtgtctggaggttctggtgggtaccgggacagccgcagaagccaaactgcaggaaccctggagttgctatatgtgtctacctcagagatgtcatggagtcttgaggagacgtaaagattggaacgtacgtctgcaggcatttttcacttctgacacggggcttgaatacgaggccccaaagctgtaccctgcaataccagcagcccggcggaggcccattcgagtacttagcctctttgacggaattgccaccgggtacctggtgttgaaggagttggggataaaagtgggaaaatacgttgcatctgaagtctgcgaggagtctatagctgtcggtaccgtcaaacacgaagggaacattaagtatgtgaacgatgtccgtaatatcacgaagaaaaatatcgaggaatggggacccttcgatctggtcatcggcggttccccatgtaatgacctttccaatgttaaccctgctcgaaagggcctgtatgaggggacaggcagactgttttttgaattctaccacctcctaaattacagccgccctaaagaaggcgacgatcggccgttcttttggatgttcgagaacgtggtcgcaatgaaggtgggagataaaagggacatcagtcgcttcctagagtgcaatccagtaatgattgatgctataaaagtctccgcggcgcaccgagcccggtacttctggggcaacctccctggaatgaataggatctttggatttccggttcactacacagacgtaagcaacatgggccggggcgctaggcagaagctgctcggacgttcatggagcgtgccagtgattcgtcacctctttgccccgttgaaggactacttcgcttgcgaatag

SEQ ID NO: 185661 - DNA, 1701 bp, synthetic construct
  misc_feature 1..1701: note = Description of Artificial Sequence: Synthetic coding sequence
  source 1..1701: mol_type = other DNA
ggccggagcccccggggccggagcgagcggccccccaccgacggcacgggaagtttagccgtaggccgcgccggggggaatgccgctcgtccagcagcgctcggcctgtccgggcctagtaaaccaagttcggccatcggagcaggagactcccgagctcagcgtcccgctagaccaccagctggactgcccccagcttcacccgacccccgcttgcgccgtcccgccgctccccaacctgctctgaggcaggagtcaatgaagggcgatacgagacacctgaatggggaggaggacgccggaggcagggaagacagtatacttgtcaacggcgcttgctccgaccagagctccgactcaccccccattcttgaagctataaggacacctgagattaggggtcgacggagttcctctcgactgagtaaacgagaagtgagctctctgttatcttacacccaggacttgaccggagatggggacggagaggatggtgacggaagcgacactcccgtgatgcctaaattgtttcgcgaaacaagaaccaggtccgaaagcccggccgtgaggactcggaataacaattccgtcagcagcagagaacggcatcgcccctcgccaagatccactcgagggcgacagggccgtaaccatgtagacgaatcccctgttgagtttcctgccacaaggagtctccggagacgagctaccgccagcgccggcaccccttggcctagtcccccgagctcctacctaactatagacctcacagatgacaccgaggacacccatgggactccccagtcttcgagtacaccttacgcacgcctcgcacaagacagccaacagggaggtatggaaagtccgcaggttgaggccgactctggagatggcgatagcagtgaataccaggatgggaaagaatttgggatcggcgatctcgtgtggggcaagataaaaggcttcagttggtggcctgcgatggtggtttcctggaaggctacatctaaaaggcaggccatgtccggcatgagatgggtccagtggttcggcgacgggaagttcagtgaggtgagcgcagataaacttgtggctcttggcctctttagccaacacttcaacttagcaaccttcaataagcttgtctcataccgcaaagcaatgtaccatgctctggagaaggcacgcgtccgtgccggcaagacatttcccagctcgccaggcgactctcttgaggaccaactgaaacctatgttggaatgggctcatggcgggttcaaacccactggaatcgaaggcctgaaaccaaacaatacccaacccgagaataaaacccggcggaggacagccgatgattcagctactagtgactattgtccagctcctaagcgcctgaaaactaactgttataacaatggcaaggaccgcggagacgaagatcagtccagagaacagatggcctccgatgtcgcaaacaacaagagtagcctggaagatggatgcctcagctgcggacgcaagaacccagtttccttccaccccctgttcgaagggggcctttgccagacatgcagacatctatgcggcgatagcgtgaaaccaactcatccgtcctgccttgccttgtgcctgtgggggagaatgggcgactcctgtcacagagggcaatggcacgcggggcattcgcaactctctttctag

SEQ ID NO: 185662 - DNA, 1164 bp, synthetic construct
  misc_feature 1..1164: note = Description of Artificial Sequence: Synthetic coding sequence
  source 1..1164: mol_type = other DNA
atggccgccatccccgccctggaccccgaggccgagcccagcatggacgtcattctggttggctcttcagaactgtccagcagcgtgagcccagggacagggcgggatctcattgcctacgaggtgaaggcaaaccagaggaatatagaggacatttgtatttgttgcggatccctgcaggttcacacacaacatcctctcttcgagggagggatttgtgcaccctgcaaggacaagttccttgatgccctctttctctatgatgatgacggatatcagtcatactgctctatatgttgcagcggtgagactctcttaatctgtggcaaccctgactgtactaggtgttactgctttgagtgtgttgacagtcttgtggggcctggcacttcagggaaagtgcacgccatgtctaattgggtatgttatctatgcttgccaagttcaagatcaggtctcctccagaggagacggaagtggcggagtcaattaaaggccttttacgatcgagaaagcgaaaatcctttggagatgtttgagacagttcccgtttggcggaggcagcctgtgcgggtgctgtcactctttgaagacataaagaaagagctgacgagcctggggttcctcgagtcggggagtgacccgggtcagctcaagcatgtagtggatgtgaccgacactgttagaaaagatgtcgaagaatggggcccatttgacttggtgtacggggcaacccctccacttggacacacatgtgaccggccgccctcatggtacttattccagttccaccgccttttacagtacgcccgccccaagcccggctcccctagaccattcttctggatgtttgtcgacaacctggtcctaaacaaagaagatttagatgtggcatccagatttcttgagatggaacccgtaactatccccgatgttcacggcggctccctgcaaaatgccgtgcgggtatggtcgaatattccagctatccgatcctcgcgacactgggccctggtgtccgaggaggagctctccctcctcgcacagaataagcagtccagtaagctggccgcaaaatggcccacgaagcttgtgaagaattgtttcctgccgctcagggagtatttcaagtacttttcaaccgaactgaccagtagcctgtag

SEQ ID NO: 185663 - DNA, 1161 bp, synthetic construct
  misc_feature 1..1161: note = Description of Artificial Sequence: Synthetic coding sequence
  source 1..1161: mol_type = other DNA
atggccgccatccccgccctggaccccgaggccgagcccagcatggacgtgattttggtgggctcctccgaattgagttcgtccgtctctccagggaccggtcgggatctgattgcctacgaggtcaaggccaaccagaggaacattgaggacatctgcatctgctgtggatctctgcaggtgcatacacagcaccctctcttcgaaggaggcatatgcgctccatgcaaagataagttcctggacgcccttttcctgtacgacgacgatggctatcaaagttactgttctatctgctgttcaggggagactttgctaatttgcggcaaccccgactgcactcggtgctattgctttgagtgtgtggatagcctggtcggcccaggcacctctggcaaagtgcacgccatgtccaattgggtgtgttatttgtgtttaccaagttcccggagcggactcctgcaaagacggagaaagtggagaagccaactgaaggccttttatgatagagaatccgagaacccacttgaaatgttcgaaactgtgccagtgtggcggaggcagcctgtgagagtgctcagtttgttcgaggacatcaaaaaggagctcactagtttgggatttctagagtcaggtagcgatcctggccagttgaagcacgtcgtagatgtgacagacaccgtgcgcaaagatgttgaggaatggggcccatttgatttagtctatggagccaccccacccctgggccatacctgtgatcggccacccagttggtacttattccagttccatcggttgctgcagtacgcccggccgaaaccagggtcgccaagacctttcttttggatgtttgtagacaatcttgtactaaataaggaggacctggatgtggcatcccgtttcctcgagatggaaccagtgacaatccccgacgtccacggcggctcactccaaaatgctgtccgggtttggtcaaatatcccagcgatcagatcacgtcactgggctcttgtgtctgaggaggagctaagtctgcttgcgcagaacaaacaatctagtaagttagccgcgaagtggccaaccaagttagtcaaaaactgtttcctgcctttgagagagtattttaagtacttttccacggaattaacaagcagtctgtag

SEQ ID NO: 185664 - DNA, 3123 bp, synthetic construct
  misc_feature 1..3123: note = Description of Artificial Sequence: Synthetic coding sequence
  source 1..3123: mol_type = other DNA
atgctggaggacatcagcgaggaggacatctgggagtacaagagcaaaagaaaacccaaacgggtggaccccaataatggctctaagaacattctgaaatcagtcgaaaaagcgacagatggaaagtatcagtctaagaggtcccgcaatagaaaaagagctgcagaggccaaagaggtgaaagaccacgaggtcccacttggtaacgctggatgccagaccagcgtcgccagctctcaaaacagctcatgcggggacggtatccagcagacacaggacaaagagactaccccaggaaaattatgcaggacccagaagagtcagcatgttagccccaaaattaggcccgtgtatgatgggtactgtccaaactgccaaatgcctttttcctctctcatcggtcagacacctcgctggcacgtgtttgagtgcttggatagtccccccagaagcgagactgaatgccccgatggtctgctctgtacctctacaatcccgttccactataagcggtacacgcacttccttctcgcccagagtcgcgctggggaccacccattctcgtcgcccagccccgcgagtgggggtagcttctctgaaactaagagcggggttttgtgttcccttgaagaaaggtggtcgagttaccaaaatcaaacagacaattcggtcagcaacgatccactgctcatgacccagtacttcaagaagtctccgtcactgactgaggcaagtgaaaaaatcagcactcatattcagacctcccagcaggcattgcagtttactgatttcgtggagaacgataagctggtgggtgtagcgctcagattggcaaacaattctgagcatatcaatctgcctctgcccgaaaatgacttctccgattgcgaaatctcctacagccctcttcaaagtgacgaggacactcacgacatcgacgagaaacctgacgattcccaggagcagctgttttttacagagagctccaaagatggtagccttgaagaggatgatgattcctgtggtttctttaagaagcggcatggacccctgcttaaggaccaggacgagtcctgtccgaaggtaaattcctttctgaccagggataaatacgacgagggcctatacagattcaactcgttgaatgatctgagccagcctatttctcagaacaacgagagtacattgccctatgatcttgcttgtacgggtggagatttcgtgcttttcccccctgcattagccggaaaacttgccgcaagtgtgcatcaggctaccaaggctaaacccgatgaaccagagttccactctgcacagtcaaataaacagaaacaggtcattgaggaaagttcagtctataatcaggtgagcctgccattagtgaagtccctgatgttgaaacctttcgaatcccaggtcgagggatacttaagttcacaaccgacccagaacaccataaggaagctgtcctctgaaaatctgaacgccaagaacaataccaactcggcgtgcttttgtcgcaaggccctggaaggagtgccagtgggaaaggcaacgattttgaataccgaaaacctgtcttcaactcccgctccaaagtacctaaagatccttccctccggcttgaaatacaatgctcggcacccttcaaccaaggtgatgaaacaaatggatattggtgtgtacttcggcctgcccccgaagagaaaggaggaaaaactgttgggagagtccgccttggaaggcattaacctgaaccctgttccttccccaaatcaaaaacggagctcccagtgcaagcgcaaggcagagaagtcccttagtgaccttgagtttgatgccagcaccctccacgaatcacaactgtcagttgagctatcttccgaacgttcccagcggcagaaaaagaggtgcaggaagtcaaacagcctgcaggagggagcttgtcagaagcggagcgaccacctgattaatacagagtccgaggccgtgaacctgtccaaagtcaaggttttcaccaaatctgcccacggaggcctccagcgcggaaacaaaaaaatccccgaaagttccaacgtgggcgggtctcggaagaaaacctgtcccttctacaaaaagatccctggaactggattcacagttgatgcctttcagtacggcgtcgtggaggggtgtacagcttattttctgacgcatttccatagcgatcattacgcaggactgtcaaaacactttacgttcccagtgtattgctcagaaattaccggcaacctgctgaagaataagctgcacgttcaggagcaatatatccacccactacccctggacaccgagtgcattgtgaatggagtaaaagtagtccttctggacgccaatcattgccccggcgccgtgatgattctgttttacctccccaatggcaccgtgatactgcatactggagatttcagggccgatccaagcatggaaagaagtttgctcgccgatcaaaaggtgcatatgctgtatctggacacgacgtactgtagcccggaatatacgttcccatcccaacaggaagtgatccggtttgcaatcaacactgcctttgaggcagtgactcttaatccccacgcgttggtggtgtgcggcacatattccatcgggaaggagaaggtcttcctcgctattgcagacgttctcggaagtaaagtgggcatgagtcaggagaaatataagacgctacaatgcctgaatattcctgagatcaactccttaatcactactgacatgtgttcttccttggtacatctccttccaatgatgcagatcaacttcaaagggctacaatcacacctcaaaaaatgcggcggaaagtataatcagattttggcctttcggcccaccggatggacgcatagcaataaattcactaggatagccgacgtcatcccacagacgaaaggcaatataagtatttacggtatcccttacagcgagcacagcagctacctggaaatgaagcgcttcgtacagtggttaaagccacagaagatcatacctacagtcaacgtgggtacctggaaatctcgttccaccatggagaaatactttagagaatggaagttggaggctggctattag

SEQ ID NO: 185665 - DNA, 3123 bp, synthetic construct
  misc_feature 1..3123: note = Description of Artificial Sequence: Synthetic coding sequence
  source 1..3123: mol_type = other DNA
atgctggaggacatcagcgaggaggacatctgggagtacaagagcaagagaaagcccaagcgggtggaccccaacaacggaagtaagaatattctgaagtcagtggagaaagccaccgatggaaaataccagagcaagagatccaggaatcgcaagagagcagccgaggccaaggaggtcaaagatcacgaggtccccctaggcaatgcgggatgccagacttcagtggcatcctctcagaacagcagttgtggcgacgggattcagcagacccaagacaaagagaccactccaggtaaactttgtaggacccagaaaagtcagcacgtgtcgccaaaaatccgaccagtgtacgacggctactgtccaaattgccagatgccatttagttccctcattggacagacgccccgatggcacgtgttcgagtgccttgacagccccccacgcagcgagactgagtgcccagatggactgctctgcacgagcaccatcccatttcattacaagcgttacacccacttcctgctggcacaaagccgagcgggtgatcacccgttctcatcccctagtcccgcttccgggggtagcttcagcgaaacaaagtctggcgttctgtgtagtctggaagaaagatggtccagttaccagaaccagactgataattctgtgagcaacgatccattgctgatgacccagtattttaagaagtccccttcccttactgaagcttcagaaaagatttcaacgcacattcagacatcccagcaggccttgcaatttacagacttcgttgaaaatgataagctggttggggtggccttgagactcgcaaataactcggaacacatcaatctccccctgcctgaaaacgacttctcagattgcgaaattagttatagtcctctgcaatccgacgaagatactcatgacattgatgagaaaccagacgattctcaggaacaactgttttttacggagtcctcaaaggacggttctttggaagaggatgacgatagttgtgggttttttaagaagaggcacggcccattgctgaaggaccaagacgagtcctgtccaaaggtgaactcctttctcacaagggacaagtacgatgaaggtctttacaggtttaattccctgaatgatctgagccagcccataagccaaaacaacgagtcaacgttaccatacgatctggcatgcacgggcggagactttgttctgtttccccctgcccttgctggcaagctggcagcaagtgtgcaccaagccacaaaggccaaacccgacgaacccgaatttcactccgctcagagtaacaagcagaagcaagtaatcgaggagagtagcgtttacaaccaggtgagcctgcccctcgtaaagtctctgatgctcaagcctttcgagagccaagtcgaaggatacctttcaagtcagcctacccagaacaccattaggaaactctcttctgagaacttgaacgcaaaaaacaacaccaactcagcctgcttttgcagaaaagccctggagggcgtgccagtggggaaggccaccatccttaacactgaaaatctgtcttcgacccccgctcccaagtatttaaagatccttccctcgggcctgaaatataacgcacgacatcctagcaccaaggttatgaaacagatggacattggggtatatttcgggctcccccccaagcggaaggaagagaagctgctgggcgagtccgccctggaaggtattaatctgaacccagtgccatcacctaatcagaagagatcatcccaatgcaaacggaaggctgagaagtcattgagcgacttggaatttgacgcctccaccctgcatgagagccaactcagcgtcgaactgagttccgaacgctcccaaagacagaaaaagcgttgtcgcaagtccaactctttacaagagggcgcgtgtcaaaagagatcagaccacctgattaataccgagagcgaagccgtcaatctgtccaaagttaaggtgtttacaaaaagcgcccacggaggcctgcagcgggggaacaagaagatccccgagagtagcaatgtgggtggctcccggaagaagacctgcccgttctataagaagatccctggtacaggatttacagtggatgctttccaatacggggtggtggaaggctgtaccgcctacttccttactcatttccacagcgaccactatgccggcttatcaaaacactttacctttccggtgtactgttcagagatcaccggtaacctcctcaaaaacaagctccatgtccaggaacagtatatccacccccttcctctggataccgagtgcatcgtgaacggagttaaagtagtcttgctggatgcaaaccactgtccaggagcagtgatgatcctgttctatcttccaaacggaaccgtaatcctgcacactggcgattttagagctgatccgagtatggaacgcagcctattggccgaccaaaaagtccacatgctgtatctggatactacctattgttcccccgagtacacgttcccttctcagcaggaagtaatccggttcgccatcaacactgcattcgaggctgttacgctcaacccccacgctctggtagtctgcggcacttacagcatcggaaaggaaaaagtgttcctggcgattgctgacgtgctgggtagcaaagttggcatgagccaggagaagtacaagactctccagtgcctcaatatccccgagattaatagtttaatcaccaccgatatgtgttcatctctggtacacctcctccccatgatgcaaatcaattttaaaggcctacagagtcatctgaaaaagtgtggagggaaatataatcagatccttgcattccgtcccaccggatggacacatagcaacaaattcacacgcattgccgatgttatcccccagaccaaagggaatatttcgatatatggaataccatacagcgagcatagttcatatctggaaatgaaaagatttgttcagtggctcaagccacagaagattattcctacagtaaacgtaggtacctggaagtctcgttcaaccatggagaagtattttagggagtggaaattggaggccggatattag

SEQ ID NO: 185666 - DNA, 813 bp, synthetic construct
  misc_feature 1..813: note = Description of Artificial Sequence: Synthetic coding sequence
  source 1..813: mol_type = other DNA
atgctgcagaagcccaagagcgtgaagctgcgggccctgcggagcccaaggaagtttggtgtggctggacggtcctgtcaagaggtcttacgcaagggatgtttgcggtttcaactcccagagcggggatcaagactgtgcttgtatgaagacgggacagaactcacggaggactatttcccctctgtgccggacaatgcagagctagtgttattaaccttgggacaggcatggcaggggtatgtttctgacattagacgcttccttagcgcgttccatgaacctcaggtcggactaattcaagcagcccaacaacttctgtgcgacgaacaggccccgcagcggcagcggctactggccgaccttctgcataacgtgtcgcaaaatatagccgctgaaacacgggccgaggacccgccttggttcgagggccttgaatccagattccaaagcaaaagcggttatctcagatatagttgcgaatctcgcatcagaagctacctaagggaggtgagcagttacccgtcgacggtgggagccgaagcacaggaggagtttcttagagtcctcgggtcaatgtgtcagaggttgcggagtatgcagtataatggttcttacttcgatcggggggccaagggcggctctaggctgtgcacacccgagggatggtttagctgtcagggccctttcgacatggatagttgtctaagtcgccatagcatcaacccttatagtaaccgtgaaagcagaattctgttttcgacgtggaatctcgaccatatcgacggagtgttgttatgcggtcccggctag

SEQ ID NO: 185667 - DNA, 825 bp, synthetic construct
  misc_feature 1..825: note = Description of Artificial Sequence: Synthetic coding sequence
  source 1..825: mol_type = other DNA
atgtgcctgctgctggaccggcacctgctgttcgtgcccctggtggcagacgtcagtgacatcagacgatttctgtctgccttccacgagccccaagtcgggctgatccaagctgcccagcagttactgtgtgacgaacaggctccccagaggcaacgcctcttggctgatctgctgcataatgtgtcccagaacatcgccgctgagacccgggcagaagaccctccttggtttgaaggcctcgagtcacgatttcagagcaagagcgggtacctacgctacagctgcgaatcccgcatcaggtcgtatcttcgagaggtgagctcctatccatccaccgtgggagccgaagcgcaggaggagttcctgcgagtactgggttcaatgtgtcaacgactgagatctatgcagtataatggtagctattttgaccggggcgccaaagggggctcacgcctttgcacacccgaagggtggttttcctgtcagggaccatttgatatggactcttgcctcagccgccacagcattaacccttactcaaatagggagtctaggatactgttcagcacatggaacttggatcacatcatcgagaagaagaggaccatcatcccaaccctcgtggaagccattaaggagcaggacggccgcgaagttgactgggaatatttctacggactgctctttacatctgaaaacttaaaactcgtacatatcgtttgtcacaagaaaaccacacacaagctaaactgtgatccatcccgcatttataagccacagaccaggttaaagcgcaaacaaccagtacggaaacggcagtag

SEQ ID NO: 185668 - DNA, 312 bp, synthetic construct
  misc_feature 1..312: note = Description of Artificial Sequence: Synthetic coding sequence
  source 1..312: mol_type = other DNA
atgctgcagaagcccaagagcgtgaagctgcgggccctgcggagcccacgcaaatttggcgtcgccgggcgatcttgtcaggaagtgttacgcaaaggctgcttgcggttccaactccctgagaggggatctcgactttgtctgtacgaagacggaaccgagctcacggaggattattttccaagtgttcccgataatgccgagttggtgctcctgacccttgggcaagcctggcagggctggttccgccacgtctctcaggatagtttaacgctcctgggctcatcttgccctcctgccctggtgagttag

SEQ ID NO: 185669 - DNA, 825 bp, synthetic construct
  misc_feature 1..825: note = Description of Artificial Sequence: Synthetic coding sequence
  source 1..825: mol_type = other DNA
atgtgcctgctgctggaccggcacctgctgttcgtgcccctggtggctgacgtgtcggatattaggagattcctttcagctttccatgagccacaagtcggactgatacaagcagctcaacagctgctttgcgatgaacaagccccacaacgacagaggctgcttgctgacttgctccataacgtgtctcagaatatcgcggctgaaactcgggcagaagacccaccctggttcgagggactcgagagtaggttccagtctaaatctgggtaccttcggtacagttgtgaatctcgcattcgcagctatctgcgtgaagtgagcagttatccaagcactgttggagcagaggcgcaggaagaattcctccgagtacttggatccatgtgccagagactgaggtccatgcagtataacggaagttactttgatcgaggcgccaagggcggaagccggttgtgcacccctgaaggatggttctcttgccagggaccattcgatatggatagttgtctctcccggcattccataaacccctatagcaatcgtgagtctcggattctcttctcgacatggaacctagatcatatcatcgagaagaagagaactatcattccaactctggtcgaggcaattaaggagcaggatggccgtgaggtagattgggagtatttttacggcctgctgttcacctccgagaacctgaaactagtgcatatagtctgtcataagaagactacccataagctcaattgcgatccgagcagaatctataagccccaaaccagactgaagagaaagcaaccagttaggaagcgccagtag

SEQ ID NO: 185670 - DNA, 1017 bp, synthetic construct
  misc_feature 1..1017: note = Description of Artificial Sequence: Synthetic coding sequence
  source 1..1017: mol_type = other DNA
atgctgcagaagcccaagagcgtgaagctgcgggccctgcggagcccaagaaaatttggagtggctggtagaagctgtcaagaagtcctccggaagggatgcctgcgatttcaattacctgaacgcggatctagactgtgcctttatgaggatggtactgagctgacggaagactacttccctagcgtgccagacaacgctgagctcgtgctgttgacattgggtcaggcatggcaggggtacgtgagcgacatcaggaggttcttatcagcattccacgagccccaggttgggttgatccaagctgctcagcaactattgtgcgacgaacaggctccacagagacagagactgttagccgatctcctccataacgtaagccagaatattgcagccgagacaagggcagaagaccctccgtggttcgaaggcttagaaagtcgttttcagtccaagtctggctacctgcgctactcatgcgaatcacgcatcagaagctacctgagagaagtaagcagctacccctcgaccgtgggtgccgaagcgcaagaggagttcctgagagtgctgggatctatgtgccaaagactgaggagtatgcaatacaacggatcatattttgaccggggggccaagggtggaagcagactctgcactcctgaagggtggttctcatgtcagggcccctttgacatggacagttgtctgtcaagacattcaataaatccatactccaaccgtgagagtcgaatcctcttcagtacatggaatttggatcatattattgagaaaaagcggactattatccctactttggtcgaagccattaaggaacaggatggccgcgaagtggactgggaatacttctatggtctgctgttcacttcagagaatctgaagttggtgcacatagtttgccacaaaaagaccacccacaaacttaattgtgacccgtctcgcatatacaaacctcagaccagactgaaacgcaagcaaccagtgcgaaagaggcagtag

SEQ ID NO: 185671 - DNA, 351 bp, synthetic construct
  misc_feature 1..351: note = Description of Artificial Sequence: Synthetic coding sequence
  source 1..351: mol_type = other DNA
atgctgcagaagcccaagagcgtgaagctgcgggccctgcggagcccccgcaagtttggtgtcgccggccgcagttgccaagaagtcttgcgcaaaggatgcctcaggtttcagctgcctgagagggggagccgactgtgcctatacgaggacgggactgagctgaccgaggactactttccctcagtcccagataatgccgagctcgtcctgctgaccctgggccaagcgtggcagggctctgtcggagtcagggctcggactaagactagagatacaagctccctgtcaccaggagattgtcaggctctaggtaatggtggacggtgcggtcagcgactgtttttgtag

SEQ ID NO: 185672 - DNA, 261 bp, synthetic construct
  misc_feature 1..261: note = Description of Artificial Sequence: Synthetic coding sequence
  source 1..261: mol_type = other DNA
atgctgcagaagcccaagagcgtgaagctgcgggccctgcggagccccagaaagttcggagtcgccggccgatcatgccaggaggtgctacggaagggctgtttgcgcttccaacttccggaacgtggttctcggctctgcttgtacgaggacgggaccgagctgaccgaggactacttcccatccgtaccggataacgcagaattagtgttacttactcttggacaggcctggcagggatgttggtccgcagtggcgtag

SEQ ID NO: 185673 - DNA, 249 bp, synthetic construct
  misc_feature 1..249: note = Description of Artificial Sequence: Synthetic coding sequence
  source 1..249: mol_type = other DNA
atgctgcagaagcccaagagcgtgaagctgcgggccctgcggagccccaggaagttcggcgtggctggacggagctgtcaggaggttttacggaaagggtgtctgcggtttcagcttcctgaacgaggctctagactatgtctgtatgaagatggtaccgaactcaccgaggactacttcccctcagtccccgacaacgccgaactggtgctgttgactttagggcaagcgtggcagggatgtgaatag

SEQ ID NO: 185674 - DNA, 813 bp, synthetic construct
  misc_feature 1..813: note = Description of Artificial Sequence: Synthetic coding sequence
  source 1..813: mol_type = other DNA
atgctgcagaagcccaagagcgtgaagctgcgggccctgcggagccctcgtaaattcggtgtcgcgggccgctcgtgtcaggaggttttaaggaaaggctgcctgcgttttcagctgcctgagaggggaagcagactttgcctgtacgaggacggtacagaactcactgaggattactttccttctgtgccagacaatgccgagctcgtgctgctgacactcggccaggcttggcaaggttatgtgtctgacatccgacggtttctgtcagcattccacgagccccaagtgggcctgatacaagcagctcagcagctgctgtgcgatgaacaggcgccacagagacagcgattgctagctgatctcctccataacgtgtcacaaaacatcgcagccgagacccgtgctgaggaccctccctggttcgagggactcgagtctcggtttcaatccaagtcaggttatctgcggtattcttgcgaatcgcgcattcgctcgtacctgagggaggtctcatcctatccctccaccgtgggcgctgaggctcaagaggaatttctgagggttctgggaagtatgtgtcagaggctgaggtcaatgcagtacaacggctcatactttgatcgaggcgccaaggggggcagtcggctgtgcacacccgagggttggtttagctgtcaggggccatttgacatggactcttgcctgtcccggcacagtatcaatccttacagtaaccgtgagtccaggatcctgttctctacctggaacttagatcatattgacggcgtcctcctctgcggccccggctag

SEQ ID NO: 185675 - DNA, 3183 bp, synthetic construct
  misc_feature 1..3183: note = Description of Artificial Sequence: Synthetic coding sequence
  source 1..3183: mol_type = other DNA
atggagcagctgaacgagctggagctgctgatggagaagagcttctgggaagaggccgagctgccggctgagctattccaaaaaaaggtggttgcttcattccctagaaccgtactttccaccggtatggacaaccgctatttggtgcttgcagtcaatacagtccagaataaagagggcaattgcgagaagaggctggtcatcaccgcgtcccagagcttggagaataaggaactgtgtattctgaggaatgattggtgcagcgtccctgtcgagcctggcgacatcatacatctggaaggggactgcaccagcgacacttggattatcgacaaagattttgggtatctgattctgtatccagacatgctgattagtggcacatcaatcgcctcaagtattcggtgcatgaggcgggcagtgctgagtgagacctttcgatcttctgatcctgctaccagacagatgttaattggtactgtccttcatgaagtttttcagaaagccatcaacaactcatttgcccccgagaaacttcaggagctcgcattccagacaatacaggaaattcgacacctgaaggagatgtaccggctgaacctgtcacaggatgagattaagcaggaggtggaagattacctgccatcattctgcaaatgggctggcgatttcatgcacaagaataccagcactgattttccgcaaatgcagttaagtctgcccagtgacaattcaaaggacaactctacctgtaacattgaggttgtcaaaccaatggatatcgaggagagcatctggagccctcggttcgggctcaaaggcaaaatcgatgtcactgtcggagtcaaaatccatagaggttacaaaaccaagtacaaaataatgccactggagttgaaaacgggcaaagagtcgaatagcatagagcatcgcagtcaggtggttttgtacactctgctcagccaggagcggagagccgatcctgaagcaggtctcctcctctatctgaaaaccgggcagatgtacccggtgccagctaaccatctggacaaaagggaactgctgaagctgcggaaccagatggcattttccctattccaccggatcagtaaaagcgccacacgccagaaaacacagctggcaagcctgccacaaataatcgaggaagaaaaaacctgcaagtactgctcccagattgggaattgcgctctctattcacgggccgtggagcagcagatggattgtagttccgttccaatcgtgatgttaccgaagatcgaggaggaaacgcagcacctcaaacaaacccatttggaatatttttctttgtggtgtctaatgctgacactggaaagtcagagcaaggacaacaagaagaatcaccagaatatctggctgatgccggcttctgaaatggaaaagagtggcagctgtatcgggaacctgattaggatggagcacgttaaaatcgtatgcgacggtcagtatctgcataattttcagtgcaagcacggtgcaatccccgtgaccaacctcatggcaggggatagggtgattgtgagtggagaagagaggtctctgttcgcactgtctagaggctacgtgaaagaaatcaacatgacaactgtgacctgccttctggataggaaccttagcgtcctaccagaatccactcttttccgactggatcaagaagaaaaaaactgcgacatcgacacccccttaggaaacttgagtaagctgatggaaaacactttcgtgagcaaaaagctgagagacctcatcattgatttccgggagcctcaatttatcagctacctgagttctgtcctccctcatgacgctaaggacaccgttgcctgtattctgaagggcttgaataaaccccagcgccaggctatgaagaaggtgctgctgagcaaggactataccctgattgtcggaatgccgggtaccgggaaaacgactaccatttgcacactggtcagaatcctctacgcctgcggcttttctgtgctgctcacgagttatacccattctgcagttgataacatccttctcaaactcgcgaagtttaagatagggttcctgcgactgggacagattcagaaagtgcatcctgccatccagcaatttacagaacaggagatctgtcgcagtaaatctatcaaatccctagcactgctggaggaattatacaacagtcagctcatcgtcgcaaccacttgtatggggataaaccatcccattttttctaggaaaatctttgacttttgcattgtagacgaagcgtcccagatctctcagccgatctgcctaggacccctctttttcagccgaaggttcgtgctggtgggggaccatcagcagttacctccgctggtgttaaacagagaagccagggcgttggggatgtcagaatccctatttaaaagactggagcagaataagtccgcagtggtacagctgaccgtgcaatacagaatgaactccaaaatcatgtccctcagcaacaaactgacttacgaaggcaaattagagtgtgggagtgacaaagttgcgaatgcagtaattaacctgcggcattttaaagatgttaaacttgagctggagttctatgcagactattccgataatccgtggctaatgggagtttttgaacctaataatcccgtctgcttcttgaatactgacaaggtcccagcacccgagcaagtggagaaggggggcgtgtcgaatgtgacggaggccaaacttattgtgtttctcacaagtatttttgtgaaagccggctgcagcccaagcgacattggcatcattgccccctaccggcagcaactcaagatcatcaacgacctcctcgctaggagcatcggcatggtggaggtgaacaccgtggacaagtatcaaggtcgggataagtccatagttctggtgtccttcgtccgctctaataaggatggcacggtaggggagttgctcaaagattggaggcgccttaatgtcgctatcaccagggctaagcataagctcattctgttgggatgtgtccctagtttaaattgctatcccccactggagaaattactcaaccatctgaacagcgagaaacttatcatagacctgcccagcagagaacacgaaagtctgtgccatatcctgggtgacttccagcgggagtag

SEQ ID NO: 185676 - DNA, 2469 bp, synthetic construct
  misc_feature 1..2469: note = Description of Artificial Sequence: Synthetic coding sequence
  source 1..2469: mol_type = other DNA
atggagcagctgaacgagctggagctgctgatggagaagagcttctgggaggaagccgagctgcctgccgagctcttccagaaaaaggtcgtcgctagttttccacgcacagttttgagtacaggtatggataaccgctatttggtgctcgctgttaatacagtccagaacaaggaagggaattgtgagaaacggttggtcatcaccgcgtcccaaagtttggagaacaaagaactgtgcatccttaggaacgactggtgctccgttcccgttgaaccgggagacattattcacctggaaggcgactgtacgtccgacacttggataatagacaaggattttggctatctgatcctctacccagacatgttgatttctggaacctctatcgccagctctatccgttgcatgcggcgcgctgtcctgtcagagacatttagaagtagtgatccggctaccagacagatgctgattggtaccgttctgcacgaggtgtttcagaaagccatcaacaactcctttgccccagagaagctgcaggaactcgcatttcaaacaatccaggagatcagacacctcaaagagatgtatcggctcaatctcagccaggacgagatcaaacaggaagtggaggattatctaccttctttctgtaagtgggccggggacttcatgcataagaacacctcaaccgacttcccccagatgcagctttcactcccctcagacaatagtaaagacaactcgacctgtaacatagaagtggtgaagccgatggatatagaggagagtatctggtcgcccagatttgggctgaagggaaagatagacgtgactgttggcgtgaagattcatcgcgggtataaaacgaaatacaaaataatgcccctggaactcaagaccgggaaagagtctaacagcattgaacatcgctcgcaagtggtcctgtacaccctgctttcgcaggaaagaagggccgacccagaagcagggctgctgctgtatctcaagaccggccagatgtaccctgtacccgccaatcacttagacaagcgcgaattgcttaaacttcggaaccagatggcgttctcactgtttcatcggataagtaagagtgccacaaggcagaagacccaactcgcgtccttgccacaaatcattgaagaggagaagacttgcaaatactgttctcagatcggtaactgcgctctctatagccgagccgtggaacagcagatggactgcagttccgtgcctattgtaatgctgcctaagattgaagaggagacacagcatctgaagcagacccatctcgagtactttagcctgtggtgtctaatgttaacacttgaatcccagtctaaggacaacaagaagaatcaccagaacatctggctgatgccagctagcgaaatggaaaaaagtggcagctgcatcggaaacctcattagaatggagcatgtgaaaatcgtgtgcgacggccaatatttacataatttccagtgcaagcacggcgcgattcccgttactaatctgatggcaggggatagggtcattgtctcaggtgaggaaagatcattatttgccctctcacgcggctacgtgaaagaaataaacatgaccaccgtcacttgtcttctagaccgtaatctaagcgtgctgcccgaatctacactttttcggctagaccaggaggagaaaaattgcgacatcgacacgccattgggcaacctctctaagctgatggaaaacacttttgtttcaaagaagttacgggacttaataattgactttagggagccacagtttatctcatatctcagttcagttttaccccacgatgcgaaggacactgttgcatgtatcctgaagggtctgaataagcctcagcgacaggcaatgaagaaagtgctcctgagtaaagattatacgttgatagtggggatgccaggcacaggcaagactacaaccatttgtacactcgtgccagcacctgagcaggtagagaagggaggggtctccaacgtgacggaagctaagctcattgtgttcctgacgagcatcttcgttaaggccgggtgttctccaagtgatattggaatcatcgctccatacaggcaacaattaaagatcataaacgatcttctggctagaagtattggtatggttgaggtaaacacagtcgacaaataccaggggcgtgacaagtctattgttctggtgtctttcgtgcggtctaacaaagacggcaccgtgggcgagcttctgaaagactggagacggcttaatgtggccatcacacgagccaaacataagctgattctcctcggctgtgtgccttctttgaattgctacccacctttagaaaaactcctgaaccacctcaatagcgaaaagcttattatcgatctgccaagcagggagcatgaatctctgtgccacatcctcggcgactttcagcgagaatag

SEQ ID NO: 185677 - DNA, 3441 bp, synthetic construct
  misc_feature 1..3441: note = Description of Artificial Sequence: Synthetic coding sequence
  source 1..3441: mol_type = other DNA
atgaagaccccctgcatccccagccccaagcagggcagcaagggccgaggtcagtcgcccgctgcacaggttagaggccctacttggaacgcaccggccagggaagggcgtcccggggctgggcatcttggccacctgagggtgggagcctgtgcccggggcgcacaggcacgcgcattctttccgtttctttctttcctttgttacccgagatttcggtgcctcttttgcctgcaatttgcaatccccgcttcccgaatggagcagctgaatgaattagaacttctgatggagaaatcattctgggaagaggccgagctgccggccgagcttttccagaagaaagtagtcgcctctttcccccggaccgtgctgagcaccggtatggacaacaggtacctggtccttgccgtaaatactgttcagaataaggaaggcaactgtgaaaaacggcttgttatcaccgcatcgcaatctcttgagaataaggaactgtgtattctgaggaacgattggtgttctgtgcccgtcgagccaggcgacatcatccacctggagggcgattgcaccagcgatacttggattatagataaggatttcggatatctgatcctgtacccagatatgctcattagcggaacttcaatcgctagctccatccgctgcatgagacgcgctgttctgtccgagacatttcggtccagtgacccagcaacccggcagatgctcatcgggactgttcttcacgaggtatttcagaaagccatcaacaactcattcgcccccgagaaattacaggagctggccttccagactatccaagaaattaggcatttgaaggaaatgtacaggttgaacctctcgcaggacgagattaagcaagaggtcgaggactaccttcctagcttctgcaagtgggctggcgattttatgcacaagaatacttctaccgacttcccccagatgcagctgagccttccctcagacaacagtaaggataacagtacatgtaatatcgaggtcgtcaagcctatggatattgaggagtctatctggagccccagattcggtctgaaggggaagattgacgtaacagtgggagtgaagatccatcgcggatataagactaaatacaagatcatgcctttggaactcaagacaggaaaggagtctaattccatcgagcaccgcagtcaggtcgtactttacacacttctgagccaggaaagacgggctgaccctgaggccggcctcctgttgtatctgaagacgggacagatgtaccccgtgcccgctaaccatctggacaagcgggagctgctgaaattgaggaaccaaatggcgttctccttattccataggatttccaaaagcgctaccaggcagaaaactcaacttgcctctcttccacaaataatcgaggaggagaagacctgcaagtactgttcacagatagggaactgtgccctgtattctcgcgctgttgagcagcaaatggattgttccagtgttcccattgtgatgctcccaaaaattgaagaggaaactcaacatttgaagcagacacatctggagtacttctctctttggtgcctgatgctcacgctggaaagccagtctaaagataacaaaaaaaaccatcaaaatatttggttaatgcctgcatcagagatggaaaaatccgggtcctgtattgggaaccttatacgtatggaacacgtaaagatagtatgtgatggacagtacctgcacaattttcagtgcaaacatggagccatacctgtcaccaacttaatggccggcgacagggtcattgtgtccggcgaggaacgctccctattcgcactctcacgtgggtatgtaaaagaaatcaatatgactacagtcacatgcctgctcgataggaatctgagcgtcttgcctgagtcaacgctgttccgtctggaccaggaggagaaaaactgtgacattgataccccactgggaaatttgagtaaactgatggaaaatacatttgtctctaaaaagctgagagatctgatcatcgactttagagagccccagtttatctcttacctgtccagtgtattaccccacgatgcaaaggatacagtcgcttgtattcttaagggcttgaacaagccccagcgacaggctatgaaaaaggtgcttctgtctaaagactacactctgattgtaggcatgccaggcacaggaaagaccaccacaatttgcaccctggtgcgaatcctgtacgcatgcgggttttcagtgctcctcacttcctacacccacagcgccgtggacaacattcttttgaaactggctaagtttaaaattggtttcctaaggctgggccagattcagaaggtacaccctgccatacagcagttcaccgagcaagagatttgccggtctaagtcaataaagtcgctggctctgctggaggaactgtacaacagtcagctgatcgtcgcgaccacttgtatgggaatcaaccaccccattttctctcgcaaaattttcgatttttgcatcgtggacgaagcaagccaaatttcccagcctatctgcctaggacccctattttttagtcggagattcgttcttgttggagatcaccagcagttgcctcctctggtgctgaacagggaggccagagccttgggaatgtccgagagcctgtttaaacgactagaacagaacaagtcagccgtagtgcagctgaccgtacagtacagaatgaactcgaaaattatgtctctttctaacaaactcacctacgagggcaagctcgagtgtggttccgataaggtcgctaatgccgtgattaacctgcgccattttaaggatgtgaaacttgaacttgagttttacgcagactacagcgataatccatggctgatgggagtgttcgagccaaacaaccccgtttgtttcctcaacaccgataaggtgccagcccccgaacaggtggagaagggaggcgtcagcaatgtgaccgaagccaaactcatcgtcttcctgaccagcatattcgttaaagcaggatgttcccctagcgacattggcatcatcgccccgtatcggcagcagctcaagatcattaacgatttgttagctcgctcaatcgggatggtggaagtgaatacagtcgataagtaccaggggcgagacaagagcatcgtgcttgtttcttttgttcgaagcaataaggacggaacagtgggcgaattgctgaaagactggaggcggctgaacgtggccatcacccgcgctaagcataagcttattcttcttgggtgcgtgccctccctaaattgctatcctccgcttgaaaagctgctgaatcacctgaattctgagaagcttattatcgatctaccgagtcgtgaacacgagagcttatgccacatcttaggtgattttcagcgggagtag

SEQ ID NO: 185678 - DNA, 717 bp, synthetic construct
  misc_feature 1..717: note = Description of Artificial Sequence: Synthetic coding sequence
  source 1..717: mol_type = other DNA
atgctgtgcttcctgcggggcatggccttcgtgcccttcctgctggtgacctggtcatccgccgccttcatcatcagttacgttgtggccgtgctgagtggacacgtgaacccattcctcccctatatcagcgataccggcaccactccgcctgaaagtgggatatttggatttatgatcaatttcagcgcctttttgggcgccgctacgatgtatacacgctataagattgtgcagaaacagaaccagacatgttacttcagtactcccgtgtttaacctggtttctctcgttcttgggctggttgggtgctttggaatgggcattgtggcaaactttcaggagctggcagtgccagtcgtgcacgatgggggagccctgttggctttcgtgtgtggcgtggtctatacactacttcaaagtattatctcttataagagctgtccccagtggaatagcctgtccacatgtcacattagaatggtgatatctgcggtgtcgtgcgctgctgtgattcctatgattgtgtgtgcctccctgatttcaataaccaagctcgaatggaaccctcgagagaaagactacgtgtatcacgttgtgtctgctatttgcgaatggactgtggcttttgggttcatcttttactttttgaccttcattcaggactttcagtcagtcaccctgagaattagcacggaaattaatggggatatctag

SEQ ID NO: 185679 - DNA, 801 bp, synthetic construct
  misc_feature 1..801: note = Description of Artificial Sequence: Synthetic coding sequence
  source 1..801: mol_type = other DNA
atgtggtggttccagcagggcctgagcttcctgcccagcgccctggtgatttggacttctgctgcctttatctttagttacataactgcggtcacactccatcacatcgatcccgccctgccctatatttccgatactggcactgtggcgcctgagaaatgcctgttcggcgccatgctgaacattgccgcagtgctatgcatcgctacgatttacgtaaggtacaagcaagtgcacgcactttctccggaagaaaacgtgataataaaattgaacaaagccggccttgttctcgggatcctgagctgtctcggactgtcgatcgtagcgaatttccagaagacaacccttttcgctgcccatgtcagcggggcggtcctgacgtttggaatgggctcactgtatatgttcgtccagacgatcctgagttatcagatgcagcccaaaatccatgggaaacaggtgttttggattagacttttactggtgatttggtgcggggtgtcagcgctcagtatgctgacatgcagcagcgttttgcatagcgggaacttcggaaccgatctggagcagaagctccattggaacccagaggataaggggtatgtgttacacatgataaccacagccgctgaatggtcaatgtcattctccttcttcggcttcttcttgacctatattcgagatttccagaaaataagtctgcgggttgaagcaaatctgcacggattgactctgtatgatactgccccttgccctattaataacgagagaacgagactgctcagtcgagatatctag

SEQ ID NO: 185680 - DNA, 801 bp, synthetic construct
  misc_feature 1..801: note = Description of Artificial Sequence: Synthetic coding sequence
  source 1..801: mol_type = other DNA
atgtggtggttccagcagggcctgagcttcctgcccagcgccctggttatctggacatctgctgctttcatcttctcctacatcactgctgtcaccctgcaccacatcgatcctgccctgccgtatatatccgacactggaacggtcgcgcctgagaagtgcttattcggggccatgctcaacatcgcggctgtcctttgcatcgccaccatttatgtgaggtataagcaggtgcacgctcttagccccgaggagaacgttataatcaaactgaataaggctgggctggttctgggcattcttagctgtctgggcctgtctatagtggccaattttcagaagactactctatttgctgcacacgtctccggtgcagtcctcaccttcgggatgggttccctctatatgtttgtacagacaatcctttcttatcaaatgcaaccgaaaattcacgggaaacaggtcttttggatacgcctactcctggtaatatggtgcggcgtttctgccctgtccatgctgacgtgtagcagtgtgttacacagtggcaacttcggaactgatctggagcagaaattacactggaacccggaggacaaggggtacgtgctacacatgatcactacagccgcagaatggtccatgagtttttcattctttggcttctttctcacgtacattcgggactttcaaaaaatatcgttacgagttgaggctaatctgcacggattaacactctatgacactgccccttgcccaatcaataacgagagaactagacttctctctcgagatatttag

SEQ ID NO: 185681 - DNA, 699 bp, synthetic construct
  misc_feature 1..699: note = Description of Artificial Sequence: Synthetic coding sequence
  source 1..699: mol_type = other DNA
atgcccagcctgtgggaccggttcagcagcagcagcaccagcagcagcccctcttcactgcctcggacgccaactcccgaccgtccgccacggtcagcctggggcagcgccacgcgagaggaaggctttgataggtccacgagccttgagagctccgattgcgaatccctggatagctctaattccggtttcggcccagaggaggatactgcctacctggatggcgtatctctgcctgacttcgaactcttgagtgacccagaagacgagcacctgtgcgcaaaccttatgcagctcctgcaggagtccttagcccaagcccgactgggaagccgccgcccggcccgactgctcatgcccagccagcttgtttcccaggtcgggaaagaactactaaggctcgcatatagcgagccctgtggcctgagaggagctctgctggacgtttgtgtggagcaaggcaaatcatgccactcagtgggacaacttgccttggacccctccttagttccaacctttcagctgacgctcgtgttgaggctcgattcccgtctatggcccaagatacaaggactgttctcatcagccaacagcccgttcttgcccggctttagccagagcttaaccctgagcacaggctttagagtgattaaaaaaaaactgtactcatcagagcagctcctcatcgaggaatgttag

SEQ ID NO: 185682 - DNA, 582 bp, synthetic construct
  misc_feature 1..582: note = Description of Artificial Sequence: Synthetic coding sequence
  source 1..582: mol_type = other DNA
atggtggccaccggcagcctgagcagcaagaaccccgccagcatcagcgaactgctggattgcgggtatcatcctgaatccctgctgtctgactttgactactgggactacgtggtgccagagcccaacctcaatgaagtaattttcgaggaaagcacctgtcagaatctcgtcaagatgctcgaaaactgtctgagtaagtccaaacaaaccaagctggggtgctcaaaggtgttagtgccagagaaattaacacagagaattgcacaagacgtgctccggctctcttcaaccgagccttgcggcctgcgcgggtgcgtgatgcacgttaacctcgagatcgagaacgtgtgcaagaaactggatcggatcgtctgcgactcatctgttgtgcccacctttgagcttacgttggtgttcaagcaggagaactgcagttggacttcctttcgtgacttcttcttctcccgaggccggttcagctccggtttccgccgcactctcatactttcttctggctttcgactcgttaaaaagaaactttacagccttatcggcacaacagtgatcgaggggtcttag

SEQ ID NO: 185683 - DNA, 534 bp, synthetic construct
  misc_feature 1..534: note = Description of Artificial Sequence: Synthetic coding sequence
  source 1..534: mol_type = other DNA
atggtggccaccggcagcctgagcagcaagaaccccgccagcatcagtgagcttctggattgcggctatcacccggaatctctgctgtctgatttcgattactgggattatgtggtccctgaacctaaccttaatgaggtgatattcgaagaatccacgtgccagaacctcgtaaagatgctagaaaactgcttatcaaagtctaagcagacgaagctgggctgctcaaaggtcctcgtccccgagaagctgacacagagaattgctcaggacgtattacgcctgtcttcaacagaaccctgcggcctgagggggtgcgttatgcatgtcaacctggaaattgagaatgtatgtaagaaactggaccgcattgtttgtgattcaagtgtggttccgacattcgaattaaccctggtctttaaacaggagaactgttcctggacttctttccgggacttttttttctccagggggcgcttttcatctgggttccggcgcaccctgatcttgtcttcaggcttccgactcgtctag

SEQ ID NO: 185684 - DNA, 387 bp, synthetic construct
  misc_feature 1..387: note = Description of Artificial Sequence: Synthetic coding sequence
  source 1..387: mol_type = other DNA
atggtggccaccggcagcctgagcagcaagaaccccgccagcatctcagagctattggattgtggataccaccccgaatcattactctccgatttcgactattgggattacgtcgtgcctgagcccaaccttaatgaagtaatctttgaggaatcgacctgccagaacctcgtcaaaatgctagaaaactgcttatcaaagagcaaacagacaaaattgggatgcagtaaggtgctggtgcctgagaagctgactcagaggattgcccaggatgttctgagactgagctcgaccgaaccctgtgggctacgcggttgtgtgatgcacgtaaatctagagatcgagaatgtttgcaaaaaactggaccggatagtctgcgactcatag

SEQ ID NO: 185685 - DNA, 1239 bp, synthetic construct
  misc_feature 1..1239: note = Description of Artificial Sequence: Synthetic coding sequence
  source 1..1239: mol_type = other DNA
atggccaacgtggccgacaccaagctgtacgacatcctgggcgtgcctcctggtgcgtcagagaatgaacttaaaaaggcgtatagaaagctggctaaagaataccatccagataaaaatccaaatgccggagacaagtttaaagagatctctttcgcctacgaagtgctttcgaacccagaaaaaagggagctttatgatagatacggtgagcaagggttaagagaggggagcggaggcgggggagggatggacgatattttctctcacatcttcggcggcggcttatttggattcatggggaaccagtcacgcagcaggaatgggaggcgcagaggcgaggatatgatgcatcccctaaaagtctccctggaggatctgtataatggcaagactacaaagttacagttgtccaaaaatgttttgtgttccgcgtgcagtggccaggggggtaagtccggcgccgtgcagaagtgcagcgcatgcaggggaagaggcgtaaggataatgatccggcagctagcccccggcatggtccaacagatgcagagcgtctgctccgattgcaacggagagggcgaggtgattaatgagaaagacaggtgtaaaaagtgtgaggggaagaaagtaatcaaggaggtgaagatactcgaagttcacgtggacaaggggatgaaacatggtcagcggatcacttttactggcgaagcggaccaagcacccggagtagaaccaggcgatattgtgctgctgctccaggaaaaggaacacgaagtattccagcgggatggcaacgacttgcacatgacgtataaaatcgggcttgtagaagcactgtgtgggtttcaattcacattcaagcacctggacggcagacaaatcgtggtgaagtaccctccaggcaaagtgatcgagccaggctgcgtgagggtggttcgtggagagggtatgcctcaataccggaacccgttcgaaaagggcgatctttacatcaaattcgatgtacagtttcctgagaacaactggatcaatcctgataaactctccgaattagaagatcttcttccatctcgacctgaagtgcccaatattatcggggagacagaagaggttgaactccaggaattcgactctacccggggctccgggggtggccagcgccgagaagcctacaacgattcctctgacgaagaatcctcctcccaccacggccccggcgtccagtgcgctcaccagtag

SEQ ID NO: 185686 - DNA, 1443 bp, synthetic construct
  misc_feature 1..1443: note = Description of Artificial Sequence: Synthetic coding sequence
  source 1..1443: mol_type = other DNA
atggccgcccggtgcagcacccggtggctgctggtggtggtgggcaccccacgcctacccgcaatatcaggccggggcgcccgcccaccaagggagggtgtggttggcgcatggctgtcccggaagctatctgtgccagcgttcgcttcctcgctcacatcctgcggtcctcgcgctctcttgaccttgcgccccggagtgagtttgactggcactaagcataatcccttcatctgtacagctagctttcacacatcagcccccctggccaaggaagactactatcagatcctgggagtcccacgcaacgccagccagaaggagatcaagaaggcatactatcagctagccaagaagtatcatccagacacaaataaggacgaccctaaagccaaagaaaagtttagccaactcgcggaggcttatgaggtactttccgacgaagtcaagcggaagcaatacgacgcttatggctctgccggttttgaccccggtgcttcaggatcacagcattcctattggaaaggaggacctactgtggaccctgaggaacttttccggaaaattttcggcgagtttagctcctcaagcttcggcgactttcagactgtatttgaccaaccccaggagtactttatggaactgacgttcaaccaagccgccaaaggggtcaacaaggagtttaccgtgaacatcatggacacctgcgagaggtgcaatggaaaggggaacgagcctggaacaaaggttcagcactgccattactgtgggggatccggcatggagactatcaacactggaccgttcgtcatgaggtctacttgccggcgatgtggcggacgcggtagtattatcatcagcccttgcgtggtctgccgaggcgccggccaggctaagcaaaagaaaagggtaatgatccctgtgcccgccggagtggaagatggccaaacggtcaggatgcctgttggtaaacgggaaatttttatcaccttccgggtgcaaaagtctcccgtgttcaggcgcgatggggcggatatccattccgacctgttcataagtattgctcaggccctgctgggaggaacggcacgcgcgcagggcctgtacgaaactatcaatgtcacaattcccccaggaacccaaaccgatcaaaagattagaatgggagggaagggtattcccaggatcaacagctacggctacggggaccactatatccatattaagattagagtgcctaagcgcctaacctcgaggcaacagagcctgatccttagctatgctgaagacgaaaccgacgttgaggggacggtgaatggcgttaccctcacatccagcggcggttccacgatggacagcagcgcagggtctaaggctcggcgcgaggccggagaggatgaagagggctttttatcaaaactcaagaaaatgttcacctcctag

SEQ ID NO: 185687 - DNA, 1362 bp, synthetic construct
  misc_feature 1..1362: note = Description of Artificial Sequence: Synthetic coding sequence
  source 1..1362: mol_type = other DNA
atggccgcccggtgcagcacccggtggctgctggtggtggtgggcaccccccggttacccgctattagcggcagaggtgcacgacccccgcgggagggtgtcgttggcgcatggctcagtagaaagttgtctgtgccagcttttgccagctccctaacaagttgtgggcctagggcactgttgactttgaggccaggtgtgtctctgaccggcaccaaacacaatccttttatttgcacagcaagcttccacactagtgctcccttggcaaaggaggattactatcaaatactgggtgtgcctaggaatgcttcacagaaggagatcaagaaggcctactatcagctcgctaaaaaataccacccggacacgaacaaggatgatcctaaggccaaagagaagttctcccagcttgcagaggcctacgaggtgctcagcgacgaggtgaagcggaagcagtatgatgcctacggatctgccggcttcgatccgggagcttccggaagccagcactcctattggaaaggcggacctacagtcgatccagaagagctctttcggaagatctttggcgaattcagtagcagttctttcggtgattttcagactgtgtttgatcagccccaagaatacttcatggagcttacattcaaccaagcggctaagggcgtgaataaggaatttaccgtcaacattatggatacttgtgaaagatgtaatggaaaagggaatgagccagggacgaaagttcagcactgccattactgtggcggcagcggtatggagactataaacactggtccatttgttatgcgctccacttgcagaagatgcggaggtagggggagcatcattatatctccttgcgttgtgtgcaggggtgcaggtcaggccaagcagaagaagcgagtcatgattccagttccagccggagtggaggacgggcagaccgtgaggatgcccgtgggaaaacgagaaatttttatcacgtttagagtgcagaaatcccctgtattccggcgggacggtgctgacatccattcggacctttttatttcaattgcccaggccttactcggtggaactgctcgggcccagggactgtacgaaacaatcaacgtgaccatcccccccgggacccagactgatcagaagatccggatgggcgggaagggcattcccaggatcaactcctatggttatggcgaccactatatacatatcaagatcagagtgcccaagagactgacttcgcggcagcagtctctgattctgtcatacgctgaagatgagactgacgtcgaaggcacggtgaacggtgtgacactcacctctagtggcaagcggtcaacaggcaattag

SEQ ID NO: 185688 - DNA, 903 bp, synthetic construct
  misc_feature 1..903: note = Description of Artificial Sequence: Synthetic coding sequence
  source 1..903: mol_type = other DNA
atggccgagccccaggccgagcggccccggctgtgcgtgttccccgacttattgcggcctccctcagccgccgatatcgagacttggtgtcagccttaccgcaaaattttcggagagttttcatccagttcttttggcgatttccagaccgtatttgatcaaccacaggagtatttcatggagttaacctttaatcaagcggccaagggcgtcaataaagagtttacagttaacataatggatacttgcgaaagatgcaacggcaagggaaacgaacctgggacgaaggtgcagcactgtcactactgtggcgggtcaggtatggagaccattaatacgggccctttcgttatgaggagcacttgccgccgatgtggcggccgcggatcgattatcatttcaccatgcgtggtgtgccggggggcaggccaggcgaaacagaagaaacgcgtgatgatccccgtccctgccggcgttgaggacgggcagaccgtacgcatgcccgtcggcaagcgggagattttcatcaccttccgtgtgcagaagagccctgttttccgtcgcgacggagccgatatccattctgacctgtttataagtatcgcccaggccctgctggggggcacagcccgcgcacaaggactttatgagacaattaatgtcacgatccccccagggacgcagactgaccagaaaatcagaatggggggcaagggcataccccgaatcaattcctacggctacggcgatcattatatccacatcaagattcgggtgccaaagaggttgacatctaggcaacagtctttgatcctgtcatacgcagaagacgagacggatgtagaggggactgtcaacggcgtgacattgacaagcagtggcaaaagatccacaggcaattag

SEQ ID NO: 185689 - DNA, 1023 bp, synthetic construct
  misc_feature 1..1023: note = Description of Artificial Sequence: Synthetic coding sequence
  source 1..1023: mol_type = other DNA
atgggcaaggactactaccagaccctgggcctggcccggggcgccagcgatgaggaaatcaagagagcgtaccgtaggcaggcgctaagataccaccccgataaaaataaggaacccggagccgaggaaaagttcaaggagatagccgaagcctacgacgttctctcggaccctcggaaaagagaaatcttcgaccgttacggcgaagaaggcctcaaggggagcggcccctctggaggctcaggcgggggggcaaacggcacctcattttcctatacttttcacggggacccccacgccatgtttgccgagtttttcggtggcagaaaccccttcgacacgtttttcggtcagcgtaacggggaggaaggcatggatatcgatgacccattctctgggtttcccatgggtatgggtggtttcacgaatgtcaatttcggccggtctcggagcgcccaggagccagcccgcaagaagcaggacccaccagttacacacgacctgcgggtatccctggaggaaatctattcggggtgtacgaagaaaatgaaaatctcgcacaagcggcttaaccccgacggcaagtcaattaggaacgaagacaagatccttacgattgaagtgaagaagggctggaaggaaggaaccaagattacatttccaaaagagggggaccaaacctctaataacatccccgccgatatcgtatttgtgcttaaagacaaaccacacaatatttttaagcgagatggctccgatgtaatctacccggcgagaatatccctcagagaggccctgtgtggctgcaccgtcaacgtccccaccctggatggtagaacaatcccggtcgtattcaaggacgtgataagaccagggatgcggaggaaggtaccaggtgaaggtctgcctctccccaaaacacccgagaagaggggggacctgattatcgaatttgaagtgatctttcctgagcgcattccccagacttcacggactgtgcttgaacaggtgcttcccatttag

SEQ ID NO: 185690 - DNA, 723 bp, synthetic construct
  misc_feature 1..723: note = Description of Artificial Sequence: Synthetic coding sequence
  source 1..723: mol_type = other DNA
atgttcgccgagttcttcggcggccggaaccccttcgacaccttctttggtcagaggaatggcgaagaaggcatggatatagacgacccctttagcggattcccaatgggcatggggggctttactaatgtgaattttggccggagccgctcggcccaagaacctgctagaaagaaacaggatcctccagttacacacgacctgcgcgtgtcgctggaggaaatctattcagggtgcaccaagaagatgaagatatcgcataagcgcctgaacccagatggcaagtcgatccgcaacgaggacaagatcctgacgatcgaggtcaaaaagggttggaaagaggggaccaagattacattcccgaaggagggcgaccagacttccaataacatcccagccgacatcgtgtttgtcctgaaagataaacctcataatatattcaaacgcgatggctcggatgtcatctacccggcacggatttcactacgagaggctctgtgtggctgcactgtgaatgttccgactctggatggccgtacaattcccgttgttttcaaggacgtcatccgtccaggcatgagaaggaaagtgcctggcgaaggtctgccattgcccaagactcccgagaaacggggcgacctgataatcgaattcgaagtcatcttccccgaacggatcccacaaacatcacgcacggtgctcgaacaggtcctgccaatttag

SEQ ID NO: 185691 - DNA, 1230 bp, synthetic construct
  misc_feature 1..1230: note = Description of Artificial Sequence: Synthetic coding sequence
  source 1..1230: mol_type = other DNA
atgagcagcctgcgggcccggctgcccgccacccggcggcgggtggctcaaccctttgcccgtccagcttccccatcccttgtacccaggagcggctcagctatggaaagtaacaaagatgaggcagagcgttgcatctcaattgccctcaaggcaatccagagtaaccagcctgaccgggcactccggttcctcgagaaggcacaacggctgtaccctactcctagagttcgcgcgcttatcgaaagcctgaatcaaaagccgcaaacagccggagatcagccgcccccgacagatactactcatgccacgcaccggaaggccgggggaacggatgcccccagcgccaatggagaggccggcggcgagtccaccaaaggttacacggccgagcaagtggccgccgtgaaacgagtgaagcaatgcaaagactactacgagattttgggagtgagccggggggcatctgacgaggatctcaagaaagcttacagacggctggccctcaaattccatccggacaaaaaccatgcccccggagctacagaagcttttaaggcgattggcacagcgtacgccgttttgagcaatcctgagaagagaaagcagtacgaccagttcggcgacgacaaaagccaggcagcacgccatgggcacggccacggcgactttcatcgcggcttcgaggctgacatttctcccgaggatctgtttaacatgtttttcggtgggggatttccaagttctaacgtccacgtgtactctaacggtcggatgagatacacctaccagcagcgtcaggatcggagagataaccagggcgacgggggcctgggggtgtttgtgcagctgatgcccatcctaatcctcatactggtaagcgctttatctcagctgatggtgtcctccccaccctatagcctgagccctaggccaagtgtggggcatattcaccgtcgggtcactgatcacttgggagtcgtgtattacgtcggcgatacattctccgaggaatacactggctcctccctgaagaccgtggaacgaaacgtcgaggatgactacattgctaacctgaggaacaactgctggaaggagaagcagcagaaggagggccttctgtatcgcgcgcgctactttggggacacagacatgtatcatcgggcgcaaaagatgggtaccccgtcctgctctcgcttaagtgaggtccaggcatccttgcacggttag

SEQ ID NO: 185692 - DNA, 1230 bp, synthetic construct
  misc_feature 1..1230: note = Description of Artificial Sequence: Synthetic coding sequence
  source 1..1230: mol_type = other DNA
atgagcagcctgcgggcccggctgcccgccacccggcggcgggtggcgcagccattcgcccgtcctgcgtctccctctctggtgcccagaagcggaagcgctatggagagtaacaaggatgaggccgagcgttgtattagcatcgccttgaaagctatacagtctaaccaacccgacagagcattacggtttttggaaaaggcacagcgactgtaccccacgccccgggtgagggccctgattgagtccctcaaccagaagcctcagacggctggtgaccagccgccacctacagacacaacccatgccacacacaggaaggccggagggactgacgccccgtcagctaacggagaggccggaggtgaatctaccaagggttacaccgctgagcaggttgccgctgtgaagcgcgttaaacagtgtaaagactactatgaaatcttaggtgtcagccggggcgcctccgatgaagacctgaaaaaggcgtatagacggctagccttaaaatttcacccggataaaaatcacgcacctggtgccacagaggctttcaaggcaatcggaacggcatacgccgtgttgagcaatccggagaagcgcaagcagtacgatcagtttggagatgataaatctcaggccgctaggcacggacacggccacggcgacttccaccggggctttgaggcagatatctcacctgaagacctctttaatatgtttttcggtggagggtttccttcctctaacgttcacgtttactcaaacggtcggatgagatacacctaccaacagaggcaggatagacgggataaccaaggcgacggcggtttgggcgtttttgtccagcttatgcctattcttatcttgatccttgtgtctgctctgtcccagcttatggtgtcgtctcccccctactctctatcccctagaccctcggtgggacatatccacaggagagtaacagatcatctgggtgtggtttattacgttggcgacacgttcagtgaggagtatacagggtcttcacttaagactgtggaaagaaacgtggaggacgattacatcgcaaacttgagaaacaattgctggaaggaaaagcagcagaaagagggcctactgtatcgggccaggtattttggcgataccgacatgtatcacagagcccagaagatgggaactccatcatgcagccgactgtccgaggtgcaggcatcacttcacggatag

SEQ ID NO: 185693 - DNA, 1128 bp, synthetic construct
  misc_feature 1..1128: note = Description of Artificial Sequence: Synthetic coding sequence
  source 1..1128: mol_type = other DNA
atggagagcaacaaggacgaggccgagcggtgcatcagcatcgccctcaaggctattcagtctaatcaaccagatcgggctctgaggtttttggaaaaggcccagaggctctaccctacccctagggtgcgcgcattaatagagtctctcaatcaaaagcctcagaccgctggagatcagccgcctccgaccgatacgactcatgcaacgcatagaaaagccggcggcacggatgccccttctgccaatggtgaggccggcggcgaaagcaccaaaggatacactgcagaacaggtggccgccgtgaagagagtcaaacagtgcaaggattactatgagatactgggtgtgagccgtggtgcatccgacgaggacctcaaaaaagcttatcgccggctggctctgaaattccaccctgataaaaaccatgccccaggggcgacagaagccttcaaagccatagggaccgcctacgccgtccttagtaacccagaaaaaagaaagcagtacgatcagttcggagacgacaagtctcaggccgcccgccacggtcacggccacggggactttcacaggggttttgaagctgatatttcaccagaagacctctttaatatgttctttggaggcggcttcccctcctcaaatgtccatgtgtacagcaacggaagaatgcgttatacctatcagcagagacaggatcggcgtgacaatcagggggacggcgggctgggcgtctttgtacagctgatgcctattctgatcttgattctggtgtcagccctgtcacagctgatggtgagcagcccgccctacagcctctcgccgcggcccagcgtcgggcacattcatcgacgcgttacggaccacctaggcgtcgtgtattatgtcggggacacctttagcgaagaatataccggatcaagcttgaagactgtggagcgcaacgtggaggatgattacattgccaacctgaggaataattgctggaaagagaagcagcagaaggaaggattattgtaccgggcccggtactttggggatacagacatgtaccatagggctcaaaagatggggacaccctcttgcagtagactgtccgaagtccaggcttcacttcacggatag

SEQ ID NO: 185694 - DNA, 975 bp, synthetic construct
  misc_feature 1..975: note = Description of Artificial Sequence: Synthetic coding sequence
  source 1..975: mol_type = other DNA
atggccagctactacgagatcctggacgtgccccggagcgccagcgcagacgatattaaaaaagcatatcggcggaaggcccttcagtggcaccccgataaaaaccctgacaacaaggaattcgccgaaaagaagtttaaggaggtggccgaagcttatgaggtgctctctgataagcacaaacgggaaatctatgaccgctatggccgtgaaggcctgactgggactggaacagggcctagcagagcagaggcagggtccggcggacctggattcaccttcaccttccgaagcccagaggaggtgttcagggaattttttggaagcggagatccttttgcagagctctttgatgatctgggccccttttccgagctgcaaaataggggctctcgccattcagggccctttttcaccttctcttccagctttcctgggcactctgattttagctccagttcattctccttctcaccgggcgccggagccttcaggtcagtctccacttcaactactttcgtacagggcagaagaatcacaactcggaggatcatggaaaacggccaggagcgcgtggaagtggaggaagatggccagcttaagtcagttactataaatggagtgccagatgatctggccttgggtctagagttgtccaggcgcgaacagcagccttcagtgacgtctagatcaggagggacacaggtccagcagacacctgcctcttgcccgctggatagcgatctgtctgaagacgaggatctccagctagccatggcgtactctttgtcagagatggaggccgcaggcaagaaacccgcaggcgggagagaggcccaacacagacggcaggggcgacctaaagcccagcaccaggaccctggactggggggcactcaggagggcgctcgaggggaggccacaaaacgatcaccatcgccggaggagaaagcctcgagatgcctgatcctatag

SEQ ID NO: 185695 - DNA, 834 bp, synthetic construct
  misc_feature 1..834: note = Description of Artificial Sequence: Synthetic coding sequence
  source 1..834: mol_type = other DNA
atggccagctactacgagatcctggacgtgccccggagcgccagcgctgacgacatcaagaaggcttaccggcggaaggcactgcagtggcatcccgataaaaatccggataataaagagttcgccgagaaaaaattcaaggaggttgccgaagcctacgaggtgctgtcagataagcataagagggagatttatgaccggtatgggcgcgagggtctgacagggaccggaactgggccttcccgggctgaagccgggtcaggaggccccggcttcactttcacattccgctcccctgaagaggtgttcagggaatttttcggttcaggggatccgtttgccgagttgttcgatgatctgggacccttttctgaactccagaaccgaggaagccgccactccgggcccttctttacttttagcagctcttttcctggacatagcgactttagcagtagtagcttctctttctctcccggggccggcgcatttcgtagcgttagcacttcaacgacctttgtgcagggccggaggatcacaacccgccggatcatggagaacggccaggagagggtcgaggtcgaagaggatgggcaattgaagtctgtcacaatcaacggggtgcctgatgacttagccctggggctggagctttccagacgggagcagcagccctctgtcactagccgctccggtggcacgcaggtgcagcagacgccagcctcctgcccgctggatagcgacctttccgaggacgaagatctgcagctcgccatggcctacagtttgtccgaaatggaggccgccggaaagaaaccagcggacgttttctag

SEQ ID NO: 185696 - DNA, 687 bp, synthetic construct
  misc_feature 1..687: note = Description of Artificial Sequence: Synthetic coding sequence
  source 1..687: mol_type = other DNA
atggccagctactacgagatcctggacgtgccccggagcgccagcgccgacgatatcaaaaaagcgtaccggagaaaagcgctacaatggcaccccgacaaaaacccagacaataaggagttcgctgaaaagaagttcaaggaagtcgctgaagcatacgaagttctttctgataagcacaaacgagagatttacgaccggtacggccgagaggggctgactggcacgggcactggaccctccagggcagaagcagggagtggaggacctggtttcacattcacatttagatcaccggaggaggttttccgcgagttttttggatccggagacccttttgccgaattattcgacgacctgggacccttctctgagctgcagaatagaggcagtcgtcactccggacctttcttcactttctcaagtagcttccccgggcacagcgacttttcaagtagttccttttcattctcgccgggagcgggcgcattccgtagcgtctctacctccactacgtttgttcagggccggagaattactacccgccgcatcatggagaacggacaggaacgggtcgaggtcgaggaagacggccagcttaaatccgtcaccattaatggcgtgcctgacgatctggcgctgggcttagaactgagccgacgagaacaacagccatcagtaacctag

SEQ ID NO: 185697 - DNA, 447 bp, synthetic construct
  misc_feature 1..447: note = Description of Artificial Sequence: Synthetic coding sequence
  source 1..447: mol_type = other DNA
atggccagctactacgagatcctggacgtgccccggagcgccagcgccgacgacattaaaaaagcctaccgccgaaaggcactgcaatggcaccccgataaaaatccagataataaagaattcgctgagaagaagttcaaggaggtggctgaagcctacgaggtcctgagcgacaaacataaacgggagatctacgacaggtacggaagagagggactcacaggaactgggacaggccctagtcgtgccgaagccggttcaggcggtcccggctttaccttcacgttccggtcccctgaagaggttttcagagagtttttcgggtctggggatccattcgccgagttgttcgatgatttgggaccattttctgaactgcaaaaccggggatcgcgccactctggtcccttttttaccttcagctcatcatttcccggccactcttag

SEQ ID NO: 185698 - DNA, 369 bp, synthetic construct
  misc_feature 1..369: note = Description of Artificial Sequence: Synthetic coding sequence
  source 1..369: mol_type = other DNA
atggccagctactacgagatcctggacgtgccccggagcgccagcgctgatgacatcaaaaaggcctatcggcgtaaagcgttgcagtggcaccccgataaaaaccccgacaataaagagtttgccgagaagaaatttaaggaagtggccgaagcgtacgaggttctgagcgacaagcacaaaagagagatatatgaccggtacgggagggaggggttgaccggcacggggacaggcccgtcccgtgccgaagcgggtagcggtgggcccggcttcacattcacctttcgatcaccagaagaggtgtttcgggaattttttgggtccggagatcccttcgccgaattattcgacgacctaggcccttag

SEQ ID NO: 185699 - DNA, 981 bp, synthetic construct
  misc_feature 1..981: note = Description of Artificial Sequence: Synthetic coding sequence
  source 1..981: mol_type = other DNA
atggtggactactacgaggtgctgggcgtgcagcggcacgccagccccgaggacatcaagaaggcatataggaagctagctcttaaatggcatcctgacaagaacccagagaacaaagaggaggccgagagaaagtttaagcaggttgccgaggcctatgaggttctgtccgatgctaagaagcgcgatatttacgacaaatatgggaaggaggggctaaatggcggcggtgggggcggctcccactttgatagtccgttcgagtttggttttacattccgtaatccggacgacgtttttcgcgagttttttggagggcgcgatccttttagcttcgacttctttgaggatccctttgaagactttttcgggaacaggcgcggacccagaggatcccgcagcagggggacgggaagcttcttttcggcgttctccggattcccttcttttggctctggcttttcctcctttgacacaggttttaccagcttcggctccctagggcacggaggtttaacatccttttctagcacatcgttcgggggctccggcatgggaaatttcaagtccatcagtacctccaccaagatggtcaatggtcggaaaatcactacgaagcgcattgtggagaacggccaggagcgtgttgaggtggaagaagatggccagctcaagtctttaacaataaatggcgtggctgatgacgacgctctggccgaagagcgaatgcggagaggccagaacgccttaccagctcagccggccggcctgcgacctcccaagccgccaagacccgcttcactgctgcgccatgctccccactgcctgtcggaagaggagggcgagcaagatagaccacgagccccaggcccgtgggatcctctggcatctgccgctggcctgaaagagggaggaaaaaggaaaaagcaaaagcagagagaggagagtaaaaaaaaaaagtccacaaaaggtaatcactag

SEQ ID NO: 185700 - DNA, 378 bp, synthetic construct
  misc_feature 1..378: note = Description of Artificial Sequence: Synthetic coding sequence
  source 1..378: mol_type = other DNA
atggtggactactacgaggtgctgggcgtgcagcggcacgccagcccagaggacattaaaaaggcctatagaaaactcgctcttaagtggcatcccgataagaaccctgagaacaaggaagaagcagagaggaagttcaagcaggtggcggaagcttacgaagtgctatctgacgccaaaaaacgtgacatctacgataagtacgggaaggagggacttaacgggggcggcgggggtggcagccacttcgatagccctttcgaatttggttttaccttcaggaatcccgacgatgtgtttagggagttctttggaggtcgggacccgttcagctttgacttttttgaggatccatttgaagacttttttggcaattag

SEQ ID NO: 185701 - DNA, 687 bp, synthetic construct
  misc_feature 1..687: note = Description of Artificial Sequence: Synthetic coding sequence
  source 1..687: mol_type = other DNA
atggtggactactacgaggtgctgggcgtgcagcggcacgccagcccggaagatattaagaaggcataccgcaagctggcactcaagtggcaccctgataaaaaccctgagaataaagaagaagcagaacggaaattcaagcaggtggctgaagcatatgaagttctctctgacgccaagaagagagatatttacgataagtacggcaaagagggcctgaatgggggcggcggcggggggtctcacttcgactctccgttcgaatttggcttcacctttagaaacccagatgacgtgttcagggagtttttcggaggacgcgatcctttcagttttgacttctttgaggaccccttcgaggacttctttggtaaccgcagaggccctcgcggctcaagaagcaggggtaccggcagttttttctctgcttttagtggatttccatccttcggtagcgggttcagtagtttcgatactggcttcacgagctttggatctctagggcatggtggactgacaagcttctcctcaacttcctttgggggatccggtatggggaactttaagagtattagtacctccacaaagatggttaacggccggaaaatcaccaccaagcgcatcgtcgaaaacggtcaagagagggttgaagtggaggaagacggccagctgaagagcttaacctag

SEQ ID NO: 185702 - DNA, 648 bp, synthetic construct
  misc_feature 1..648: note = Description of Artificial Sequence: Synthetic coding sequence
  source 1..648: mol_type = other DNA
atggtggactactacgaggtgctgggcgtgcagcggcacgccagcccagaagatatcaaaaaggcataccggaagctggccctgaaatggcaccctgacaaaaatcctgagaataaggaggaggctgagagaaagttcaaacaggtggctgaggcatacgaagtgctgtccgacgccaagaagcgtgacatttacgacaagtatgggaaagaggggttgaacggcggcggaggaggaggatcccacttcgacagtccgtttgagtttggcttcacttttcgaaaccccgacgatgtgtttcgggagttttttggaggacgcgacccctttagtttcgacttcttcgaggacccttttgaagacttcttcgggaacagacggggtcctagaggcagccgctcccgcggtacaggaagtttctttagcgccttttcaggattccccagttttggaagcggcttcagcagctttgacaccggatttacctcctttggctcactaggccacggcggccttacctccttctcatcgacctctttcgggggaagcggcatgggaaattttaagagcatctctacctccactaagtggctaatggcagaaaagagccttcagcgcgaactgtctcgcacagtgaaaaaggaatag

SEQ ID NO: 185703 - DNA, 726 bp, synthetic construct
  misc_feature 1..726: note = Description of Artificial Sequence: Synthetic coding sequence
  source 1..726: mol_type = other DNA
atggtggactactacgaggtgctgggcgtgcagcggcacgccagcccagaggacatcaagaaggcatatcggaaacttgcgctcaaatggcatcccgacaagaaccctgaaaacaaggaggaggctgagcgaaaatttaagcaggtggcagaggcatacgaggtcctgtccgatgctaaaaaacgagacatctacgataaatatggcaaggagggccttaacggagggggggggggcggaagccattttgattcaccctttgagttcggcttcacctttcgaaacccggacgatgtcttcagggagtttttcggcggtagagaccccttctcattcgactttttcgaagatccgtttgaagacttctttggtaataggagaggccccaggggaagccggtcacgcggcactggctcgttcttttctgccttctctggtttcccttcattcggatccgggttctcctctttcgatacgggattcacatcttttggctcgctcggccatggaggcctgacaagttttagctctaccagcttcggagggtccggcatggggaactttaagtcaattagcacttccaccaaaatggtgaacggccggaaaattaccactaagagaattgtggagaacggccaagaaagggtggaggttgaagaggatggccagcttaaaagtcttacaataaacggaaaagaacaactgttgagactagacaataaatag

SEQ ID NO: 185704 - DNA, 201 bp, synthetic construct
  misc_feature 1..201: note = Description of Artificial Sequence: Synthetic coding sequence
  source 1..201: mol_type = other DNA
atggtggactactacgaggtgctgggcgtgcagcggcacgccagccccgaggacatcaagaaggcctaccggaagcttgccctgaagtggcacccagacaaaaaccccgagaataaggaagaagcagaaagaaaatttaaacaagttgcagaagcctacgaggtgttgtcagacgcgaagaagcgcgacatttacgattag

SEQ ID NO: 185705 - DNA, 138 bp, synthetic construct
  misc_feature 1..138: note = Description of Artificial Sequence: Synthetic coding sequence
  source 1..138: mol_type = other DNA
atggtggactactacgaggtgctgggcgtgcagcggcacgccagccccgaggacataaaaaaggcctacaggaagctcgccttgaaatggcacccggataagaatcccgagaataaagaagaggccgaacggaagtag

SEQ ID NO: 185706 - DNA, 441 bp, synthetic construct
  misc_feature 1..441: note = Description of Artificial Sequence: Synthetic coding sequence
  source 1..441: mol_type = other DNA
atggtggactactacgaggtgctgggcgtgcagcggcacgccagccccgaagacatcaagaaggcttaccggaagctggccctgaaatggcatccagacaaaaaccccgagaacaaggaagaagccgaacgtaagttcaagcaggtggccgaggcctatgaggtgcttagcgatgccaaaaagcgtgacatatatgacaaatatggaaaagaaggactgaatggcgggggtggcggagggagtcattttgactctcccttcgaattcggattcacctttcgcaacccggatgatgtatttcgggagttctttggaggaagagatccattcagctttgatttcttcgaagatccctttgaagatttttttggcaatagaagaggtcctcgcggcagtaggagcagggggaccgggagctttttctctgctttttcaggctag

SEQ ID NO: 185707 - DNA, 636 bp, synthetic construct
  misc_feature 1..636: note = Description of Artificial Sequence: Synthetic coding sequence
  source 1..636: mol_type = other DNA
atggtggactactacgaggtgctgggcgtgcagcggcacgccagccctgaggacatcaagaaagcctataggaaactagctctgaaatggcatcccgataaaaacccagagaataaggaggaggcagaaagaaagtttaagcaggtcgctgaggcttatgaggtgctgtctgatgctaagaagagagatatctatgacaaatacgggaaggagggcctgaatggagggggtgggggcggctctcatttcgactctccctttgagttcggcttcacgttcaggaaccccgatgatgtattccgtgagttctttgggggccgggacccattctccttcgattttttcggggtcgcggacgatgatgccctcgccgaggaacgaatgagacgggggcagaatgcgcttccggcacagcctgctggactgagacctcctaagccgcctaggcctgccagtttgcttaggcacgcaccccattgcctttcagaggaagagggtgagcaagatcggccgagggcccccggcccctgggacccactcgccagcgctgctggcctgaaagagggtgggaagcgcaaaaagcagaaacagagggaggagtcaaagaaaaagaaatccacaaagggaaaccactag

SEQ ID NO: 185708 - DNA, 834 bp, synthetic construct
  misc_feature 1..834: note = Description of Artificial Sequence: Synthetic coding sequence
  source 1..834: mol_type = other DNA
atgccccacccccggatcctgaagcggcccaagaagcgggacatctatgacaagtatgggaaagaagggctgaatggggggggaggcggaggaagtcactttgactccccgttcgagtttgggttcaccttcaggaatcccgatgacgtttttcgtgagtttttcggcggcagggaccccttctccttcgatttctttgaggacccgttcgaggacttcttcggcaataggcggggcccgcgcgggtctagaagcagggggacagggtcatttttttcagcttttagtgggttccccagcttcggcagtgggttctcctcatttgatactggtttcaccagcttcgggtctctgggacacggcggcctcacttcatttagcagtacgtcctttggaggaagtggcatgggaaactttaagagtatcagcactagcaccaagatggtcaacgggaggaagattacaaccaagagaatcgtggaaaatggccaggagcgcgttgaggtcgaggaggacgggcagctcaaatctttgaccataaatggtgtggctgatgacgacgcactggccgaagaaaggatgagacgcggtcagaacgccctgcccgctcagcccgccgggctgagaccaccgaaaccacctcgcccggcatcactcctccgacatgcgccccactgcctatctgaggaagagggagaacaggaccgtcccagagccccggggccctgggacccactggcgtcggcagcgggactgaaagagggaggtaagagaaagaagcagaaacaacgggaagaatccaagaagaaaaaatccaccaagggaaaccactag

SEQ ID NO: 185709 - DNA, 297 bp, synthetic construct
  misc_feature 1..297: note = Description of Artificial Sequence: Synthetic coding sequence
  source 1..297: mol_type = other DNA
atggtggactactacgaggtgctgggcgtgcagcggcacgccagcccagaggacataaaaaaagcatacaggaaactggctctgaagtggcatcccgataaaaatcccgaaaataaggaagaggccgagcgcaaatttaagcaggtagccgaggcctacgaggtcctgagcgacgctaagaagagggacatctacgataagtatggcaaggaggggcttaacggcggcggcggaggaggaagtcacttcgactccccctttgagttcggattcacctttcgaaatcccgatgattag

SEQ ID NO: 185710 - DNA, 672 bp, synthetic construct
  misc_feature 1..672: note = Description of Artificial Sequence: Synthetic coding sequence
  source 1..672: mol_type = other DNA
atggccaccccccagagcatcttcatcttcgccatctgcatcctgatgattacagagcttattctggcatccaagagttactacgatattcttggagtacccaagtcagcatctgagcgccagatcaagaaggccttccataaactcgcaatgaagtatcatccggacaagaataagtcacctgacgctgaagcaaagtttcgcgaaatcgccgaggcctacgagacgctctcggatgccaacaggaggaaggagtacgacactctggggcactctgccttcacctctggcaaaggccagcgcgggagcggatcctcatttgaacagagctttaactttaatttcgatgacctgttcaaagacttcggattttttgggcaaaatcagaataccggatccaagaagcgattcgagaatcacttccagaccaggcaggacggtggcagctcccggcagcggcaccacttccaggagttctcattcgggggtggtctgtttgatgacatgttcgaagacatggagaagatgttctcatttagcggttttgatagcaccaatcagcatacagttcaaacagaaaaccggttccacggatcttcaaagcactgccgaaccgtcacccagcgcaggggcaatatggtgactacatatacagattgctccggtcaatag

SEQ ID NO: 185711 - DNA, 2382 bp, synthetic construct
  misc_feature 1..2382: note = Description of Artificial Sequence: Synthetic coding sequence
  source 1..2382: mol_type = other DNA
atgggcgtgtggctgaacaaggacgactacatccgggacctgaagaggatcattctttgctttttgatcgtttacatggccatactggtgggaacggaccaggatttctactcactgctcggcgtgtccaagacagccagctcccgggaaattcggcaagcatttaaaaagctcgccctcaaactacatcctgataaaaatcccaataacccaaatgcccacggagacttcctgaagatcaacagggcatatgaagtgcttaaggacgaggacctgcgcaagaaatacgataagtacggcgagaaagggcttgaggataatcaagggggacaatacgaatcctggaattattaccgctacgacttcggaatctacgatgacgacccggagatcatcacattggaacgtcgtgaattcgacgctgcagttaactctggcgaactctggtttgtaaacttttactctccaggatgttcacactgtcacgacctggcccccacctggcgagacttcgcaaaggaggtggacggcctgctgcgcatcggagctgtgaattgtggggacgaccgcatgctctgccggatgaaaggagtgaactcctatccttctctctttatctttcgaagcggcatggccccggtgaagtaccatggtgaccggagtaaggaatcccttgtgagctttgccatgcagcacgtgaggagcaccgtcacagaactgtggacaggaaatttcgtgaacagtattcaaaccgcattcgccgctggcataggatggttaataacgttttgtagtaaaggaggggattgtttaaccagtcagacccgtttgagattgtcaggcatgctggacggcctcgtgaatgttggatggatggattgcgctacacaggacaatctgtgtaaaagcctggacataactacgtcgacgaccgcttatttcccccctggcgcaaccttaaacaataaagagaagaactccatcctgtttcttaattctctcgatgccaaagaaatctacctcgaagtcatccacaacctgccggattttgagttgctgagcgcgaacaccttagaagacaggctggctcatcatcgttggctactgttttttcactttgggaaaaacgagaatagtaatgatcccgaactgaagaagctgaaaactctgcttaagaatgatcatatccaggtcgggagattcgattgttcctccgctcccgacatctgctcaaacttatatgtgtttcagccttcactagcagtctttaaaggccagggaaccaaggaatacgaaatccatcacgggaaaaagattctatacgacattcttgcattcgccaaggaatccgtcaactcccatgtcaccacgctcggaccgcagaatttccctgctaatgacaaagaaccttggttggtcgatttctttgccccatggtgccccccttgcagggctctgttgccggaacttcggcgggcctccaatttgctatatggtcaattgaagttcggtaccttagattgcaccgtgcatgaggggttgtgcaatatgtataacatccaggcctaccctacaactgtagtgtttaatcaaagcaacattcatgaatacgaaggtcaccatagtgcagagcagattcttgagttcatcgaggatctgatgaaccccagcgttgtatcgctcacacctacaacatttaacgagttagtgacccagcgtaagcataacgaggtctggatggtggacttttactccccatggtgtcacccctgtcaggtccttatgcccgagtggaaacggatggcgcgaactttgaccggactgatcaatgtagggtcaatcgattgccagcagtaccatagtttttgtgcccaggaaaacgttcagcgttatccggaaatccggtttttccccccgaaatctaacaaggcgtatcattaccattcttataacggttggaatcgcgacgcctattctctgcggatctgggggctgggatttctgccccaggtgtcaaccgatctgacgcctcagacgttctccgagaaagtgctccagggcaaaaaccattgggtcatcgatttctatgcaccttggtgcggtccttgtcagaactttgcacccgagtttgagctgctggctcgcatgatcaaggggaaggtgaaagctggcaaggtggactgtcaggcatacgctcagacatgtcaaaaggccggcatcagagcatacccgaccgtgaaattttacttctatgagcgtgcaaaaaggaactttcaagaggagcaaatcaatactagggacgcaaaggctattgcagccctgatttccgaaaaactggagaccctccggaatcaaggcaagaggaataaggatgagttgtag

SEQ ID NO: 185712 - DNA, 2244 bp, synthetic construct
  misc_feature 1..2244: note = Description of Artificial Sequence: Synthetic coding sequence
  source 1..2244: mol_type = other DNA
atgggcgtgtggctgaacaaggacgactacatccgggacctgaagcgtattattctctgctttttgatcgtttacatggccatcctcgtgggcacagatcaggatttctattcgctgctgggcgtgtccaaaaccgcatccagtagggaaattcgtcaagccttcaagaaactcgctttgaaactccaccccgacaaaaaccctaataaccctaacgcacacggagacttcctgaagatcaatcgggcatacgaagttctcaaagacgaagacctgcggaagaaatatgacaaatatggagagaagggcttggaggacaaccaaggcggtcagtacgagagttggaactattatcggtacgacttcgggatttatgatgatgaccccgaaatcataaccttagaacgacgagagttcgacgcggcagtgaattcaggcgagctgtggtttgtcaatttctattcaccgggttgctcccactgtcacgatctggcccccacatggcgggacttcgccaaggaggtcgacggcctcctgcggattggggcggtcaattgcggcgacgatcgtatgctctgcaggatgaagggcgtgaattcctatccttctctgttcatcttcaggagtggcatggcaccagtgaagtaccacggtgatcgcagtaaagagagcctggtgagtttcgcgatgcaacacgttcggtctacagtcaccgaattatggactggaaactttgtaaattcgatccaaacagccttcgccgctgggataggctggttgatcaccttttgctccaaagggggtgattgtctaacttcgcaaacaaggctccgtctctctgggatgcttttcctcaattcactggacgcgaaggagatctacctggaggttattcataatctgccggatttcgagctgctttcagctaatacattggaggatcgattggcacaccacagatggctgctctttttccatttcgggaaaaacgaaaattccaatgacccagagctgaagaagctgaagactcttcttaagaatgatcacatccaggttgggcggtttgattgttcgtcggcccctgatatctgctcgaacctatacgtatttcagcctagcctggctgtgttcaagggacaagggaccaaggaatatgaaatccatcacggaaaaaaaatcctgtatgacatcctcgcatttgccaaagagtccgtgaactcccacgtcactactttggggccccagaactttcccgctaacgacaaggaaccctggctggtggatttctttgccccttggtgcccaccttgccgagctctgctccccgaactgaggcgcgcatctaatctcctgtatggacaacttaagttcgggacactcgactgcaccgttcacgaaggtctctgcaacatgtacaacattcaagcataccctactaccgtggtgttcaatcagtctaatatccatgaatacgaaggtcaccactcagcagagcaaattttggagtttatagaggacctgatgaaccccagcgtcgtatccctgactccaacaaccttcaatgagcttgtgactcagcgaaagcataatgaggtgtggatggtagacttctacagcccctggtgtcacccgtgccaagtcctgatgccagagtggaagaggatggccagaacgctaaccggcttgatcaatgtcggtagcatcgactgccagcaataccactccttctgcgcccaagaaaatgtgcaacgctacccagaaataaggtttttcccaccaaagtctaacaaggcgtaccactaccacagctacaacggatggaaccgcgacgcttacagtctcagaatttggggcctcggtttcctgccacaggtttccaccgacctgacgcctcaaactttctccgaaaaggtcctgcagggaaaaaatcactgggtcattgatttttacgcaccttggtgtgggccatgtcagaattttgcacccgaattcgagctcctggcccgaatgatcaaaggcaaagtgaaggcaggaaaggtggattgtcaggcatacgctcaaacatgtcaaaaggccggaattagggcataccctacagtaaaattttatttttatgagcgcgcaaaacggaactttcaggaggagcaaattaacaccagggacgctaaagcaattgcagcattgatttccgaaaagctggaaaccctaagaaatcaggggaagaggaataaagatcacctctag

SEQ ID NO: 185713 - DNA, 534 bp, synthetic construct
  misc_feature 1..534: note = Description of Artificial Sequence: Synthetic coding sequence
  source 1..534: mol_type = other DNA
atgggcgtgtggctgaacaaggacgactacatccgggacctgaagcgtattatcctgtgctttctcatcgtgtacatggccatacttgttgggaccgatcaagacttttacagcctactcggggtgagcaagacagcatcaagcagagaaatcaggcaggctttcaagaaacttgccctcaagttgcaccctgacaagaaccctaataaccccaacgcccatggtgactttctcaaaattaacagagcctacgaagtgcttaaagatgaggacctccgtaaaaagtacgataagtatggagaaaaggggctggaagacaatcagggcggacaatacgagtcttggaactattaccggtacgatttcggaatttatgacgacgaccccgagataatcactctggagaggcgtgagtttgatgctgcagtgaattctggggaactttggtttgtgaatttttattctcccggctgctcccactgtcacgacctcgcccctacatggagggactttgccaaagaaagtctccggtag

SEQ ID NO: 185714 - DNA, 999 bp, synthetic construct
  misc_feature 1..999: note = Description of Artificial Sequence: Synthetic coding sequence
  source 1..999: mol_type = other DNA
atgggcgtgtggctgaacaaggacgactacatccgggacctgaagcgcatcatcctgtgcttcctgatcgtttatatggcaatcttggtgggcactgaccaggatttttactccctgctcggcgtaagcaagacagctagttctcgtgaaatccgccaggcttttaaaaagctggccctgaagctgcaccctgataaaaatcccaacaaccccaacgcccacggcgattttttgaagatcaatagggcatacgaagtccttaaagatgaggacctccgaaaaaagtacgacaagtatggggagaaaggactagaagataaccaaggaggtcaatacgagtcctggaactattatcggtacgacttcggcatctatgacgatgatcccgaaatcatcaccctggagcgccgggagttcgatgcggccgtgaattcaggggagctgtggttcgtcaatttctactcacctggctgttcacattgccacgacctggcgcccacctggcgagacttcgccaaggaagtagatggcttgctgaggatcggcgccgtaaattgtggggatgatcggatgctgtgtagaatgaagggagttaactcatatccttctctgtttatctttagaagcggaatggctcctgtgaagtaccacggtgatagatctaaggaatccctcgtctccttcgcaatgcagcatgtgcgctcaactgttacagagctgtggacaggcaatttcgtgaattctatccagaccgcatttgccgcaggcattggttggctgataaccttttgctccaaaggaggggattgtctcacctcacagacgcgcctacgactcagcggaatgcttgacgggcttgtgaatgtgggctggatggactgcgctacacaagataatttgtgtaagagtctcgatatcacaacttcaacaactgcgtactttccacctggtgccaccctcaataataaagagaaaaacagtattctactactacattag

SEQ ID NO: 185715 - DNA, 6732 bp, synthetic construct
  misc_feature 1..6732: note = Description of Artificial Sequence: Synthetic coding sequence
  source 1..6732: mol_type = other DNA
atgaacatcatccgggagaacaaggacctggcctgcttctacaccacgaagcatagttggagaggaaagtataaacgggttttctccgtaggcacacatgccattacaacttacaacccaaatactctggaggtgaccaaccagtggccctatggcgacatctgttccataagtccggtaggaaaaggccagggtacagagttcaatctcacatttaggaaagggtccggaaaaaaatcagaaactcttaaatttagcactgagcacagaacagaactgctgactgaggccctgcgtttccgtaccgacttttccgaggggaaaataactgggcggcgatacaattgttataagcaccattggtccgactcccgaaagcctgttatactcgaggtcacgccggggggtttcgatcagataaacccagctactaacagagtcctgtgctcgtatgattaccgcaacatcgagggcttcgtagatttgagtgactatcagggaggcttctgtatcttatacggtggtttcagcaggctgcacctatttgcctccgagcaacgcgaagagattatcaagtcagccatcgatcacgctggtaactacatcggaatcagcctgcgaatacgcaaggagcctctcgagttcgagcagtatctcaatcttcgctttggaaagtatagcaccgatgagagcataacatccctcgcagagtttgtggtgcagaagatctcaccccgacactcagagcctgttaaaagggttttggctctgactgaaacctgcctcgtggagagggaccctgccacctacaacatcgcaacgctgaagcccctcggcgaagtcttcgctctggtgtgcgactccgagaacccccagctgtttactatcgaatttatcaaaggtcaggttagaaagtattcctccactgaacgggattctctgctggcaagcttgctggacggcgtgagggctagcggcaacagagatgtgtgtgtcaagatgacccccactcataagggccagagatgggggctgctgtctatgcctgtggatgaggaggttgagagtctccaccttcgatttctggccacccctccaaacggcaactttgctgacgcagtttttaggtttaacgccaacattagctacagcggcgttctgcatgccgtaacacaggacggactgttctcagagaacaaagagaagttaatcaataatgccatcacagccctgctgtcacaggaaggcgacgtcgtcgccagcaacgcggagcttgagagccagttccaggctgtgagaaggttagtcgccagtaaggctggcttccttgcttttactcagctgccgaagttccgggagcgtttaggcgtgaaagtggtgaaagcgctcaaaaggagcaacaacggtataattcatgccgcggtcgatatgctctgtgctctaatgtgtcctatgcatgacgactacgatctgcgacaagagcaacttaacaaggcatctctactcagttccaaaaagtttttggagaacctgctggaaaagttcaattctcacgtcgatcacgggaccggagccctcgtgatctccagcctcctggactttctgacatttgcattgtgcgccccttatagcgaaaccactgaggggcagcagttcgacatgttgctcgaaatggtggcctctaacggacgtactctctttaaactgttccagcatcctagtatggctataattaagggtgccggcctggtgatgaaggccattatagaggagggcgacaaagagatcgctactaagatgcaggagctggctctgagtgagggggccctgcctcgccacctccacactgccatgttcaccatcagttcggatcagcgtatgctgacaaataggcagttgagcagacacctggtgggtctttggactgcagataacgcgactgccactaacttgctgaagcggatcctccctcctggacttcttgcttatctggaatcttctgatctggtgcctgaaaaggatgccgacagaatgcatgtgcgcgataacgttaaaattgccatggaccagtacggcaaattcaacaaagtgcctgagtggcagcggctggctggcaaagccgccaaagaggttgagaagttcgccaaagagaaggtggacctggttttgatgcactggcgcgacaggatgggtatcgcgcagaaggaaaatattaatcagaaaccagttgttctgcggaagcgcaggcagagaatcaaaattgaggccaactgggacctgttttattaccggtttggacaggaccacgctcgttctaatctcatatggaatttcaagacccgcgaggaactgaaggataccttggagtcagaaatgcgggctttcaacatagaccgcgagttgggctccgccaatgtgatttcttggaaccatcacgaatttgaagtaaagtatgaatgcctggcagaagagataaagattggcgactattatctgaggttattattggaagaagatgagaatgaagaatcaggtagtatcaagcgatcctatgagttttttaacgagctctaccacagattcctgctgacacccaaggtgaatatgaagtgtctgtgtctgcaggctctcgctattgtgtacggtcgctgccatgaagaaattgggccgtttaccgatactcgatacatcataggaatgctcgagcgatgcaccgacaagcttgagcgggatcgcttaattctgtttctaaataaactcatcttgaacaagaagaacgtcaaagacctgatggacagtaacggaatcaggattttggtggacctgcttactctagctcacctgcacgtgagccgggcaacagtcccactccagtccaacgtcatcgaggctgcgccagacatgaaaagggaatcagaaaaggaatggtacttcggtaacgctgacaaggagcggtcgggtccgtacgggttccatgagatgcaggagctgtggactaagggcatgctgaatgctaaaactcgatgctgggctcagggcatggacggttggcgccctctgcagtccataccacagcttaagtggtgtctgctggcctccgggcaggcagtgctgaatgagacagatcttgccactctcatcctgaacatgctgattactatgtgcggctattttccgagtcgtgatcaggataacgccataatcagacccctgcccaaagtcaagaggctgttgtccgacagtacgtgcctgcctcacattatccagctgcttctcaccttcgacccaattctggtggagaaagtggcgatcttgctgtatcatatcatgcaggacaacccccaactgccccggctgtatctttccggcgttttcttctttataatgatgtacacaggctccaacgtgcttccagttgcaaggttcctgaaatatacccacacaaaacaggccttcaaatcagaagagacaaaagggcaggacatttttcagaggagcattctggggcatatcctccccgaggccatggtatgctaccttgaaaattacgaacctgaaaagttttcagagattttcttgggggagttcgacacccctgaggccatatggtcaagcgagatgcggaggctcatgattgaaaagatcgccgcccacttggccgatttcactccccgtttgcagagcaacacacgcgctctgtaccagtactgcccaattccaattattaattaccctcagctggagaacgaactgttctgcaatatttactacctgaaacaactgtgcgatacactaagatttcccgattggcctatcaaggatccggtcaagctgcttaaggataccttggacgcctggaagaaggaggtggaaaaaaagccacccatgatgtctattgacgacgcttatgaggttctgaatctgcctcagggacaggggccacacgatgagtccaagatccggaaggcatacttccgactcgcacagaaatatcaccccgataaaaacccggagggcagagatatgttcgaaaaagtaaataaggcctacgagtttctttgtacaaagtccgctaagatcgtggatgggccggatccggagaacatcatcctcattttgaagacccagtcaattctgttcaatagacacaaggaggatttacagccttacaagtatgccggttaccccatgctgattcggaccattaccatggagacgtccgatgatctcctgttttcgaaagagtctcctctgttgcccgccgcaacagaactagcctttcatacagtgaactgctcggctctcaatgcagaggagctgcggcgcgaaaatggcctggaagtcctgcaggaagcgttcagcaggtgcgtagccgtcttgacacgtgcctctaagccatccgacatgtcggttcaagtgtgcggctatatttctaaatgctactctgtggccgcccaattcgaagaatgtagagagaaaataaccgaaatgccatcaatcatcaaagacctgtgtcgcgtgctgtactttggtaagtccatccctagggtcgcagcactcggtgtcgagtgcgtcagctctttcgcagtcgacttttggctgcagacccacctctttcaggccggaatactctggtatctgctagggtttctatttaattatgactacaccctagaagaaagcggaatccagaagtcggaagaaacaaatcagcaagaggtagcaaatagtttagccaagctgtctgtacacgcactctcacgtcttgggggatacttagcagaagagcaggccacacccgaaaaccctaccatccggaagagtctggctggaatgttgacaccatatgtagcccgaaagttggccgtagccagcgtcaccgaaattctgaaaatgctgaactcaaacacggagagcccctatctgatttggaataacagcactcgggcagaactgttagaatttctggaatcacagcaggaaaatatgattaaaaagggcgactgtgataagacctatggcagtgaattcgtctattcagatcacgcgaaggagctgatcgtgggtgaaattttcgtgcgggtgtacaacgaggtccccacattccaattggaagtgcctaaagcttttgccgcaagtctgttggattacatcggtagtcaagcccaatatcttcacacattcatggccattacacatgcagcgaaagtcgagtccgaacagcacggagataggcttcctagggttgagatggctttagaagcccttcgaaacgttattaagtataatccaggcagcgagagcgaatgtatagggcatttcaagctgatctttagtttactacgcgtgcacggcgcgggacaggtccaacagctcgcgctggaagtggtgaatatcgtcaccagtaaccaggactgcgtgaataacatcgctgagagcatggtcctcagttcactgctggcactgcttcattcactgccgtcctcccgccagctcgtgttagagacattatatgcattgacctcttccacgaaaattatcaaagaggccatggcaaagggtgccctcatttatctcctggatatgttttgcaattccactcaccctcaggtgcgcgctcagactgcggaactgtttgccaagatgacggcagataaattaatcggacccaaggttagaattacccttatgaaattcctcccatcagtcttcatggatgctatgagggacaacccggaggccgctgtgcacatcttcgaaggcacacacgaaaacccagagctgatatggaacgataacagcagggacaaggtgtctacaaccgtacgggagatgatgctcgaacactttaagaaccagcaggataaccctgaggcaaactggaaactccctgaggatttcgctgtcgtcttcggcgaggccgaaggtgaactagctgttggcggagtgttcctgagaattttcatagctcagcctgcttgggttctgcgtaagccccgcgaatttctgatagcccttctggaaaagctgacggaattgctggagaaaaacaaccctcacggtgagacgctggaaaccctcaccatggctaccgtctgcctcttctctgcacagcctcagctggcagaccaggtccctccgctgggccacctccctaaggtgattcaggcaatgaaccaccgaaataatgccatccctaaatctgccataagagtgattcacgctctgagtgaaaacgaattgtgcgtccgggccatggctagtctggaaacaattgggccactgatgaatggcatgaaaaagagggctgataccgttggcttggcatgcgaagccattaatcgaatgttccagaaggaacaaagcgagctggtggcccaggccctgaaagctgacctagttccatacctactgaaattacttgaaggcatagggttggagaacctagacagtccagcagctacgaaggcccagatcgtaaaggcactgaaggccatgacacgctctctgcagtatggcgagcaggttaacgaaattttgtgtaggtcgtcagtgtggtcagcttttaaagaccagaagcatgatttattcatcagtgagagtcagacagctgggtatctgacaggtccaggcgtcgccggttatctcacagccgggacgtccacatcggtgatgtccaacctgccaccacccgtggaccacgaggccggggatctaggatatcagacgtag

SEQ ID NO: 185716 - DNA, 2673 bp, synthetic construct
  misc_feature 1..2673: note = Description of Artificial Sequence: Synthetic coding sequence
  source 1..2673: mol_type = other DNA
atgtaccagatcagcaagaacagcggctgggcccggagccgggagtacaacttcaatctcaaaactcagtctatcctatttaatagacacaaagaagacctgcagccctacaagtatgcagggtatcccatgttgatccgcacaatcaccatggagacttccgatgacctcttattcagtaaggaaagccctctgctgccagcagccacagagttagcattccacaccgtgaattgctcagctctgaacgccgaggagttgagaagagagaatggcctcgaggtactgcaagaagctttcagcagatgtgtggctgtgttaacccgcgcctccaaacctagtgatatgtccgtccaagtctgcggttatattagtaaatgctattcagtggccgcacagtttgaggagtgtagagagaagatcactgagatgccctcaataatcaaagacctctgtagagtcctctattttggcaaaagtattcctagggtcgccgccttgggcgtggaatgcgtaagttcttttgctgtcgacttttggctccaaacccatttgttccaggcaggaatcttatggtacctgctgggttttcttttcaattatgactacacactggaggaatcaggcatacagaagagtgaggaaactaaccagcaggaggttgcaaatagcctggcgaagctgtccgtccatgcattgtccagactgggaggatacctcgctgaggaacaagccacccctgagaacccaactatcagaaaaagtcttgccggaatgttgaccccctatgtagcaaggaagctggcggtggctagcgtgacggaaatcctcaaaatgcttaattccaataccgagagcccctatctgatttggaacaattccacccgagctgaactgttagaattcctggaaagtcagcaggaaaacatgatcaagaaaggcgattgcgataagacctatggatctgaatttgtctattcagatcatgcaaaggaactgattgtgggggagatattcgtgcgagtgtacaatgaagtccccactttccagcttgaggtgcccaaagcttttgcagcctcactgctggactatatcggtagtcaggcgcagtacctgcacactttcatggctatcacacacgctgccaaggtggagagtgaacagcacggcgaccgcctccctcgcgtagaaatggcattagaggcactgagaaatgtcattaaatacaacccagggtctgagagcgagtgcatcgggcatttcaagctgattttctctttgctgcgggttcatggcgcagggcaggtgcagcagttggctctggaggtagtcaatatcgtaactagcaatcaagactgtgtaaacaacatcgccgaatcaatggtgctgtcctcactcttggctcttctgcactcacttccaagcagtcgtcaattggttctggagactctgtacgctctcaccagctccactaaaattatcaaagaagcaatggctaaaggcgccctcatatatctgcttgacatgttttgcaatagtactcatcctcaggtgcgggcccagacagcagagctgttcgctaagatgacagctgacaaactcattggtccgaaagttcgaataacacttatgaaattcctcccctccgtgtttatggacgcaatgcgcgacaatccagaggcagccgtccacatattcgagggcacccatgaaaacccagaactgatttggaacgataacagtcgagacaaggtgtctactaccgtccgcgaaatgatgctcgagcattttaagaatcagcaggacaaccccgaagcaaactggaaattacccgaggactttgccgtagtgttcggcgaagcagagggcgagctcgcagtgggcggcgtttttctcagaatcttcattgcacagcctgcctgggtcctgaggaaaccgcgcgaatttttgatcgccctactggagaaactgaccgaactgctggagaagaataacccccacggtgaaacactcgaaacactgacaatggcgactgtctgtctgttttccgcccagccacagctggccgatcaggtgccacccctgggccatttgcccaaagtcatccaggctatgaatcaccggaataatgccatccccaaatctgccatccgagtgattcacgccctgtccgagaacgagttgtgcgtacgggcaatggcgtcacttgaaacaattggacctctaatgaacggcatgaaaaagagggctgacactgtcggcctagcctgcgaagcaatcaatagaatgtttcaaaaagaacagtctgaactcgtagctcaggccctgaaagcggacctggttccttatctcttaaaactgttggaagggatcggccttgaaaacctggacagccctgcagctacaaaggcgcagatagtcaaggccctcaaggctatgacaagatctctgcagtatggtgagcaggtgaacgagattctctgtaggtccagcgtctggagcgctttcaaagatcaaaagcacgacttgttcatcagcgaatctcagaccgcggggtacctgacagggcccggggtggctggttacctgaccgctggcactagtaccagcgtcatgtctaacctgcccccccctgttgatcatgaggccggcgaccttggataccagacctag

SEQ ID NO: 185717 - DNA, 351 bp, synthetic construct
  misc_feature 1..351: note = Description of Artificial Sequence: Synthetic coding sequence
  source 1..351: mol_type = other DNA
atggccagcaccgtggtggccgtgggcctgaccatcgccgccgccggatttgctggccggtacgttctccaagccatgaagcatatggagccccaggtaaaacaggtctttcagtccctcccgaaaagtgcgttttccggcggttattaccgcggcggatttgagcccaagatgacaaagcgcgaagccgcactcattctgggcgtgtctcccaccgcgaacaagggcaaaattcgagatgcccacaggcgcattatgctactcaatcatccagacaaaggaggctctccttacattgctgctaagatcaatgaagccaaagatctcctcgagggacaggccaagaaatag

SEQ ID NO: 185718 - DNA, 1707 bp, synthetic construct
  misc_feature 1..1707: note = Description of Artificial Sequence: Synthetic coding sequence
  source 1..1707: mol_type = other DNA
atgctgctgctgcccagcgccgccgacggccggggcaccgccatcacgcacgcactgactagcgccagcactctctgtcaggttgaacccgtgggcagatggtttgaggctttcgtaaaacgccgtaacaggaatgctagcgcctcctttcaggaactggaggataagaaggagctgagtgaagagtccgaggatgaggaacttcagctagaggagttcccaatgcttaagactctggatccgaaggattggaaaaaccaggaccactatgcggtgctcggactaggccatgttcgatataaggctacccagagacaaatcaaggcagcccataaagctatggtcctgaaacaccatcccgacaaaagaaaggcagctggtgagcccattaaagagggcgacaatgactattttacttgtataaccaaggcatacgaaatgttgtctgatcctgtgaagaggagagcatttaactctgtggaccctaccttcgacaattcagtgccaagcaaaagcgaggcaaaggacaatttcttcgaggtgtttacacccgtgttcgaacgcaattctagatggagcaacaagaagaacgttcccaagctgggcgacatgaacagcagtttcgaggacgtagacatcttctattcattttggtataacttcgactcatggcgggaattctcctacctggacgaagaggaaaaagagaaagcggagtgtcgggatgagcggagatggattgagaagcaaaatcgcgctacccgggcccagagaaaaaaggaggaaatgaatagaattaggaccctggtcgataatgcgtatagttgtgatcctcgcatcaagaaatttaaggaagaagagaaggctaagaaagaagccgagaagaaagccaaagccgaggccaaaagaaaggaacaggaagctaaagagaagcagcgccaggcagagctggaagcagccaggcttgccaaagaaaaagaggaagaggaagtgaggcaacaggcgctgttagctaagaaagagaaggacattcagaaaaaagctatcaagaaagagcgccagaaacttagaaattcgtgtaagatcgaggaaattaatgaacaaataaggaaagagaaggaagaagccgaggcgagaatgaggcaagcatctaagaatactgagaaatctactggcggcggtggtaacgggagtaagaactggtcagaggacgacctccagctgttgatcaaggctgtcaatctcttccccgctggcactaactccagatgggaggtaattgctaattacatgaatattcattcctccagtggtgtgaagagaacagcaaaggacgtgatcggcaaggccaagagcctgcagaagctagaccctcaccagaaagacgacattaataagaaagcattcgataaatttaagaaagagcacggagtggtgccccaagccgataatgccacaccaagcgagagattcgaagggccttacactgacttcacgccctggaccaccgaagagcagaaactactggagcaggctcttaagacatacccagttaatacccccgagagatgggagaagatagctgaagctgtcccaggccggacaaagaaagactgcatgaaaagatataaagagcttgtcgaaatggtcaaggctaaaaaagctgcacaggagcaggtgctcaacgcatcacgggcaaaaaaatag

SEQ ID NO: 185719 - DNA, 1866 bp, synthetic construct
  misc_feature 1..1866: note = Description of Artificial Sequence: Synthetic coding sequence
  source 1..1866: mol_type = other DNA
atgctgctgctgcccagcgccgccgacggccggggcaccgccatcacccacgccctcacatcagctagcaccctttgtcaggtggaacctgtggggcgttggtttgaggccttcgtcaagaggaggaacagaaacgccagtgcttccttccaggaactggaggataagaaggagctctctgaagagtcagaggacgaggagctgcagctggaggagttcccaatgctgaagaccctggacccaaaagactggaaaaatcaggaccactacgccgtgctcggcctcggtcacgtgaggtacaaagctactcagaggcagatcaaggccgcacataaggccatggttcttaagcaccacccagataagcggaaagctgcaggcgaaccgataaaggaaggtgacaatgattacttcacgtgtatcaccaaagcttatgagatgctgagcgaccccgtgaagcgtcgggccttcaatagcgttgaccctacattcgataatagcgtacctagcaagagcgaggctaaggataatttcttcgaggtgttcacaccagtgtttgagagaaattccagatggagtaataagaaaaacgtgccgaagcttggggatatgaatagttctttcgaagatgtggatatattttatagcttctggtataatttcgattcttggcgtgagttctcatatctcgatgaggaggagaaggaaaaggccgaatgccgcgatgaacgtcgctggatcgaaaagcagaatcgggctacacgcgctcagcgcaaaaaagaagagatgaacagaatacgaactcttgtagataatgcctatagctgcgatcctaggatcaaaaaatttaaagaggaggagaaggctaaaaaggaagctgagaaaaaggcaaaggcagaagccaagcggaaggaacaggaagcaaaggagaaacagagacaggccgagctagaggcagctcgcctggctaaggagaaggaggaggaagaggtgaggcagcaagctctcttggcaaagaaggaaaaggacatccaaaagaaagccataaaaaaagaacggcagaaattgaggaactcttgtaagacgtggaatcacttctccgataatgaggctgaacgagtgaagatgatggaggaagtcgagaagctttgcgatcgcctggaactggccagccttcaatgtcttaatgagactcttacatcttgcactaaggaggtgggtaaggctgcacttgagaaacagattgaggaaattaatgagcagatacgcaaggagaaggaagaagctgaagcccggatgcgccaggcatctaagaataccgaaaaatcaacaggcggcggtgggaatgggtccaaaaattggtccgaggacgacttgcagctgctaatcaaagccgtgaatctgtttcccgccggaacaaattctagatgggaggttattgcaaattacatgaacattcactcgagttcaggtgttaaacggacagcaaaggatgtgatcggaaaggccaaatcacttcaaaagctggatcctcaccagaaagacgatataaacaagaaagccttcgataaattcaagaaagagcacggtgttgtacctcaagccgacaacgctactccttctgaacgcttcgaggggccatacacggacttcacaccttggaccacggaggagcagaaacttttggagcaggctcttaaaacctatcccgtcaacacaccagagcgatgggagaaaatcgcagaggccgtgcccggcaggactaaaaaagattgtatgaagcggtacaaggaacttgtggaaatggttaaagcaaaaaaagctgcacaagagcaggtgctgaacgcctctagagcgaaaaagtag

SEQ ID NO: 185720 - DNA, 609 bp, synthetic construct
  misc_feature 1..609: note = Description of Artificial Sequence: Synthetic coding sequence
  source 1..609: mol_type = other DNA
atgctgctgctgcccagcgccgccgacggccggggcaccgccatcacccatgcgctgaccagcgcaagtacgctgtgccaggtggagcctgtcggaaggtggttcgaggctttcgtgaagcggcgaaaccgcaacgccagtgcatctttccaagagctggaagacaaaaaggaactgagcgaggagagcgaggacgaggaactgcagttggaggaattccccatgctaaaaaccctagaccctaaagactggaagaaccaggatcattacgcagtattggggctaggtcacgtgcgctacaaggccacacagcgccagattaaggccgcacacaaggccatggttctcaagcaccatcctgataaacgtaaggcagccggcgagcccatcaaggagggcgataatgattattttacatgcataaccaaggcatatgaaatgctgtccgatcccgttaagcggagagcgttcaattctgtggatcccaccttcgacaattccgtgcccagcaagagtgaggccaaggataacttcttcgaagtgttcacgcctgtgtttgagcggaattctagggtttccatttctaaaaaaaagaagaaaaagagatag

SEQ ID NO: 185721 - DNA, 822 bp, synthetic construct
  misc_feature 1..822: note = Description of Artificial Sequence: Synthetic coding sequence
  source 1..822: mol_type = other DNA
atggaggccaacatgcccaagcggaaggagcccggccggagcctgcgtatcaaagtgatctctatggggaacgccgaggtggggaagtcctgtatcatcaagcggtactgcgagaagagatttgtgtctaagtacctggccactatcggaattgattacggtgttaccaaggtgcacgttagggaccgggagattaaggtgaacatcttcgacatggcaggccaccccttcttctacgaggtgagaaatgaattctacaaagatactcagggcgtgatccttgtttatgatgtaggacagaaagattcatttgatgctcttgacgcttggctggccgaaatgaagcaggagcttggccctcatgggaacatggagaacatcattttcgtggtgtgtgccaacaaaatagattgtaccaagcaccgatgcgtcgatgaatccgaggggcggctctgggctgaatctaaggggtttctctattttgaaacctcggcacaaaccggcgaagggattaatgagatgttccagaccttctatatctcaatcgtggatctgtgtgaaaatggcggtaaacgccccaccaccaattcctcagcgtctttcaccaaggaacaggctgacgctatcagaaggattagaaacagtaaagacagctgggatatgctcggggtgaagccgggagccagccgagacgaggtcaataaggcctataggaagttagcagttctgctccaccccgacaaatgcgtggctcccggctctgaagacgcgttcaaggccgtcgtcaatgctaggactgcactgctaaagaatataaagtag

SEQ ID NO: 185722 - DNA, 609 bp, synthetic construct
  misc_feature 1..609: note = Description of Artificial Sequence: Synthetic coding sequence
  source 1..609: mol_type = other DNA
atggccggccaccccttcttctacgaggtgcggaacgagttctacaaggacacccaaggagtcatactggtgtatgatgtgggacagaaggactcattcgatgccctggacgcatggctcgctgaaatgaaacaggagctcggacctcatggcaacatggagaacattatcttcgtggtgtgcgcaaataagattgactgcaccaaacaccggtgcgtagacgaatccgaggggaggctctgggcagaaagcaaggggtttctatactttgagacttctgctcaaactggagagggcataaacgaaatgttccagacattctatatctccatcgtcgatttgtgtgagaatggagggaagcgacccaccacaaattcctctgcttcattcaccaaggaacaggcagacgccatccggcgcataagaaactcgaaggactcttgggacatgttaggagtcaagcccggggcgtccagggacgaggtaaacaaggcctacaggaagttagcagtcttgctgcatcccgacaagtgtgtagcgcccggaagcgaagacgcatttaaagctgtagtaaacgccaggaccgccctgctcaagaatattaaatag

SEQ ID NO: 185723 - DNA, 1515 bp, synthetic construct
  misc_feature 1..1515: note = Description of Artificial Sequence: Synthetic coding sequence
  source 1..1515: mol_type = other DNA
atggtggcccccggcagcgtgaccagccggctgggcagcgtgttcccatttttactggtgctcgtggaccttcagtacgagggggccgaatgcggggtaaatgcagatgtcgagaagcacctcgaactgggcaagaaacttctggccgctggtcagctcgccgatgccctgtctcagttccacgcagccgttgatggcgacccggataactacattgcttactacaggagagccaccgtgttcctggccatggggaagtctaaggctgccctgccagatctgaccaaagtaattcagctcaaaatggattttactgcagcacgcttgcagagaggccacctgttactcaagcagggtaaactcgacgaagccgaggacgactttaagaaggttctgaagagtaacccttctgaaaatgaggagaaggaagctcaatcacaactcatcaagagtgacgaaatgcagcggctccgcagtcaggccctaaacgcctttggcagtggagattacactgctgcaattgcatttctcgataagatcttagaggtgtgtgtttgggacgcagagctccgcgaactgagagccgagtgttttattaaggagggcgaaccacgtaaggctatctctgaccttaaagcagcctctaagctaaagaacgataatacagaagctttctataagatctcaacactatactatcagctgggagatcatgaactctccctgagcgaggtgcgtgagtgcctcaagctggatcaggaccataagcggtgcttcgcccactataaacaagttaagaagctaaacaagttgattgagagcgcagaagagttgattcgagacgggagatacacggatgcaacatccaaatatgagagtgtgatgaaaaccgagccctcgatcgccgaatatacagtccggtctaaagaaagaatctgtcattgcttttctaaggacgagaaacccgtggaagcaattcgcgtctgttcagaggttctgcaaatggaacccgacaatgtcaatgctctgaaagaccgagcagaagcctatctgatagaggaaatgtacgatgaggccattcaggactacgagaccgcccaagagcacaacgaaaatgatcagcaaatcagggagggactagaaaaggcacaacgattgctgaagcagtctcagaagcgtgattattataagatcctgggagtcaaacggaacgccaaaaaacaagagattattaaggcttatcggaagttagcactgcagtggcatccagataacttccaaaacgaagaagagaaaaagaaagcagagaaaaagtttattgatatcgccgccgctaaggaggtgctgagcgatcctgagatgcgcaagaaattcgatgacggagaggaccccctggatgccgaatcccaacaggggggaggcggcaacccgttccatcgcagttggaactcatggcaggggtttaatcccttcagctccgggggaccgttccggttcaaattccattttaattag

SEQ ID NO: 185724 - DNA, 597 bp, synthetic construct
  misc_feature 1..597: note = Description of Artificial Sequence: Synthetic coding sequence
  source 1..597: mol_type = other DNA
atggccgaccagcggcagcggagcctgagcaccagcggcgagagcctataccatgtgctgggtctggacaagaacgctacctctgatgatattaagaagagctacaggaagctggctctgaaatatcatccggacaaaaaccctgacaaccctgaagccgccgataagtttaaggagatcaacaacgcacacgcaatcttaaccgacgctactaaacggaacatctacgataaatatggctcactgggtctttatgtggccgaacagttcggggaggaaaatgtgaatacctactttgtactgtcgtcttggtgggccaaagcactctttgttttttgtggcctattgacctgctgttattgttgctgctgcctgtgctgctgtttcaactgttgctgtgggaaatgtaaacctaaagcgccagaaggcgaggaaaccgagttctatgtaagcccagaggacctcgaagcgcaactacagagtgatgaacgcgaggcgacagatactccaatagtcatccagcctgcctccgctacagagactacgcagttaactgccgactcccatccctcgtatcataccgacggattcaactag

SEQ ID NO: 185725 - DNA, 504 bp, synthetic construct
  misc_feature 1..504: note = Description of Artificial Sequence: Synthetic coding sequence
  source 1..504: mol_type = other DNA
atggccgaccagcggcagcggagcctgagcaccagcggcgagagcctgtaccatgtcctggggctggataagaatgccactagcgacgacatcaaaaaatcttacagaaagctggcccttaaatatcatcccgataagaatccggataatcctgaggccgctgacaaattcaaagagatcaataacgcgcatgcgatactgacggacgcaacaaagcggaatatttacgataagtatggtagtctgggcctttacgtggcggaacagtttggcgaggagaacgtaaacacctacttcgtgctctcgagttggtgggcaaaggctttgtttgtgttttgcgggctgctcacatgttgctattgttgctgttgtctgtgttgttgctttaactgctgctgtggaaaatgtaaacctaaggcccctgagggcgaggaaactgaattctatgtgtctcccgaagacctcgaggcccagctgcagagcgatgaacgcggcggacactag

SEQ ID NO: 185726 - DNA, 600 bp, synthetic construct
  misc_feature 1..600: note = Description of Artificial Sequence: Synthetic coding sequence
  source 1..600: mol_type = other DNA
atggcctgcaacatccccaaccagcggcagcggaccctgagcaccactggggaggcactatatgaaatcctgggcttgcataagggcgcatctaatgaagagattaaaaagacatataggaagctagctttgaaacaccatccggacaagaacccggacgatcccgcagctaccgaaaaatttaaggagattaataacgctcacgcaatcttgaccgatatttccaaacggtcaatatacgataaatatggctcattaggcctctatgtcgctgaacagttcggtgacgaaaatgtgaatacatacttcatgctgtcgagttggtgggcaaaggctctgttcgtgatcgttggactgctcacaggctgttatttctgctgctgcctctgttgctgctgtaactgctgttgtggtcattgtcggcccgagagctcagttccagaggaagacttctatgtgtcacctgaggatctcgaggaacagattaaatctgacatggagaaggacgttgacttccccgtgtttttacagccaaccaacgcgaacgaaaaaacacagttgattaaggaagggtcacgctcgtattgtaccgactcgtag

SEQ ID NO: 185727 - DNA, 570 bp, synthetic construct
  misc_feature 1..570: note = Description of Artificial Sequence: Synthetic coding sequence
  source 1..570: mol_type = other DNA
atgagcaccgtgaaggaggccgcccaccggctgagcaagagcgagatgagcttgtacgctgtgctggatttgaagaagggcgccagcccagaggattttaaaaaatcctactcccattccgctcttcttcctcacccgccattcgaatatcacttgggcaggaaactcgccctgcgatatcatcctgataagaaccctggtaatgctcaggcagctgagattttcaaggaaataaatgccgcgcatgccattctcagcgacagtaaaaagaggaaaatttatgatcagcatggtagcctgggcatctacttatacgatcatttcggagaagaaggcgtcaggtattacttcattctgaacagttgctggttcaagacccttgttatactctgcaccttgttgacctgttgctgtttttgctgctgctgctgcttctgttgcggggctctcaagcctccacctgaacaagattccggccgcaagtaccagcagaatgtgcagtcacagccccccaggtccggcgctaaatgtgacttccggtccgaggaaaattcggaagacgatttctag

SEQ ID NO: 185728 - DNA, 570 bp, synthetic construct
  misc_feature 1..570: note = Description of Artificial Sequence: Synthetic coding sequence
  source 1..570: mol_type = other DNA
atgagcaccgtgaaggaggccgcccaccggctgagcaagagcgagatgtcgctatatgcagtcttggacctgaaaaagggagcttcccccgaggatttcaaaaagtcatacagtcacagtgccctcctaccccaccccccttttgaatatcacttgggacgtaaattagccctgaggtatcaccccgataagaacccaggcaacgcccaggccgccgagatcttcaaggagatcaacgccgcgcacgcaatcctgagcgactccaaaaagcgtaagatctatgatcagcacggttccctcggaatctatctgtacgatcattttggcgaggaaggcgtgcggtattactttatcctcaatagctgctggttcaaaacgcttgtgattctttgtactttgctaacttgttgctgtttttgttgttgttgttgcttttgttgtggcgcgcttaagcctcctcctgagcaagactccggaaggaagtatcagcagaatgtccagtcccagccacccaggtccggggccaagtgcgatttccggagtgaggagaattccgaggacgacttttag

SEQ ID NO: 185729 - DNA, 2703 bp, synthetic construct
  misc_feature 1..2703: note = Description of Artificial Sequence: Synthetic coding sequence
  source 1..2703: mol_type = other DNA
atggagcccagctacggcggcggcctgttcgacatggtgaagggcggggccggaagactattttcaaatctgaaagacaatctgaaggacacattgaaagacacaagtagccgcgtgatccaaagcgtaacctcatataccaagggcgacctcgactttacctatgttaccagcaggatcatagtgatgagtttcccacttgataatgtggatatcgggttccgaaaccaggtggatgacatcagaagctttttagattctcgacatttagatcactacactgtctacaacttgtcaccaaagagttacaggaccgctaaatttcatagtagggtgtccgagtgctcatggccgatcaggcaggcaccgtccttacataaccttttcgccgtgtgcaggaacatgtataattggttactgcagaacccaaagaacgtctgcgttgtccactgcctcgatggccgggccgcctcatcaattctggtgggggccatgttcatcttctgcaacttgtactcgacgcccggtcccgctataagactgctctatgccaagcggcccgggattggcctgagtcctagccatcgtagatatctgggatacatgtgcgatctgctcgcagacaaaccttatcggccacattttaagccactgacaatcaagagcataacggtcagcccgataccattcttcaataagcagcggaacggctgccggccctactgcgatgtgttaatcggtgaaaccaaaatttacagcacctgtaccgacttcgagaggatgaaggagtatagggttcaggacggcaaaattttcattccgctcaatattacggtccaaggcgacgtggtggtctccatgtatcatctgcggtcaactatcggcagccggttacaggcaaaggttacaaacacacagatttttcagctacagtttcacacaggctttatcccactggacacaaccgtgcttaaatttactaagccggagttggatgcctgcgacgttcctgagaagtatccgcagctatttcaggtgactctggatgtggagctccagccgcacgacaaagtgattgacctgacaccgccatgggaacactattgtaccaaggacgtgaatccttctattctctttagctctcatcaagaacatcaggatacgctcgccttaggcggccaggctccaatcgacatacctccggacaaccctagacactacggccagtcaggtttctttgcctctctctgctggcaggaccagaaatctgagaaatcattctgcgaggaagaccacgcagccctcgtgaatcaggaaagcgaacagtctgatgatgaactgctcacactgtcatcccctcatgggaatgcaaatggtgataagccccacggggtcaagaagcccagcaaaaaacaacaggagcccgctgcccctccacctcctgaggatgtcgatctgctcggcctcgaggggagcgccatgtccaacagcttttccccccccgccgccccgcccaccaatagcgagctcctcagcgatctcttcggcggcggaggtgcagcagggccgactcaggcagggcagagtggcgtggaggacgtctttcatccgagcggtcctgccagcacccaaagcaccccgaggcgttccgccacctctacctcggcttccccaaccttgcgagtgggggagggggccacttttgaccccttcggcgccccctccaagcccagcgggcaggacctgttaggctcttttctcaacactagcagcgcatcctcagacccttttctccaacctacccgctcgcctagcccaactgtgcatgcatcatccactcctgctgtaaatatccaacccgatgtttctggcgggtgggattggcatgcaaaacccggcggcttcggtatgggctccaaatctgcagcgacttcgcctactggctcttctcatggaacacccacccatcagagtaagccccagacactcgacccttttgcagatttaggcacactaggctccagtagttttgctagtaagcccaccacaccaactggactaggcggtggctttccgcccctgtccagccctcagaaggcttcccctcagcccatgggaggaggttggcagcagggcggcgcatacaattggcaacagccgcaacccaaaccacagccatcgatgccccattctagtccacaaaatagacctaattacaatgtgagtttctcagccatgcccggagggcagaacgagagaggtaaggggtcctccaatctggaaggcaagcagaaggccgctgatttcgaagacctgctgtccggtcaggggttcaatgctcacaaggataagaaggggcccagaacgattgctgagatgcggaaggaggaaatggcaaaggaaatggatccagaaaaactgaaaatactggagtggatcgagggtaaagaacgtaatatcagagcgctgctgagtacaatgcatacagtgctgtgggcgggtgaaactaagtggaaacccgtcgggatggctgatctcgtcactcctgaacaagtgaagaaagtctaccgcaaggctgtgctggttgttcaccccgataaagccactgggcagccgtacgagcagtacgctaagatgattttcatggagcttaacgacgcgtggtcggaattcgaaaaccagggacagaagccactatattag

SEQ ID NO: 185730 - DNA, 2913 bp, synthetic construct
  misc_feature 1..2913: note = Description of Artificial Sequence: Synthetic coding sequence
  source 1..2913: mol_type = other DNA
atgagcctgctgggcagctaccggaagaagaccagcaacgacggctatgagtccctgcagctcgtggattcgaacggcgacctgagcgccggatctgggggagtagggggaaaacagcgagtgaatgccggagctgccgcgagatcccccgccagacaacccccagatcgagcttctacaatggactctagcggtgcttctagtccagatatggaacccagctacgggggaggtctgttcgacatggtgaaaggtggtgctgggcggctatttagtaatctgaaagacaacttgaaagacacactgaaggatacttcgagtagggttatacagagtgttactagttatacaaagggggacctggactttacctatgtcacttcacggatcatcgttatgagcttcccgctggataacgtggacattggctttcggaatcaggtggatgatatcagatcctttttggatagccgccacctggatcattacacagtctacaatctttcccccaagagttatagaacagctaagtttcactccagggtgtcagaatgttcctggccgattagacaggcgccttctctacataacctcttcgccgtttgtagaaacatgtataattggctgctacagaacccaaagaacgtatgtgtggtacattgcctagatggccgggcagcatctagcatcctagtgggggctatgttcattttctgcaacctgtatagcaccccaggaccagccattcgactgctctacgccaaaagacctggaatcggactcagccccagccatcggcggtatttggggtacatgtgcgatcttttggctgataagccctatcgccctcacttcaaaccgctcacaatcaagtctatcacggttagccctatccccttcttcaataagcagagaaatgggtgcagaccttactgtgacgtgcttattggcgagaccaagatttacagtacatgtaccgatttcgaacgcatgaaggaataccgggtacaggacggaaaaattttcatcccgctgaatattaccgtacagggagatgtcgtggtgagtatgtaccaccttagatctactatcgggtcccgattgcaggccaaggttactaatacccaaatcttccaactgcagtttcatactggcttcatccctttagacaccacagtcctgaagtttaccaagcccgagctagacgcatgcgatgtgcccgaaaaatatccacaactgtttcaagttactctggatgtcgagttacagccccacgacaaagtgatcgacctgacacctccttgggaacactattgcacaaaagatgtgaatccttccattcttttctcctcgcaccaggaacatcaggataccctcgcactgggaggccaagctcccatcgatatcccacctgataatccacggcattatggccagagcgggtttttcgcttccctgtgttggcaggaccagaagagtgaaaaatcattttgcgaggaagatcacgcggccctggtgaatcaggaaagcgaacagtcagacgacgaactgctgaccctatcaagcccgcacggtaacgcaaacggggacaagccacacggtgtcaagaaaccaagcaagaagcaacaggagcccgcggctccaccccccccagaggacgtggatcttctaggcctcgagggcagcgccatgtcaaactccttttctccccctgctgcccctccgacaaatagtgagctcttgagcgacctgtttggcgggggaggcgcagccggccccactcaagctggccagtccggggttgaggacgttttccatccatccggacccgcctcaacacagagcactccccggcgatccgcaacatcaacctccgccagcccaacattgcgtgtgggggaaggggcgacctttgaccctttcggagctccatcaaagccatcaggccaggatctgcttggatcttttctgaacacttcctcagccagctctgaccctttcttacagccaactcggagtccaagccctacagtgcacgcaagtagtacacccgcggtcaacatccaaccggacgtgtcaggaggctgggattggcatgctaagccaggtggttttggcatggggtcaaaatctgctgctacaagccccacaggctcctcccacggtacgccgactcatcagagcaagccacagactcttgatccatttgccgatctgggaactctcggaagtagttctttcgcctcaaaacctacgactcccacaggcttgggaggggggttcccgccgttgtccagcccgcagaaggctagcccgcaaccgatgggaggaggttggcagcagggtggcgcatacaactggcagcagcctcagcccaaaccacagccaagcatgccacactctagtcctcagaataggccgaattacaatgtctcttttagcgccatgcccggcggccagaacgaacgtggcaagggctcttccaacctggagggcaaacagaaggccgctgacttcgaggacctgctgagtgggcaaggctttaacgcacacaaggacaagaaaggcccccgcactatcgcagaaatgaggaaggaggaaatggcgaaagagatggacccagaaaaattaaaaatcttggaatggatcgagggcaaggaaaggaatatccgcgctctgctctccacaatgcataccgtgctgtgggcaggagaaacgaagtggaagccagtgggaatggcagatcttgttacccctgaacaggttaaaaaagtgtatcggaaggccgtgttagtggtgcatccggacaaggctacgggacagccttacgagcagtatgcaaagatgatcttcatggagctgaacgatgcatggtctgagttcgaaaatcaggggcagaagccgctgtactag

SEQ ID NO: 185731 - DNA, 2742 bp, synthetic construct
  misc_feature 1..2742: note = Description of Artificial Sequence: Synthetic coding sequence
  source 1..2742: mol_type = other DNA
atgaaggacagcgagaacaagggcgccagcagccccgacatggagcctagctacgggggaggcctgtttgacatggtaaagggcggcgctggtcggcttttcagtaatcttaaggataacctgaaagacactctcaaggacactagttccagggtcattcaatctgtgaccagttatacgaaaggtgatctggactttacctatgtgacttcacggatcattgttatgtctttccctcttgacaacgtcgatatcggattcaggaatcaggtggacgacattagatccttcctggacagcagacacctggaccactacactgtgtataatttgtcccccaagtcttaccgcacagccaaatttcatagtcgggtttctgagtgcagttggccgattcggcaggctccctcccttcacaacctgtttgctgtgtgccggaatatgtataattggctgctgcagaatccaaagaacgtctgtgttgttcactgtctggatggacgagccgcctccagcattctggtaggggcgatgtttattttttgcaacctttattccacgccaggtcccgcaattagactgctgtacgcaaagcggcccggaattggcttgagccccagtcatcgtagatacttaggttacatgtgcgacctactcgccgataagccatacagacctcacttcaaaccactgacgatcaagagcatcaccgtctctccaatcccttttttcaacaaacagcgaaatggatgtcgaccatactgtgatgtgctgattggggagacaaagatctattctacctgtaccgattttgaacgtatgaaggagtacagggtgcaagacggcaagatcttcatacctctaaatatcacagtgcaaggcgacgtcgtggtatccatgtatcatctgcggtccactattggatcacggctgcaggccaaggtcacaaacactcagatcttccaactgcagttccacactgggttcattccgctagacaccaccgtcctcaagtttacaaagccagaattggatgcctgtgatgtgccagagaaatatccgcagcttttccaggtcacgctggacgtggagttacagccccacgacaaggtgatagatctgaccccaccttgggagcactattgcaccaaagatgtgaacccctccatacttttttcttcacatcaagagcaccaggacaccctggccttaggcggccaggcacccatcgacatccctcctgacaaccctcggcactatgggcagtcaggcttctttgcctcattgtgctggcaggatcagaaaagtgagaagtccttctgcgaagaagaccacgctgccctggttaaccaagagagcgagcaaagcgatgatgaattgctgacactgtcctctccccacgggaacgctaacggtgacaagccacatggagtgaaaaagccgtctaaaaaacagcaggagccagccgcccctccccctccagaggatgttgacctgttaggcttggagggctccgcaatgtccaatagcttttcaccgccggcggcaccacccacaaattctgagcttctgtccgatctgtttggcggtggcggagccgccgggcccacccaagcgggccagtccggtgtggaggacgtattccatccaagtgggcccgcatccacccaatccacaccccgcagaagcgcaacctctactagtgccagcccaaccttaagggttggtgaaggcgcaacgttcgatccctttggggcgccctctaaaccctcgggccaggacttactaggaagctttctcaacacctcgagtgctagttcagacccctttttgcaacctactcggtcgccctctcccaccgtgcatgcttcttcgaccccggcagttaacattcagccagacgtctccggcggttgggactggcatgccaagccaggggggttcggaatgggaagcaagtccgctgccacctcacctactgggagctcccacgggacacccacacaccagagtaagcctcagaccctggacccatttgctgacctgggcacactcggcagctcatcctttgcgtcaaagccaaccaccccgacgggtttgggagggggatttccccccttgtcaagtcctcagaaggcatcccctcagcccatgggcggaggttggcagcagggaggagcgtataattggcagcagcctcagccgaagccccaacccagcatgccccatagttccccccagaacagaccaaactacaacgtgtccttttccgcgatgcctggggggcagaatgaacggggaaagggttcttcaaacctcgaggggaaacaaaaagctgccgatttcgaggacctgctctcagggcagggctttaacgcacacaaagacaagaagggtcctcgcaccattgccgaaatgcggaaagaggaaatggccaaggagatggatccagagaagttgaagatcctggaatggattgaggggaaggaacggaacattcgagccctgttgagcacgatgcacaccgtcctgtgggctggggagactaaatggaagcctgtgggcatggcggacctagtcacaccagagcaggtgaagaaggtgtaccggaaagccgtgctcgtagtgcatcccgataaagcaactggtcagccctacgagcagtacgccaaaatgatcttcatggagctgaacgatgcctggagcgaattcgaaaaccaaggccagaagcccctgtactag

SEQ ID NO: 185732 - DNA, 783 bp, synthetic construct
  misc_feature 1..783: note = Description of Artificial Sequence: Synthetic coding sequence
  source 1..783: mol_type = other DNA
atgggcctgctggacctgtgcgaggaggtgttcggcaccgccgacctgtaccgtgtgctgggagtgcggcgcgaggccagtgacggggaggtccgccgtggatatcacaaggtgtccttacaggtccacccggatcgagtgggggaaggggacaaggaagatgctacgagaagatttcagatcctagggaaggtatatagtgttttatcagacagagaacagcgcgccgtgtatgatgaacagggaactgtcgatgaggattcacccgtgctcacccaggatcgtgactgggaagcttactggcgcctactcttcaagaagatctcacttgaggatatacaggcgtttgagaaaacatataaagggagcgaggaagaactggctgatataaagcaggcttacttggactttaaaggtgatatggaccagattatggaatcggtcttgtgtgtacaatataccgaagagcccaggattcggaatatcatccaacaagccatagatgcaggcgaggttccaagctataacgcattcgtcaaggaatcaaagcaaaaaatgaacgcacggaaaaggcgcgcccaggaagaagcaaaagaagccgagatgagtcggaaggagctaggcctggacgaaggagttgactccctgaaagcagccatccaatctaggcaaaaagaccgccagaaagagatggataatttcttagcccagatggaagccaaatactgtaagagctccaaggggggcggcaagaaaagcgcactcaagaaggagaaaaaatag

SEQ ID NO: 185733 - DNA, 1029 bp, synthetic construct
  misc_feature 1..1029: note = Description of Artificial Sequence: Synthetic coding sequence
  source 1..1029: mol_type = other DNA
atgctggagaacagcctgtacagccccacctgggagggcagccagttctgggtgaccgttcagaggaccgaggccgccgagcggtgcgggttgcacgggtcctacgtgctgcgcgtcgaggctgaaaggctaacgctattgactgtcggcgcccagagccagatcttggagcccctcctttcatggccatacaccctgctgcgccggtacggccgggacaaggtcatgttttccttcgaggcagggcgcagatgtcctagtggccccgggacatttactttccagacagcacagggaaatgatattttccaagctgtagaaacagccatccaccgtcaaaaggctcagggaaaggctggtcagggccatgacgtcctgcgcgctgactctcacgaaggagaagtggcggaaggaaagttgcctagcccgcctggcccccaggaactgcttgactctcccccagcactgtatgcagagccactcgacagcctgagaattgccccctgcccctcgcaggactctctgtactctgatccccttgactcaacaagcgctcaggccggagagggcgtgcagagaaaaaagcccttatactgggacctctatgaacacgcccagcagcaactgctcaaggccaaactgactgatccaaaggaggatcctatttatgacgagcccgaaggtctggcaccagttccacctcagggtctgtacgacctgccaagggagcctaaagatgcctggtggtgtcaggccagagtgaaagaagaaggttacgaactaccctataatcctgcaactgacgattacgcggtccctccacctcgctctacaaaacccctcctggctcccaagccccaggggccagccttccccgagcctggaacagccaccggctcggggatcaaaagccataactctgcattgtactcacaagtgcaaaagagtggtgcctctggcagttgggattgtggcctttcaagagtgggtaccgataaaacaggcgtcaagtccgaaggctccacttag

SEQ ID NO: 185734 - DNA, 855 bp, synthetic construct
  misc_feature 1..855: note = Description of Artificial Sequence: Synthetic coding sequence
  source 1..855: mol_type = other DNA
atggagcccggcatgctgggcccccacaacctgccccaccacgagccaatcagttttggcatagaccagattctgtctggccctgaaacgcctggtggagggctcggtttagggagagggggacagggccatggagaaaacggcgccttcagtggaggctaccatggcgccagcgggtatggccctgccggctctctggctcctttacccggatctagtggcgttggaccaggcggagttattagagtcccagctcatagaccccttcctgttccccctccagctggaggtgcccccgctgtgccaggtccttctggcttaggcggtgccggtggtctcgcgggcctgactttcccctggatggatagcgggcgcaggttcgcgaaggaccgcctgacggccgctctctcacctttcagcggcacccggagaattggccacccctatcagaaccgcaccccccccaagcgtaagaagccaagaacttccttctctcgatcccaggttctcgagcttgagagacgatttcttcgccagaaatacttagcatctgccgaacgggccgctcttgcgaaggctttgcgcatgaccgatgcccaggtgaaaacctggttccagaaccgaagaacaaagtggaggcggcaaaccgccgaggaacgcgaggccgagcggcacagagccggacggctgctgctgcacctgcaacaggacgcgctgcctcgcccactgagacctccactaccacctgacccactgtgcctgcacaattcgtctctcttcgctctgcaaaatctgcagccttgggcggaggacaataaggttgcctctgtgtctggcctggccagcgtagtctag

SEQ ID NO: 185735 - DNA, 1239 bp, synthetic construct
  misc_feature 1..1239: note = Description of Artificial Sequence: Synthetic coding sequence
  source 1..1239: mol_type = other DNA
atgggcgacggcgccgtgaagcagggcttcctgtacctgcagcagcagcagacctttggcaaaaagtggagacggtttggggcctccctgtatgggggcagtgactgtgcgctggcgcgcttggagttgcaggaggggcctgaaaagcctagacgctgcgaggcagctcgtaaggtcatccgcctaagcgattgcctccgggtcgctgaggccggcggagaggcatcatcccctagggacaccagtgcgttttttctggaaactaaggaaaggctctatctgttggcggcccctgccgccgaacgaggggactgggttcaggccatatgtctgcttgcctttccgggtcagagaaaggagctgtcagggccagagggaaaacagagcaggccttgtatggaagaaaatgaattgtattcctcagcagtcaccgtgggcccccacaaagagtttgccgtcactatgcgccctactgaggcttctgagaggtgccatctgagaggaagttacacccttcgggctggagaatccgcgttggagctctggggtgggcccgaaccgggcacccagctctatgactggccatacaggtttctgaggagatttgggcgagataaggtgaccttctcattcgaagcgggccggcgttgcgtgagcggagagggaaacttcgagtttgagactaggcaaggcaatgagatcttcctggcccttgaggaggccatctcagcccagaaaaacgccgctcctgccaccccccagccacagccagcaaccatcccagcctccctcccccggccagattcgccttatagtagacctcatgattctctgccgccgcctagcccaaccactcctgtgcctgccccaagacccaggggccaggagggagaatacgccgtacccttcgatgccgtggccagatctctcggcaagaatttcagaggcatcctagccgtgcccccgcagttactagcggatccactctatgatagcatagaggagacactcccgccaaggccagaccacatctatgacgaaccagagggagtggccgcattgtcgttatacgactcgccccaggagcccagaggcgaagcctggcggcgccaggctaccgctgaccgggatccagctggtcttcagcacgtccaacctgctggccaggacttctccgcctccggttggcaaccaggtactgagtacgacaatgtcgtgttgaagaaggggcctaaatag

SEQ ID NO: 185736 - DNA, 777 bp, synthetic construct
  misc_feature 1..777: note = Description of Artificial Sequence: Synthetic coding sequence
  source 1..777: mol_type = other DNA
atgcggcccaccgaggccagcgagcggtgccacctgcggggcagctatacacttcgcgccggcgaatctgccctcgagttgtggggcggacccgagcctggaacccaactgtacgactggccatacaggtttctcagaagattcgggagagataaggtcacattctcttttgaggcaggacgcagatgtgtgtcaggggagggcaattttgagttcgagacccgccagggaaatgagattttcttggctctggaggaggccatttcagcccagaagaacgccgcccctgctacaccacaacctcagccagccaccatccccgcctcgctccctcgccctgactctccatattctaggcctcacgattcccttccgccacctagtcctacgaccccagtgcccgcccccagacccaggggccaggagggtgagtacgcagtaccgttcgacgcagtggcccgctccctcggcaagaacttcaggggaattctggctgtgccaccacaattgctggctgaccccctgtatgactcaatcgaggagactctgccacctcgccctgatcacatttacgacgagccggagggcgtagcagccttgagtctatacgattccccccaggagcccagaggagaggcttggcgccgacaggcaacagcagatagggatcccgccggcctgcaacatgtgcagcctgcaggacaggatttcagcgcctctgggtggcaacctggcacggagtatgataacgtcgtgctaaagaaaggccctaaatag

SEQ ID NO: 185737 - DNA, 993 bp, synthetic construct
  misc_feature 1..993: note = Description of Artificial Sequence: Synthetic coding sequence
  source 1..993: mol_type = other DNA
atggaccccctggagacccccatcaaggacggcatcctgtaccagcagcacgtgaaattcggcaaaaaatgttggcgcaaggtatgggccctgctctacgcaggcggtccctctggggttgctaggctcgaaagctgggaggtgcgcgatggcggactcggcgccgcaggggatcgctccgccggcccaggaaggcgcggcgagaggcgagtgatccggctggcggattgtgttagtgtgcttcccgcagacggggaatcttgcccgcgtgacacaggtgctttcctgctgaccacaaccgagcgctctcacctcttggctgctcagcatcgacaagcctggatgggaccgatctgccagctcgcatttccagggactggcgaggcctctagcggttcaaccgacgcccagagccctaagaggggcctagtccccatggaggaaaatagcatatactcctcatggcaggaagtgggggagttcccagtggttgtgcaaaggacagaggctgccactcggtgtcagctgaaggggcccgccttgcttgtcctagggccagatgcaatccaactccgcgaggccaaaggcacacaagcactttacagttggccctaccacttcctgcgcaagtttggtagtgacaaaatattattgggtactcccggcgtatccttactgatctgtaagggggagaggacagacgatgtgtctgggatcatactggacgaatcactgctgcgggcatattccgtgcccggtgccggcggacatagcagggtgcaggattctttaggtcctgtccttagggaaccaaccttccagggagaacggagtttccttaagacgagtatgcttagatccctgttatgttcatgctcatggagacaccctaggagccagccccggacacaggcctcttgcctgcagggctcagattgtcctgcaccacaccggaactcgactagtgccgcccacactctggggaccagttag

SEQ ID NO: 185738 - DNA, 1491 bp, synthetic construct
  misc_feature 1..1491: note = Description of Artificial Sequence: Synthetic coding sequence
  source 1..1491: mol_type = other DNA
atgacccggggcgcccggctgcggagcgacgcccgggcccagctgaaccagctgagtctcgatggaggtactgggagcgggcagaagggaaagtgcgaggaattccccagctcgctaagctccgtgtcgccaggtttagaagccgccgctctgctcctggctgtcactatggatcctctagagacccccatcaaggatgggatcctttatcagcagcatgtaaagtttgggaaaaaatgctggcgcaaggtttgggcactgttgtacgcaggggggcctagtggcgtggcaagactcgagtcctgggaagtgcgcgacggaggccttggcgctgccggggaccggtcagcaggacctggcaggaggggggagcggcgtgttatccggttggcagactgcgtgtctgtgctgccagcggatggggagtcttgcccacgcgataccggcgctttcctacttacgacgacggaacgctcccatctgctggcagcccagcaccggcaagcgtggatgggtcctatatgtcagttggcgttcccaggcacaggagaggcaagctcagggagtacagacgcgcagtcccctaaacggggattagtgccgatggaggagaattctatctattcttcatggcaggaagttggggagttcccagtagtggtccagaggacagaagctgctaccagatgccagttaaaggggcccgcccttctggtgcttggacccgacgctatacagttacgagaggccaagggaactcaagcactgtactcttggccgtaccactttctgaggaaattcgggtcagacaagggcgtcttctccttcgaggccggcaggcgctgccattcgggcgaagggctgttcgcattttcgacaccctgtgcacctgacctgtgtagggcggtcgctggggctattgctcgccaaagagagaggcttcccgaattgacccgtccacaaccctgtccactgccccgcgcaacctcgctgccctctctcgacacgcccggggaactgagggaaatgcctcctggcccagaacccccaacatctcgtaaaatgcatctggccgagccgggccctcaaagcctgcccctgctactgggcccagaacctaatgatcttgccagcggtctgtacgcttcagtttgcaaacgggcctcaggcccaccaggtaatgaacacctgtacgagaacctatgtgttctggaagcgagccccacattgcatggaggagagcccgaaccgcatgaggggccaggaagtagaagccctacaacctctccgatctaccataacggtcaggacctctcttggccaggccccgccaacgactccaccttagaagcccagtaccggagactgctcgagctcgatcaggtggaggggaccggacgccccgacccgcaggccgggttcaaagctaaactcgtaacactgttgtcacgggagaggcgtaaaggtccggccccttgtgacaggccgtag

SEQ ID NO: 185739 - DNA, 687 bp, synthetic construct
  misc_feature 1..687: note = Description of Artificial Sequence: Synthetic coding sequence
  source 1..687: mol_type = other DNA
atggaccccctggagacccccatcaaggacggcatcctgtaccagcaacatgtgaaattcgggaagggcactggcgaagcctcatcgggctccactgatgcccaatctcccaaacgcggccttgtccctatggaggagaacagtatttactcctcgtggcaggaggtgggcgagttccccgtcgtggttcagagaacagaagctgccacccgctgtcagctaaagggcccagctctgttggttctcggtcctgatgcgatccagctgagggaggcgaagggtacacaagccctctattcatggccctaccacttcttacgcaaattcgggtccgacaaaatcctgctgggaacgcccggagtatctctactgatctgcaaaggggagaggacggacgacgttagcggcattatattagacgaaagcttgttgcgcgcctacagcgtgcctggcgctgggggccatagtagagttcaggacagcttaggacctgtcctgcgggagcccacattccagggagagcgatcattcttgaagacttccatgcttcgaagcttattgtgttcctgcagctggcgccatcccaggagtcagcccagaactcaggcctcttgtttacaggggtctgactgccccgctccccacaggaattccacatcagcagcccacactttgggaacctcgtag

SEQ ID NO: 185740 - DNA, 435 bp, synthetic construct
  misc_feature 1..435: note = Description of Artificial Sequence: Synthetic coding sequence
  source 1..435: mol_type = other DNA
atggaccccctggagacccccatcaaggacggcatcctgtaccagcagcatgtgaagtttggaaagaagtgctggaggaaagtgtgggccttgttgtacgcaggaggcccttccggggtggctagacttgagtcctgggaggtgagagacggaggactcggggctgccggggacagatcagccgggcccggtcggcggggtgaacgaagggtaatcagactggccgattgtgtttctgtgctcccggcagatggggagtcttgcccacgagacacaggcgcatttttactgaccaccacggaacgctctcatcttttggctgctcaacatcgtcaggcatggatgggccccatttgccagctggcatttcccggcaccggggaggcctcgagtggttctacggacgcgcaaagtccgaagaggggtctggtgtag

SEQ ID NO: 185741 - DNA, 471 bp, synthetic construct
  misc_feature 1..471: note = Description of Artificial Sequence: Synthetic coding sequence
  source 1..471: mol_type = other DNA
atggaccccctggagacccccatcaaggacggcatcctgtaccagcagcatgtcaagtttggaaagaaatgctggcgaaaggtgtgggccttgctttatgccggaggtccgtcaggggtggcgcgcctagaaagttgggaagtaagggacgggggtttaggagccgctggcgataggtcagctggacccggtcgccgaggagagcgtagagtgattagattggccgattgtgtctccgtgctccctgccgatggtgaatcatgtcccagagataccggcgctttcctactgactaccactgagaggagtcaccttctggcagcccagcatcgccaagcatggatgggtcccatatgccaactggcatttcccggcacaggagaggcgtcctcagggagcacagacgcccagtctcccaaacgaggactggttcctatggaggaaaattcgatatactcctcttggcagtag

SEQ ID NO: 185742 - DNA, 132 bp, synthetic construct
  misc_feature 1..132: note = Description of Artificial Sequence: Synthetic coding sequence
  source 1..132: mol_type = other DNA
atggaccccctggagacccccatcaaggacggcatcctgtaccagcaacacgtgaagttcgggaaaaaatgctggcgcaaggtgtgggccctcctgtatgccggtggaccgtccggagtagctcgcctttag

SEQ ID NO: 185743 - DNA, 642 bp, synthetic construct
  misc_feature 1..642: note = Description of Artificial Sequence: Synthetic coding sequence
  source 1..642: mol_type = other DNA
atggaccccctggagacccccatcaaggacggcatcctgtaccagcaacatgtcaagtttggaaagaagtgctggaggaaggtgtgggcacttctatatgctggtggtccttcaggtgtggcacgcttggaaagctgggaagtacgggacgggggtctgggagctgcaggggatcgatcagccggccctggccgccggggcgagcgtagagttatccgcttagccgactgcgtgtccgttctgcccgccgacggagagtcgtgtccccgggataccggagccttcctgctcactactacagagagaagccacctcctagccgcccagcatcggcaggcatggatggggccaatttgccagctggctttccctgggaccggagaggcatctagcggttctacggatgctcagagcccaaagcgggggctcgttcctatggaagaaaatagtatctattcatcttggcaggaagtgggagagtttccagtggttgtccagcggacagaggcggctaccaggtgtcagctcaagggacctgctctgctggtgctaggcccagacgccattcaattacgggaggcgaagggaacacaggccctgtacagctggccataccatttcctccgtaagttcggctcatag

SEQ ID NO: 185744 - DNA, 42 bp, synthetic construct; identical to SEQ ID NO: 79550
  misc_feature 1..42: note = Description of Artificial Sequence: Synthetic coding sequence
  source 1..42: mol_type = other DNA

SEQ ID NO: 185745 - DNA, 258 bp, synthetic construct
  misc_feature 1..258: note = Description of Artificial Sequence: Synthetic coding sequence
  source 1..258: mol_type = other DNA
atggaccccctggagacccccatcaaggacggcatcctgtaccagcagcacgtgaagtttggcaaaaagtgttggcggaaggtatgggccctgctatatgcggggggcccatccggtgtggctagactggaatcgtgggaggtgcgagacggagggctgggggcagctggggatcggtccgcaggccctggcagacggggggagcggagagtgatcaggctcgctgactgtgtcagtgtcttgccggcggacggctag

SEQ ID NO: 185746 - DNA, 981 bp, synthetic construct
  misc_feature 1..981: note = Description of Artificial Sequence: Synthetic coding sequence
  source 1..981: mol_type = other DNA
atggccaccaacttcagcgacatcgtgaagcagggctacgtgaagatgaagtcgcggaagttaggcatctaccggaggtgttggctcgtctttaggaagagttccagcaaaggaccccagaggctagagaaataccctgatgagaagtccgtttgtctacgcggctgccccaaggtgactgaaatcagcaacgtgaagtgcgtgacacggcttccgaaggagacaaagaggcaggccgttgcaattatctttactgacgactccgctcggactttcacttgtgacagtgaactagaggcggaggagtggtacaaaacattatcagtagaatgcttaggcagcagacttaatgacatttctctcggcgagcccgatttgctcgctcccggagtacaatgcgagcaaaccgaccggtttaacgtgttccttctgccctgccctaacttggatgtctacggggagtgtaaactgcagatcacccatgagaatatctatctgtgggatatccacaaccctagggtgaagcttgtcagctggcctctttgcagcctcaggcgctacggcagagatgccacacggtttacatttgaggccggccgcatgtgtgatgccggagagggactgtacactttccaaacccaggaaggcgaacaaatctatcagcgggtccactctgccactctagcaatcgctgagcaacacaaacgggtcctgttggagatggagaagaacgtgcggctgctcaacaagggtaccgaacactactcctacccctgcacacccacgacaatgttaccacgttccgcttattggcaccacattacagggtcccagaacattgctgaggcctcctcatacgccggggagggctacggggccgctcaggcttccagcgagacagacttattgaaccgcttcatcctgctgaagcctaagcctagtcagggggattcttcggaggctaagacccctagccagtag

SEQ ID NO: 185747 - DNA, 921 bp, synthetic construct
  misc_feature 1..921: note = Description of Artificial Sequence: Synthetic coding sequence
  source 1..921: mol_type = other DNA
atggccagcaacttcaacgacatcgtgaagcagggctacgtgcggataaggtcccgccggctcggtatctaccaaagatgttggctcgtcttcaaaaaggcttcttctaaagggccaaaacggcttgagaagttcagtgacgagagagctgcctattttcggtgctaccacaaagtgaccgagctcaataacgtgaagaacgtggccagattgccaaaatcaacaaagaaacacgccattggaatatacttcaatgatgatacttccaaaacattcgcatgcgagtccgacctggaagccgacgaatggtgtaaagtgttgcagatggaatgcgtgggaactcggataaatgacattagtttgggcgaaccagatcttcttgccacaggtgtggagagggagcagtcagagcgctttaatgtctatctaatgcctagccccaacctcgacgtgcatggcgagtgcgcattacagatcacgtacgaatatatatgcctgtgggacgtgcagaaccctcgcgtgaagctgatcagttggccgctgagcgcattgcggagatatgggagagatactacatggttcacctttgaggctggtcggatgtgtgagacaggagaagggctgttcatattccagacacgtgatggggaagctatctaccagaaggtgcattccgccgccctggctattgctgaacagcacgagaggcttttgcagtccgtaaagaattcaatgctgcagatgaaaatgagtgagagggctgcctcactttccactatggtgccattgccaagaagcgcctattggcaacatattacaagacagcactccactggccagctctatcggctgcaggatgtgagctctcccttaaaattgcacaggacagaaacttttccagcataccgttcagaacactag

SEQ ID NO: 185748 - DNA, 1515 bp, synthetic construct
  misc_feature 1..1515: note = Description of Artificial Sequence: Synthetic coding sequence
  source 1..1515: mol_type = other DNA
atgaccgaggccgccctggtggagggccaggtgaagctgcgggacgggaagaaatggaaatcccggtggttagtcctgcgaaagccttctcctgtcgccgattgtttgctcatgcttgtttataaggacaagtcagagcgcattaaagggctacgcgaacgcagcagcctgacactcgaggatatctgcggcctagagcccggcctgccgtatgagggcttggtacacactctggccatcgtgtgtctgtcccaggccatcatgctgggcttcgactcacacgaggccatgtgtgcttgggatgctagaatcagatatgcattgggggaagtccataggttccatgtcaccgttgcaccggggacgaagctggaatcagggcctgctaccctacacttatgcaatgacgtgttggtcctagcaagagacatccccccagccgtgacgggccagtggaagttgtcagatctgaggcggtatggggccgttccctcggggtttatttttgagggcggtacccggtgcggatactgggccggagtttttttcctgtcatcggcagaaggagagcaaatatctttcctctttgattgtatcgtgcgaggtatctctcccactaagggtccctttgggcttcgccctgtactccctgaccccagcccaccaggtccttcaaccgttgaggagcgcgtcgcccaggaagccctggaaaccctacagctcgagaagcgactatccctcttgtcacacgccggccggcctggaagcggcggcgatgacagatcactgtcttctagcagctcagaagcctcacacttggatgtcagtgcctccagtcgcctgactgcttggcctgagcagtcttcaagttctgcttcaacatctcaagaggggccccgtcccgcggccgcccaggctgccggtgaggctatggtgggggcaagtcggccccctccaaaaccactgaggcctcgtcagctccaagaagtcggcagacaatctagttccgatagcggtatagcgacaggatcccacagctcttattcctctagtcttagctcttacgccggcagttccctggacgtgtggcgggcaacagatgagctgggctccctgctttcactgccggctgccggggcccccgagcccagcctgtgcacctgcttacccggaaccgtggagtaccaggtgcctacctctttaagggcacattatgatacacccagaagcctctgtctcgctcccagggaccattctcccccttcccaagggtccccaggaaacagtgctgcgcgggatagcggggggcagacgtccgccggatgcccgtctggctggctgggcaccaggaggaggggcctggtaatggaggctcctcaaggctccgaggccacccttccaggcccagccccaggcgaaccttgggaagcgggaggcccacacgcgggtccaccccctgcatttttttccgcctgtcctgtgtgtggtggcttaaaagttaacccacccccctag

SEQ ID NO: 185749 - DNA, 1827 bp, synthetic construct
  misc_feature 1..1827: note = Description of Artificial Sequence: Synthetic coding sequence
  source 1..1827: mol_type = other DNA
atgaccgaggccgccctggtggagggccaggtgaagctgcgggacggcaagaagtggaaatcgcgatggcttgtgctgagaaagcctagtccagttgccgattgcctgctgatgttggtttacaaagacaagagtgagaggattaagggcctgagggagcggtcttccttaacactagaagacatctgtggcctggaacccggtcttccatatgaagggctcgtacataccttggcaatcgtctgtctctcccaagccatcatgctgggttttgactcacacgaggctatgtgtgcatgggatgcacgcatcagatatgcactgggtgaagtccatcgcttccacgtcaccgttgcgcctgggacaaaacttgagtctggtcccgccactctgcacctgtgtaacgacgtgctcgtgctcgcacgcgacataccgcccgctgtgactggccagtggaagctctctgacttgcgtagatacggagccgtgccatcaggctttatcttcgagggaggaacacggtgtgggtactgggctggggtcttcttcttgagcagtgccgagggagagcaaatttcttttctcttcgattgcatcgttcggggaatttctcccacgaaggggccatttggactgcgaccggtactccccgacccgagtcccccaggaccaagtaccgtggaggagagagttgcgcaggaggccctggagaccctccagttggagaaacggcttagcctgctttcacatgcaggccgccctggctcaggaggtgacgaccgaagcctctcgtcatcctcatcagaggcctcacacttggatgtgagtgcctcttcccgcctgactgcctggcctgaacagtcctcttcatccgcatccacgagccaggaggggccaaggccagccgccgcccaggcggcaggggaggctatggtgggcgcttctcgaccaccccctaagcccttgcgacctaggcaactccaggaggtgggacgtcaatcaagttccgatagtgggattgccacagggtctcacagcagctattcttcctccctcagctcctacgctggaagtagtctcgatgtgtggcgggctaccgacgagctagggagcctcctgagcctgccagccgccggagccccggagccttcactgtgcacctgcctgccaggcactgttgagtatcaggtgccaaccagcctgagggcacattatgatacacccaggtctctctgtctcgctccccgggatcacagcccaccttctcaggggagtcctggcaattcagctgcacgggacagcggcggccaaaccagcgcaggatgtccttctggttggctcggcactcgccgtcggggcctggtaatggaggcgccgcaggggtccgaggcgacacttcctggtcctgcccctggagagccatgggaagccgggggtccccacgccggcccgccacctgcattctttagtgcgtgccctgtttgcggaggactgaaaggcgctgcagccagcgccccaggaccagccacagcccactccggatccccaggccctgtggcagtggattcgcctggaccagaacggcccagaggcgagtcacctacttacgttaacatacccgtcagtcctagcagcagaaagcagctgcactacatggggttggaactgcaggaagcgtccgagggagtcagaggtgccggggcttctctctatgctcagatcgatataatggccaccgaaactgcccatcgggtgggggtcaggcacgcacgagcaagggaggaacagctttctgaactagagcagcgcaaagcagctccacagtag

SEQ ID NO: 185750 - DNA, 768 bp, synthetic construct
  misc_feature 1..768: note = Description of Artificial Sequence: Synthetic coding sequence
  source 1..768: mol_type = other DNA
atgaccgaggccgccctggtggagggccaggtgaagctgcgggacggcaagaagtggaagagccggtggttagttctccggaagcccagcccagttgcagactgtctgctgatgctggtctacaaagacaaatccgaaagaatcaaaggtctgcgagagcgaagtagtcttacactggaggacatttgcggattggaaccaggcctgccttacgaaggattagtacatacattagcaatcgtgtgcctgagccaggctatcatgttgggatttgactcccacgaggcaatgtgcgcttgggacgctagaatcagatatgccctgggagaagtacaccgattccacgttacagtggcccccggcactaagctggagagtggtccggccacgctgcatctgtgtaatgatgttctcgtcctggcgagagatataccccctgccgttaccgggcagtggaagttgtccgaccttagacgttacggagctgtcccgtctggcttcattttcgaggggggaacaagggggtggaggctgttacccgtcctgggaagaggcggagccgaccagttaccagtgcgcctgcaccggcctagacacctgccccaccagggtcccctatgggccgccgcaggaagcacccggcccaagtcccccggaacgttggattgtggcggcgcctgtggtcctggatcccccggcaaccccactgccggcgaggccgcagagccgccactgacatgtggacaggcggggcagtggaggggctag

SEQ ID NO: 185751 - DNA, 1371 bp, synthetic construct
  misc_feature 1..1371: note = Description of Artificial Sequence: Synthetic coding sequence
  source 1..1371: mol_type = other DNA
atgggctacttccggtgcgcccgggccggcagcttcggccggcggcggaagatggagccgtctacagccgcccgcgcctgggcactattctggctcctgctgcccctccttggcgccgtgtgcgcctctggtccaagaaccctcgtgttactcgacaatttgaacgtcagggaaacccacagtttattttttcggagtcttaaagaccgggggtttgagcttacattcaaaacggccgatgacccgagtctgagcttgataaaatatggggagttcctctacgacaatctgatcatcttttccccctccgtcgaggatttcggcggaaatattaatgtggaaacaatctccgcgtttattgatggaggagggagtgtgttagtcgctgcatcaagcgatatcggggatcctctgcgcgagctgggaagcgaatgcgggatcgaattcgatgaggaaaaaaccgccgtgattgaccaccacaattatgacattagcgacctgggacaacataccctgattgttgccgataccgaaaacctgttgaaggctccaacgattgtgggcaagtcttctctcaaccctatcctgttccgaggtgtgggaatggttgccgatcctgataatccactggttctggatattctgacaggatccagcacatcttactcttttttccccgacaagcccatcactcaataccctcacgctgtgggcaaaaataccttactgattgcaggcttacaggctcgaaacaatgcacgtgtcatattttccggctctctcgactttttcagcgacagtttttttaatagtgcggttcagaaagccgctccgggaagtcaacgttattctcaaactggcaactacgaactggctgtggccctgtccaggtgggtgttcaaagaggaaggcgtgcttagagttggtccagtgtcccaccaccgtgtgggcgaaacagccccaccgaacgcctacacagtcaccgacctagtggaatacagtatcgttatacaacagttatccaacggtaaatgggtcccgtttgacggcgatgacatccaactcgaattcgttaggatcgaccccttcgtgcggacattcttaaagaaaaaagggggcaagtactctgtgcagtttaaactcccagatgtatacggagtgttccagtttaaggtggactataatcggctgggatacacgcacctgtatagctcaacacaggttagcgtgagacctctgcagcatacacagtacgaaagattcataccaagcgcctacccctattacgcttcggctttttcaatgatgttgggtctctttatcttttctattgtcttcctccatatgaaagaaaaggagaaatctgattag

SEQ ID NO: 185752 - DNA, 1260 bp, synthetic construct
  misc_feature 1..1260: note = Description of Artificial Sequence: Synthetic coding sequence
  source 1..1260: mol_type = other DNA
atgggctacttccggtgcgcccgggccggcagcttcggccggcggagaaaaatggagccatcaactgcagctcgagcctgggccctcttctggctactactgccgttattgggcgcagtgtgtgcctccggccccagaaccctagtcttgctggacaacctgaacgtaagagaaacgcattccctgtttttcaggtccctgaaagactttggaggaaatataaatgtggaaactataagcgcctttattgacggaggcggcagtgtcctggtggcagctagcagtgatatcggcgatccattacgcgagctgggctcagagtgcggcatagagtttgacgaagaaaagactgccgtgattgaccaccataattacgacatttccgacctgggccagcatacactgattgtggcagacaccgagaatctgctgaaggctcctactatcgttggtaaaagctcattgaaccccatcttgtttcgtggcgtgggcatggtggcagacccggataatcctctggtgcttgacatcttaaccggaagcagcactagttactcctttttcccagacaagcccattacacaatatccccatgctgtgggcaagaatactctcctgatagcaggtcttcaagcacgcaacaatgctcgggttattttcagtggatccctagacttctttagtgattccttctttaacagtgcggtccagaaggccgctcctggttcccagcgatatagtcaaactggaaactacgaactggctgttgctctaagtcgctgggtatttaaggaagagggggtgcttagagtgggtccagtgtcccaccaccgtgtgggggagactgccccgcctaatgcctacacagttaccgatctggtggaatattcaattgtaatacagcaattgtcaaatggcaaatgggtacctttcgacggggacgacatacagctggaatttgtcaggattgatccttttgtccggacgtttctaaagaagaaaggaggtaaatacagcgtccagtttaagttgcccgatgtgtatggcgtctttcagttcaaggtcgactataaccgtctcggctatacacacctgtattccagcacacaggtgtccgttaggcctttgcaacacactcaatatgagaggttcatcccatccgcctacccctattacgcttcagctttctctatgatgctgggtctgttcattttttcaatagtgttcctgcatatgaaagagaaggaaaagtctgactag

SEQ ID NO: 185753 - DNA, 279 bp, synthetic construct
  misc_feature 1..279: note = Description of Artificial Sequence: Synthetic coding sequence
  source 1..279: mol_type = other DNA
atgaccaagctggcccagtggctgtggggcctggccatcctgggctctacatgggtggcattaaccacaggggcccttggccttgagctccccctgtcctgccaggaggtgctgtggcccctgcctgcctatttactggttagcgccgggtgttatgctttggggacggtggggtatagggtagctacatttcacgattgtgaggacgctgccagagaactccagagtcagatccaggaggcccgcgcggatttagccaggagaggtctgcggttttag

SEQ ID NO: 185754 - DNA, 369 bp, synthetic construct
  misc_feature 1..369: note = Description of Artificial Sequence: Synthetic coding sequence
  source 1..369: mol_type = other DNA
atgctgagcgtgggcggcctgcggctgagcctggtgcggttcagcttcctcttgctccgtggggcattgcttcctagccttgcagtgaccatgactaagttggcacagtggctgtggggactcgcaattcttggcagtacatgggtagcactcaccacaggcgccctgggtctcgagctgcccctctcctgccaggaggttctttggccattgcctgcctacctcttagtttccgccggctgctatgcacttggcactgttggatatcgagtggccacttttcacgactgtgaggacgccgcacgagagctgcaatcacagatacaggaagccagagctgacctggcccgtcggggcctccggttctag

SEQ ID NO: 185755 - DNA, 279 bp, synthetic construct
  misc_feature 1..279: note = Description of Artificial Sequence: Synthetic coding sequence
  source 1..279: mol_type = other DNA
atgaccaagctggcccagtggctgtggggcctggccatcctgggctccacttgggtcgccttaactaccggagccctcggactggagcttcctctgtcttgccaggaagttctgtggcccctccctgcatacctgctcgtctccgcaggctgctacgcactggggacagtgggatatcgagtggccacatttcacgattgtgaggacgctgccagggagttgcagagccagattcaagaagcaagggcggatctggctcgccggggcctgcgcttttag

SEQ ID NO: 185756 - DNA, 1191 bp, synthetic construct
  misc_feature 1..1191: note = Description of Artificial Sequence: Synthetic coding sequence
  source 1..1191: mol_type = other DNA
atggacccccggggcaccaagcggggcgccgagaagaccgaggtggccgagcccagaaacaagctcccgcggcccgcgccttccttaccaaccgatcccgcgttgtacagtggacccttcccattttacaggcgaccctccgagctgggctgtttttctcttgacgcacagcggcagtaccatggagacgcacgcgccctgcgctactattcgcctccaccaaccaacggccctggccccaattttgatttacgggacgggtaccccgacagataccagcccagagatgaagaagttcaggaaaggctggatcacttactgtgctggctcttagagcaccgagggcgcctggaaggaggacccgggtggctcgcagaggcaatcgtgacctggcgcggccatctgaccaagctcttgaccacaccttacgagcggcaggaaggatggcagctggccgcctcacggttccagggtactctgtatctctcggaggtagagactccgaacgcaagagcccagcgcctggctcgcccacctttgctgagggagcttatgtacatgggatacaaattcgagcagtatatgtgcgcggataaacccgggtcctctcccgacccatcaggggaggtgaatactaacgtcgcattctgttccgttctgcgcagccgcttggggtcacatcctcttctctttagtggcgaagtggactgcaccgatccccaggcaccctccacccaacccccaacatgttacgtagaactgaagacatcaaaggagatgcattcccctggacaatggagaagcttctacaggcacaagttactgaaatggtgggctcagtccttcttacctggagtccctaatgtagtggcaggctttcggaatcccgacggcttcgtaagttccctcaagacttttccaaccatgaaaatgtttgagtatgttaggaacgacagagacggatggaacccaagtgtgtgcatgaacttctgcgctgctttcctctcattcgcgcaaagtacagtggtgcaggatgacccgaggctcgtgcatctgttctcttgggagcccggcgggcccgtcacggtgagcgtgcaccaggatgctccttacgctttcctgcccatatggtacgttgaggcgatgacgcaagatctgccaagccccccgaaaacacctagtcccaaatag

SEQ ID NO: 185757 - DNA, 1191 bp, synthetic construct
  misc_feature 1..1191: note = Description of Artificial Sequence: Synthetic coding sequence
  source 1..1191: mol_type = other DNA
atggacccccggggcaccaagcggggcgccgagaagaccgaggtggccgagcctagaaacaagctgccccgtcccgccccttccctcccaaccgatccagccctgtatagtggccctttccccttctacagacggcccagcgaactgggctgcttttcactggacgcccagagacagtatcatggagatgcccgagctcttaggtattattcgccaccccccaccaacggaccaggtccgaactttgacctgcgcgacggttatcccgaccggtaccagcctcgagatgaagaggtgcaagaacgtctggaccacttgctgtgctggctgctggaacatcgtggacgcttagaaggaggtccaggatggctagctgaagctatagtcacgtggcgtggtcacttgactaaattattgacaacaccatacgagcgccaggagggatggcagttggcagcctcacggtttcagggaacattatatttgtctgaggtggaaacccccaatgctcgggcccagcgtctggccaggcctcctttattgcgagaactaatgtacatgggttataagtttgaacagtatatgtgtgcggacaaaccgggttcctcaccagatccgagtggtgaggtgaacaccaatgtggcgttttgttccgtactgcgaagcagactggggtcgcacccgttgctcttttctggtgaagtggattgtacagaccctcaggctccctccacacagccacctacatgttatgtcgaactgaagacttccaaggagatgcactctcccggtcagtggaggtcattctatcggcataagctattaaagtggtgggcacagtctttcctgcctggggtgccaaatgtagtggccggttttcggaatccagatgggttcgtaagttctcttaaaactttccctacaatgaaaatgtttgaatatgttcggaatgacagagatggctggaatccctccgtgtgcatgaatttctgcgcggcctttctcagtttcgctcagtccactgtcgtgcaagacgaccctcggctggtgcatcttttctcttgggagccagggggaccagtcaccgtctctgtccaccaggatgctccgtacgcttttttaccaatctggtacgtggaagcaatgacacaggacctgccctctcctcccaaaacaccctcacccaaatag

SEQ ID NO: 185758 - DNA, 1191 bp, synthetic construct
  misc_feature 1..1191: note = Description of Artificial Sequence: Synthetic coding sequence
  source 1..1191: mol_type = other DNA
atggacccccggggcaccaagcggggcgccgagaagaccgaggtggctgagcccaggaacaagcttccccgccctgcaccctcactgcccactgatccggccctgtactccggacctttcccattttaccggaggccttcagagctgggttgttttagcctggacgcccagcggcagtaccatggtgacgctcgggccctcagatattacagcccacctcccaccaacggcccaggcccaaattttgatcttcgggatggctacccagacagataccagcctagggacgaggaagtgcaggaacggctggaccacctgctgtgttggctcctggaacaccgcggccgcttggaggggggtcccggttggctggccgaagctattgtgacgtggagaggccacctcacaaagctgctcacgactccctatgaacggcaggagggctggcagttggcggcaagccgattccagggcacattatatctctccgaggttgaaacccccaatgcacgcgcccagcgacttgcgcggccacccctcctgcgcgaactgatgtatatgggatataagtttgagcagtatatgtgcgctgacaaaccagggagctctcccgacccttcaggggaggttaataccaatgttgctttctgcagtgtgctcagatctagactgggcagccatcctctcctgttctctggcgaggtggattgcactgaccctcaagctccctcgacccagcccccaacttgctacgtcgaactcaagacttccaaggagatgcactcacccggccagtggcggtcattttataggcataagcttctgaagtggtgggcccagtcattcctgcctggcgtccccaatgtagttgccgggtttcgcaacccagatggcttcgtgtcctctttaaaaacatttccaactatgaagatgtttgaatatgtcaggaatgacagagacggatggaacccgagtgtgtgcatgaacttctgtgctgcttttttatcttttgcacaaagcaccgtagttcaagacgacccgcggctagttcacttattcagttgggagcctgggggccccgtgactgtctccgtacaccaggatgctccatatgcattcttacccatttggtatgttgaggcaatgacccaggacctgcccagcccaccaaagactcctagccccaagtag

SEQ ID NO: 185759 - DNA, 1191 bp, synthetic construct
  misc_feature 1..1191: note = Description of Artificial Sequence: Synthetic coding sequence
  source 1..1191: mol_type = other DNA
atggacccccggggcaccaagcggggcgccgagaagaccgaggtggctgaaccacgtaataagctaccccgtccagctcccagtttgccgaccgaccccgctctgtattccggaccctttccattttaccgccgtccaagtgagctggggtgtttcagcctggatgcccaaagacagtatcacggagatgcccgggcattgaggtactattcacccccacccacaaacgggcccggacccaatttcgatctacgcgacggttacccggatagataccaaccccgggacgaggaggtgcaggagcggctcgaccacctcctttgttggttgcttgaacatcgcggccgcctggaagggggccccgggtggcttgcagaagcaatcgtgacttggcgggggcacctgaccaagctgctgaccacgccttatgaacgccaggagggatggcaactggctgccagtaggtttcaggggactctgtacttgtctgaagtcgaaacccccaatgcccgcgcccagaggcttgcaagacccccgcttctgagagagcttatgtacatgggctataagttcgagcaatacatgtgcgccgataagccgggatcctcacccgatcctagcggggaagtgaacaccaatgtggccttttgttccgtactgcgctctcggttgggttcccacccattgcttttttcgggagaagtggattgcacggatccacaggccccctcaacacagcccccaacatgctatgtggaactaaagacgtctaaagagatgcattcacctggacagtggcgatctttttaccggcacaagttgctgaaatggtgggctcagtcttttcttcctggggtgcctaacgtagtggccggattccgcaatcctgacggttttgtcagctctctcaagacttttccaactatgaaaatgttcgaatacgtcaggaacgatcgtgacggctggaatcccagtgtttgtatgaacttctgcgccgcttttctgagttttgctcagtctaccgtggtccaggatgaccctagactggtgcacttgttctcttgggagcctggcggaccagtcactgttagcgttcaccaggatgccccttatgcgttcctacctatatggtacgtagaggccatgacgcaagacctcccatctcccccaaagactccgagccccaagtag

SEQ ID NO: 185760 - DNA, 1191 bp, synthetic construct
  misc_feature 1..1191: note = Description of Artificial Sequence: Synthetic coding sequence
  source 1..1191: mol_type = other DNA
atggacccccggggcaccaagcggggcgccgagaagaccgaggtggccgagcctcgcaacaagctgccccgtcctgccccctccctcccaacagaccctgcactgtacagcgggccgttcccgttctatagacggccttcagagctggggtgtttcagcttggacgctcagcggcagtatcacggggatgcccgcgccctgcgatactacagccccccccccaccaatggcccgggccctaactttgacctacgggatggctaccctgaccgatatcagccacgtgatgaggaggtgcaggagcggcttgatcacttattgtgttggttgttggagcataggggcagactagagggcggacctggctggctggctgaagctattgtgacctggagggggcacttaacaaagcttctcaccacaccctatgaacgtcaggaagggtggcagctggcggccagccgattccagggcacactctacctgtccgaagttgagacgcctaatgcacgagcgcaacgcctggctaggcccccgctgctccgcgagttgatgtacatgggctataagttcgagcaatacatgtgtgctgataaacctggcagttctcccgacccatctggggaggtcaatacaaatgttgcgttctgcagtgtactgcggagtcgtctgggatcccaccccttactgttcagcggggaagtcgactgtacggatccgcaggcacccagtactcaaccccctacttgttatgtcgagctgaaaaccagcaaagagatgcactcccctgggcagtggcggtctttctatcgccacaagctcctgaaatggtgggcccagagtttcctccctggagttcccaacgtggttgctggcttcagaaaccctgacggtttcgtatcttcacttaagaccttccccaccatgaagatgtttgagtacgtccgcaatgatagggacgggtggaatccatctgtgtgtatgaacttttgcgccgccttcctcagctttgcccagtcgaccgtggtacaggacgacccacgtctggtgcacctgttcagctgggaacccggcggcccagtcacagtgtccgtccatcaagatgccccctacgccttcctgcctatctggtatgttgaggccatgacccaggacctcccaagcccccctaagacaccatctccgaagtag

SEQ ID NO: 185761 - DNA, 1191 bp, synthetic construct
  misc_feature 1..1191: note = Description of Artificial Sequence: Synthetic coding sequence
  source 1..1191: mol_type = other DNA
atggacccccggggcaccaagcggggcgccgagaagaccgaggtggctgagccacggaacaaacttccaaggcccgctccctcccttcccactgatcccgctctgtatagtggaccctttccgttctaccgacggcctagcgagctggggtgtttctccttggatgcacagcgtcagtaccacggcgatgctcgcgcgctcagatactatagcccaccccctacaaatggacctggacccaatttcgatctcagagatggctatcccgaccggtatcaacctcgggatgaagaggtccaagagagattagatcacctgctctgttggctcctggaacacagaggcaggctcgaaggcggtccagggtggttggctgaggctatagtaacatggcgaggacacttgacgaagctgctcactactccttacgagcgacaagagggctggcaactggcagccagcaggttccagggaaccctgtatctgagcgaggtggagactcctaacgcaagagcccaacgactagcacgtccacccctccttcgggagctgatgtacatggggtataaattcgagcagtacatgtgcgcggataaaccgggaagctcccccgatccttccggggaagttaatactaatgtagccttttgtagtgtactgcgttctagactgggctctcatcccctgctgttttccggagaggtggattgcaccgatccacaggctccttcaacacagcctcccacatgctatgtcgaactgaaaacttctaaggaaatgcactccccaggtcaatggcgatccttttatcgccataaactgctcaaatggtgggctcaatcctttctgcctggcgtaccaaatgtcgtggccggattccgtaatcccgacgggttcgttagcagtctgaaaacattccccacaatgaaaatgtttgaatacgtacggaacgaccgggatggctggaatccctcagtgtgcatgaacttttgcgcggccttccttagcttcgcccagagtacagttgtccaggatgatcccaggctcgttcatcttttttcatgggaacctggcgggccggtgacagttagtgtgcaccaagatgctccttacgcattcctgccaatctggtacgttgaggccatgacccaggacctcccttcccccccgaagactccatctcctaaatag

SEQ ID NO: 185762 - DNA, 1191 bp, synthetic construct
  misc_feature 1..1191: note = Description of Artificial Sequence: Synthetic coding sequence
  source 1..1191: mol_type = other DNA
atggacccccggggcaccaagcggggcgccgagaagaccgaggtggctgaaccacgcaataagctgcctagacctgcccccagcctccctaccgatccagcactatactcaggcccattcccattctacagacggccttcagaactgggatgtttctcactggatgctcaacggcagtaccacggcgatgcaagagctctgaggtactactcccccccccccacaaatggaccaggtcccaattttgaccttcgtgatggatatcccgatcgttaccaaccccgggacgaagaggtgcaagaaaggcttgaccatctgttgtgctggctccttgagcatcgtgggagacttgagggtggaccaggttggctggccgaagcaatcgtgacctggagaggccatctgactaaactgctcaccacaccctatgagcgtcaagaaggctggcagttagcagcctcgcggttccagggcaccctgtacttatccgaggtagaaacccccaatgccagggcccagcggttagcgagacctccgctgttgcgggagctcatgtatatgggttataagttcgagcagtatatgtgtgccgacaagccagggtcatctcctgacccttctggagaagtgaataccaacgtagccttttgctcagtgctcagaagcagactggggagccaccctctcctcttctccggcgaagtggattgcacggacccacaggcgcccagcactcagcccccaacatgttatgtggagctgaaaacatctaaggaaatgcagtcacccggccagtggaggtccttttaccgtcataagttgctaaagtggtgggcccaatccttcctcccaggtgtccctaatgtagtggcgggattcaggaacccagatggcttcgtttcctcattgaaaacattccctacaatgaagatgttcgaatacgtgcgtaacgatcgggacggctggaatccaagtgtctgcatgaacttttgcgccgcgttcctaagctttgctcagtctactgttgtgcaggatgacccacgcctggtccatctgttctcctgggagccaggcgggccagtaactgtgtccgtacaccaggacgcaccttatgcttttctgccaatctggtacgtggaggcaatgacccaggacctgccgtctccccccaagacaccgtccccaaaatag

SEQ ID NO: 185763 - DNA, 1191 bp, synthetic construct
  misc_feature 1..1191: note = Description of Artificial Sequence: Synthetic coding sequence
  source 1..1191: mol_type = other DNA
atggacccccggggcaccaagcggggcgccgagaagaccgaggtggctgaaccaagaaataagctcccaaggcccgccccttccctgccgacggatcctgctctgtattccggtccctttccgttctatagacgcccttcagaactcggttgcttctcccttgacgctcagcgtcaataccacggggatgcacgggcgttgaggtactatagccctccaccaacaaacgggccaggacctaatttcgatctcagggatggttacccggatagatatcagcctagagatgaggaggtgcaggagcggctggatcatctcctttgttggctcctggagcatagggggcggcttgaaggtgggcctggttggctcgccgaggcaatagtgacctggcgcggccatctgaccaagctgctcactaccccatatgaacgtcaggagggctggcagctcgctgcttctcggtttcagggaacactttatctgagtgaagtcgagacacctaatgccagggcgcaacggcttgcccgacctcctctgttaagggaacttatgtacatggggtacaaattcgagcagtacatgtgcgcagataagcccggatcgtcaccagacccctccggtgaagttaacaccaacgtcgcattctgctcagtgctgagatcgaggctgggaagtcatccactcctctttagtggggaagtcgactgtactgaccctcaagccccatctacacagcccccgacctgttacgtggaactcaaaacctcaaaagagatgcactcacctggacagtggagatccttttaccgccacaagctgctcaaatggtgggcccagtcgttcctccccggcgtaccgaacgtggtggccggcttcagaaatccagacgggtttgtgagctccctgaagacatttcccacaatgaaaatgttcgagtacgtgcgcaacgaccgagatggatggaatccttccgtttgtatgaatttttgtgcagccttcttgtcattcgcacagtccacggttgtgcaggacgaccccaggctggtacacttgttcagctgggaacctgggggccccgtgaccgtttcagtgcatcaggatgctccttacgcttttctgccaatttggtatgtcgaggctatgactcaagatttgccttctccaccaaagacgcccagccctaagtag

SEQ ID NO: 185764 - DNA, 1191 bp, synthetic construct
  misc_feature 1..1191: note = Description of Artificial Sequence: Synthetic coding sequence
  source 1..1191: mol_type = other DNA
atggacccccggggcaccaagcggggcgccgagaagaccgaggtggcggagccgaggaacaagctcccccgaccagcaccgagccttccgactgatcccgccctgtacagtggacccttcccattttaccggcgtcccagcgagcttggttgcttctctttagatgcacagagacagtaccatggcgatgcccgcgctctccgctattattcccctccaccaaccaatggccctggcccgaatttcgatcttcgggatggctacccggaccggtaccagccgcgggacgaggaggttcaggagcggctagaccacctgctgtgttggttactggaacacaggggccggctcgagggaggtcccgggtggttggctgaggcgattgttacctggcggggacatctaaccaaactcctgacaacaccatatgagcggcaggaaggctggcaactagccgcaagcagatttcaaggaacgctgtacctgagcgaagtcgaaacacctaacgctagagcacagaggctggccagaccgcccttgctgagagaattgatgtatatgggctacaagttcgagcagtatatgtgcgccgacaaaccaggtagttcgcctgatccatccggcgaggtcaacacgaatgtggcattttgctcagtgctgaggagccgcctcggatcccatccattattattcagcggtgaggtggattgtaccgatcctcaagcccccagtacacaaccaccaacctgttacgtggaattgaagacctccaaagagatgcattcgcctggacagtggcgtagcttttacaggcataagctgttgaaatggtgggcccaatccttcctacccggggttccgaatgtcgtagctggttttcgcaatcctgacggctttgtgtctagcctgaaaacctttccaactatgaagatgtttgaatatgtcagaaacgatcgggatgggtggaaccccagcgtctgcatgaatttctgcgctgcctttctgtccttcgcccagtctacggtggtgcaggacgatccacgcctggtgcacttgttttcatgggagcctggcggccccgtgacagtgagcgtccatcaagacgcgccctatgctttcctccccatttggtacgtggaggcgatgacccaggatctcccctcacctccaaagacccccagcccaaaatag

SEQ ID NO: 185765 - DNA, 1191 bp, synthetic construct
  misc_feature 1..1191: note = Description of Artificial Sequence: Synthetic coding sequence
  source 1..1191: mol_type = other DNA
atggacccccggggcaccaagcggggcgccgagaagaccgaggtggccgagccacgtaataaactgccacggcccgctccctcgctccctaccgatcctgctctctacagcgggccttttcccttttatcgacgcccttctgagctagggtgcttctcactcgacgctcagcgccagtaccatggtgacgccagggctctaaggtattattccccacctccaactaacggcccaggcccaaatttcgacctgagagacgggtatccggatcggtaccagccccgagatgaggaagtgcaggagaggctagatcacctattatgctggttgttagaacataggggcaggttggaagggggacctggttggctggcagaggcgatagtgacatggcgcggccacctcaccaagttgctgacaaccccttatgaacgccaggagggttggcaactcgccgcctcaagatttcaaggcaccctgtacctatccgaggtggagactcctaatgcaagggcccagcggctggcccgaccccccctgctgagggaacttatgtacatgggttacaagttcgagcagtacatgtgcgccgataaacctggatcctctcccgacccttctggcgaggtcaatacaaacgtggccttttgttcagtactcagatcccgactgggcagccaccccctcctattcagcggggaagtggattgcacggaccctcaggctcccagcactcagccaccaacctgttacgtggagctgaaaacaagtaaggagatgcactcaccaggacagtggcggtctttctatcggcataagctgttgaagtggtgggctcaaagtttcctacccggagttcctaacgtggttgccgggttcagaaatccggacggctttgtctcgtcactgaagacttttcccactatgaagatgttcgaatatgtacgaaatgatagggacggatggaatcctagcgtatgtatgaacttttgcgccgcattcctctctttcgcccagagtaccgtggttcaagatgatcctcgccttgtgcacctgttttcttgggagcctggtggacctgtgactgtgtctgtccatcaggacgcaccgtacgctttcctgcccatttggtatgtggaagccatgacccaggacctgccctcccccccaaaaacaccttcacccaaatag

SEQ ID NO: 185766 - DNA, 1191 bp, synthetic construct
  misc_feature 1..1191: note = Description of Artificial Sequence: Synthetic coding sequence
  source 1..1191: mol_type = other DNA
atggacccccggggcaccaagcggggcgccgagaagaccgaggtggccgagccccggaataaactacccaggcccgcccctagcttacctaccgaccctgccctttacagcggcccgttccccttctaccgccggccgtccgaactgggatgtttctctctggatgcacagaggcagtatcatggcgatgctagagctctccgttattactctccaccccccaccaacggacctgggccgaacttcgatttgcgagacggataccccgaccggtatcagccccgagacgaggaagtccaggaaagactggaccacctgctgtgctggctgctcgagcacagagggaggctcgaagggggccccgggtggctcgccgaggccattgtgacctggcggggtcaccttactaagcttctgaccactccatatgagaggcaggagggttggcaactggccgcttcgaggttccaggggaccctgtacctttcagaagtggaaacccctaacgcacgcgcccagcggttggcacgaccaccactcttaagagagttgatgtacatgggttacaaatttgagcagtatatgtgcgcagataaacccggctcatccccggacccatctggcgaagttaacaccaatgtcgctttttgctcggttctcaggagcaggctcggcagccatccactccttttctccggagaggtagattgcaccgacccgcaggccccctccactcaaccccccacatgctatgtcgaactaaaaacgtcaaaagaaatgcactcccctggccagtggcggtctttttaccgacacaagcttctgaaatggtgggcgcaaagctttttacccggagtgccaaacgtggtagccggctttagaaaccccgacggcttcgtttcctcccttaagacttttccaaccatgaagatgttcgagtatgtgcggaacgatagagacgggtggaacccttcagtttgcatgaacttctgcgctgcctttctatcatttgcacaatcaactgtggtgcaagacgaccccagactggtgcacttgttctcttgggagccaggaggacccgtcaccgtcagcgtgcatcaggacgccccatacgcatttcttccaatttggtatgtggaggcgatgacgcaggacctgccctcgcctccaaaaaccccctctccaaaatag

SEQ ID NO: 185767 - DNA, 1191 bp, synthetic construct
  misc_feature 1..1191: note = Description of Artificial Sequence: Synthetic coding sequence
  source 1..1191: mol_type = other DNA
atggacccccggggcaccaagcggggcgccgagaagaccgaggtggcggagcccaggaataagctgcctaggcccgcaccttctctacctacagaccccgcattgtactctgggccatttcctttttatagacggccgtcagaactagggtgtttttctctcgatgcacaacggcagtaccatggggacgctagggccttgaggtattattcacctcccccaaccaatggccctgggccaaacttcgatctgagagacggatatcctgaccgctaccagccgcgcgacgaggaagtccaggagagactggatcacctcctgtgctggttgctcgaacacagaggcaggctcgagggaggccctggttggctggccgaggccattgtgacatggcggggacatttaactaagctgctcaccacaccatatgaaaggcaggaggggtggcagctagcggccagcaggttccaagggacactttatctgtcggaagtcgagacacctaacgcaagagcccagagactggccaggccgcccctactgcgcgaattgatgtatatggggtacaaatttgagcagtacatgtgcgcagacaaaccaggctccagcccagacccatcgggggaggtgaacacgaatgtcgccttctgttcagtattgagatctaggttgggcagtcaccctttgctctttagcggagaggtggattgtacagatccccaggcaccttcaactcagcccccgacatgttacgttgaactcaagacctccaaggagatgcagagccccggccagtggcggagcttttataggcacaagcttttgaaatggtgggctcagagctttctgcccggcgttcctaacgttgttgccggctttaggaatccggatggttttgtgtcgagcctgaaaacctttccaacaatgaaaatgttcgaatacgtacggaacgacagagacgggtggaacccctcggtgtgtatgaacttctgcgccgctttcctttcgttcgctcaatcaaccgtggtgcaggatgacccgcgcttagtgcatctgttttcttgggaacccggaggcccagtcaccgtatctgtccatcaggatgcaccctacgcctttctgcccatatggtacgtcgaagccatgacacaagatctgccctctcctcccaaaacaccttctccaaagtag

SEQ ID NO: 185768 - DNA, 1191 bp, synthetic construct
  misc_feature 1..1191: note = Description of Artificial Sequence: Synthetic coding sequence
  source 1..1191: mol_type = other DNA
atggacccccggggcaccaagcggggcgccgagaagaccgaggtggcagaaccccggaataaactccccaggccagctccctcccttcccacagacccggcactgtacagcgggcccttccctttctacaggaggccctccgaactggggtgctttagcctcgacgcccaaaggcagtatcatggagatgctcgcgctctgcgatactatagcccaccgccaacaaatggacctgggccaaacttcgatctgagagacgggtaccccgatcgctaccagcctcgcgatgaagaagtgcaggagaggttagatcacctgctttgttggctgctggagcataggggccggctggagggcggtcccggatggctggccgaggccattgtgacatggagaggccaccttactaagctcctcaccaccccctatgagcggcaagagggctggcaactggcggcaagcagatttcagggcaccctgtatctgagcgaggtggagactcctaacgcaagggcccagcgattggctcggccaccccttcttagggagctgatgtacatgggctataagtttgaacagtacatgtgcgctgataaacctggttcttctcctgatcccagcggggaggtcaatacgaacgtggccttctgctctgtcttgaggtctcggttgggcagccacccactgctcttctcgggcgaggtggactgtactgatccacaggcccctagtacacagcctccaacatgctacgtggagctgaaaacctcgaaggaaatgcactcaccaggccaatggaggtccttctaccgacacaaactattaaagtggtgggctcagtcatttctccctggggtgcccaatgtcgtagcagggttcaggaacccggatggattcgtgagctcgctgaagacatttcctaccatgaagatgtttgaatatgtcaggaatgatcgggatgggtggaacccgagcgtctgcatgaatttttgcgccgccttcttaagtttcgcacaatccacagtcgtccaggatgaccctcgtcttgttcacctcttctcttgggaaccggggggccctgtaactgtgagcgtacatcaagacgctccttatgcattcctcccaatctggtacgttgaggctatgacccaggacctgccctctccacccaagacaccatctcccaaatag

SEQ ID NO: 185769 - DNA, 1191 bp, synthetic construct
  misc_feature 1..1191: note = Description of Artificial Sequence: Synthetic coding sequence
  source 1..1191: mol_type = other DNA
atggacccccggggcaccaagcggggcgccgagaagaccgaggtggcagagcccagaaacaaactacccaggcctgcgccatccctgccgacagatcccgccctgtactccggaccctttccattttaccgccgccccagcgagctgggttgcttttccctggacgctcagaggcagtatcatggcgacgcccgagcgttacggtactattcccctcccccaaccaatgggccaggaccgaacttcgacctcagagatggttaccctgacaggtaccagccacgggatgaggaggtacaagagcgcttagaccacctgctgtgctggcttcttgagcaccggggtagactggagggggggcccggttggctggccgaagccatagtgacatggaggggccatcttacaaaactcttaactaccccttatgagcggcaggagggctggcagttggccgccagtcggttccagggaaccctttacctgtcagaagttgaaacccccaacgccagagcccaacgcctcgcccggcctcccctcctgcgggaactaatgtatatgggatacaagtttgagcaatatatgtgcgctgataaacccggttcttcgcctgacccctctggcgaggttaataccaatgtggctttttgttctgtgttgcggtctcgccttggtagccatcctcttttatttagtggggaagtcgactgtaccgacccgcaggcccctagcacgcagcctcctacatgctacgtggagctcaagacctccaaggaaatgcacagccctgggcaatggcggtctttttacagacacaagctattaaagtggtgggcacagagcttcttgcctggcgtaccaaatgtggtggccgggtttagaaaccccgatggctttgtttccagtctgaagacttttcctacgatgaagatgttcgagtacgtgcgcaacgaccgggatgggtggaatccaagcgtgtgcatgaatttttgtgcggcctttttgtcttttgctcagagcacggttgtccaggacgaccctagactcgtacatctttttagttgggaaccgggcgggccagtcaccgtctccgttcatcaggatgccccttacgcctttctgcccatctggtacgtggaggcaatgactcaagatcttccttcacctcctaaaacccccagcccaaagtag

SEQ ID NO: 185770 - DNA, 1191 bp, synthetic construct
  misc_feature 1..1191: note = Description of Artificial Sequence: Synthetic coding sequence
  source 1..1191: mol_type = other DNA
atggacccccggggcaccaagcggggcgccgagaagaccgaggtggcagaaccgcgcaacaagcttccccggcccgctccctctctgcctacagacccggcgctgtatagcggccctttcccattttacaggaggccatctgagttgggatgcttctctctcgatgcccagcgccagtatcacggggacgctagagccctccggtactactcaccacctccaacaaatggaccggggcccaactttgatttgagggatggctatccagatcgataccagccaagggacgaagaggttcaggagaggctggatcacctgctatgttggcttctcgagcaccgcgggcgcctagaaggggggccaggatggctggctgaggctattgtcacatggagagggcaccttactaaattgctgaccaccccctatgaacgtcaggaggggtggcaactcgcggccagcaggtttcagggaaccctatatttatccgaggtggaaacacccaatgcacgcgcacagcgcttggctcgccccccactcctgagggagctcatgtacatgggctacaaattcgagcagtacatgtgcgcagataagccagggagctccccagacccaagcggagaggtgaacaccaacgttgcattctgctctgtgcttcgcagccgtctcggcagccaccccctgcttttcagcggtgaagtggattgcacagacccccaggcgccaagcactcagcctccaacgtgttatgtggagctgaagaccagcaaagaaatgcactcaccagggcagtggagatcattctacagacacaaactactcaagtggtgggcccagtcatttcttccaggggtgccaaacgtagtcgcgggattcagaaatcccgacgggtttgtgtcttccttaaagacctttcctacgatgaagatgttcgagtatgtccggaatgatcgggatggatggaatcctagcgtatgcatgaatttctgtgctgcgtttctatcttttgcccagtcgacagtcgtccaagacgaccctaggttagtgcacctttttagctgggaacctggcggaccggtaacggtgtccgttcatcaagacgccccgtatgccttcctacctatttggtacgtggaagccatgacccaggacctgccttccccaccgaaaacccccagccccaaatag

SEQ ID NO: 185771 - DNA, 1191 bp, synthetic construct
  misc_feature 1..1191: note = Description of Artificial Sequence: Synthetic coding sequence
  source 1..1191: mol_type = other DNA
atggacccccggggcaccaagcggggcgccgagaagaccgaggtggccgaaccacgcaacaagttaccaaggcctgctccttcactaccgacagaccccgccctctactctgggccattccccttctatcggaggccttctgaactgggatgcttttctttagacgcccagcggcagtaccacggggatgctagggccctgcgctactacagcccccccccaacgaatggacctggccccaactttgacttgcgcgacggatacccagacaggtaccagccccgtgatgaggaggttcaagagcgcttggaccacctattatgttggctgcttgagcacaggggcaggctcgagggaggcccagggtggttggccgaggccatcgtaacgtggagaggccatcttactaagctactcaccacgccctacgaacgccaagagggctggcagctagctgcttcccgtttccagggaactctttacctgagtgaggtggagacccctaacgccagagcacagcgactggccaggcctcctctcctgcgcgaattgatgtacatggggtacaagttcgaacagtatatgtgtgccgacaagccgggatctagccccgacccgtctggggaagttaacacaaacgtagcgttttgcagcgtgctcaggtctcggttgggctctcacccattgctcttttcgggagaggttgactgtactgacccacaagcaccctctactcagcctccgacctgttacgttgaactcaagacctccaaagagatgcactcacccggccaatggagatctttttacaggcataagctcctgaaatggtgggcccagagctttctgcctggcgtacctaatgtcgtcgctggtttcagaaatccagacgggtttgtcagcagcctcaagacgttccctactatgaagatgttcgagtacgtgcgcaatgaccgagacggctggaatccttcggtgtgcatgaatttttgtgccgcctttctgagcttcgcgcagagcactgtggtgcaggatgacccaagactcgtgcacctgttctcatgggaacccgggggaccagtgaccgtgtccgtccatcaggatgcaccttacgcattcctgcctatctggtatgtggaagccatgacccaggatttgcctagccctcctaaaaccccaagtccaaagtag

SEQ ID NO: 185772 - DNA, 1191 bp, synthetic construct
  misc_feature 1..1191: note = Description of Artificial Sequence: Synthetic coding sequence
  source 1..1191: mol_type = other DNA
atggacccccggggcaccaagcggggcgccgagaagaccgaggtggcagagcctagaaacaaactacctcgcccagcccccagcttacccacggatccagctctgtactcaggcccattccccttttatcggcggccatcagaactggggtgtttctccttggatgctcaacggcagtaccacggcgacgccagagctctgcggtattatagtccccctccaaccaatggcccagggccgaacttcgacctgcgggatggatacccagatagataccagccaagagacgaagaagtccaggaaagattagatcatttgctttgctggctactcgagcatcgcggtagattggagggcggaccaggttggctggctgaggcgatcgtgacttggagaggacatctgactaaactgctgacaacaccgtatgagagacaggagggatggcaactggctgcttcacgctttcagggtactctgtacctctccgaggtggagacacctaatgccagagctcagagactggcaagacctcctttgttgagggaattaatgtacatggggtacaagttcgaacagtacatgtgtgctgacaaaccaggatcgagccccgatccaagcggcgaagtgaatacaaacgtcgcattctgcagcgtgctgcgttcccgccttgggtcccatcctctgctcttctccggtgaggtagactgcacggacccacaggctcccagtacccagcctcctacctgctacgtcgagctgaagaccagtaaggagatgcactccccggggcaatggcgatctttttatcgccataagctgctgaagtggtgggcccagtcctttttaccaggcgtacctaacgtggtcgctgggttccgcaacccggatggcttcgtttcttcactgaaaacttttcccacaatgaagatgtttgaatacgtgaggaacgacagagacggctggaatccctctgtgtgtatgaatttctgtgccgcctttctcagcttcgcacaatcgaccgtcgttcaggacgaccctcggcttgtccacctgttctcctgggagcccggaggccctgtcacggtgagtgtgcatcaggacgcaccttatgcctttctgcctatctggtacgttgaggccatgactcaggacctcccaagcccacctaaaacaccaagccccaagtag

SEQ ID NO: 185773 - DNA, 1191 bp, synthetic construct
  misc_feature 1..1191: note = Description of Artificial Sequence: Synthetic coding sequence
  source 1..1191: mol_type = other DNA
atggacccccggggcaccaagcggggcgccgagaagaccgaggtggctgaacccagaaataagctacccaggccggccccctctttgcctactgatcctgcactgtattctggcccatttccgttctatcggcgaccctcagagttggggtgtttcagtcttgatgcccagcgccaataccacggcgacgctcgggcactgcggtactattctcccccgcccaccaatgggcctggcccgaactttgacctgcgggacggatatccggaccggtatcagccgagggacgaggaagtgcaagaacgcttggatcacttgctgtgttggctcttagaacatagggggaggctagaagggggacccggatggttggccgaagccattgttacctggagaggccacctgacgaaacttctgaccacaccatacgagcggcaagagggatggcaactggctgctagccggtttcagggcaccctttacttatcagaggtggagaccccaaatgcccgtgcccagcgccttgcccgacctcctctactgagagaactgatgtacatgggatacaaatttgagcagtatatgtgcgcagacaaacctggtagctctcctgatcccagtggtgaagttaacactaacgtcgcgttttgttcggtgcttcgcagcagactcgggagtcaccccctgctgttctctggagaggtggactgtacagatcctcaggccccctcaacccagcccccaacatgctacgtggagctgaaaacatctaaggaaatgcaaagtcctgggcagtggagaagtttttaccgccataagctcctgaaatggtgggcccagagctttctgccaggcgtgccaaacgtggtggcaggattccgcaaccctgatggattcgtaagttcacttaaaacctttcccactatgaagatgtttgaatacgtaaggaacgaccgcgatggttggaacccaagcgtgtgtatgaatttttgtgccgcgttcttatcatttgcccagtcaaccgttgtgcaggacgacccccgcctcgtgcacttattctcttgggagcctggcgggccagtcaccgtatctgtccaccaagatgcaccgtatgcatttttaccaatctggtacgtcgaggcaatgacccaggatctgccttcgccacccaaaacccccagccctaagtag

SEQ ID NO: 185774 - DNA, 1443 bp, synthetic construct
  misc_feature 1..1443: note = Description of Artificial Sequence: Synthetic coding sequence
  source 1..1443: mol_type = other DNA
atgaacgccagcgagttccggcggcggggcaaggagatggtggactatatggccaactacatggagggcatcgaaggccgtcaggtctaccccgacgtcgagcctggatacctgaggcccttaattcccgcagctgcaccccaagagcctgataccttcgaggacatcattaacgatgtggaaaaaattattatgcccggtgtaacccactggcactctccttatttcttcgcctattttcccactgctagctcctatccggctatgctggccgatatgctttgtggtgccatcggctgtatcggcttctcttgggctgcctcaccagcctgcacagagctggagaccgtgatgatggactggttaggaaaaatgctggaacttccaaaggccttcctcaacgaaaaagctggagaggggggaggagtgattcaggggtctgcttcagaggccacactggttgccctcttagcagcgaggactaaggtcattcacaggttacaagctgccagccccgagttgacacaggccgccatcatggaaaagctagtcgcttattcttcagaccaggctcatagctccgtggaacgagccggtctcataggaggggtgaagttgaaggctatcccctctgacggaaactttgccatgagggcatccgccctgcaagaggctttggaaagagataaagcagccggtctgatacccttctttatggttgcaactcttggtaccaccacttgttgcagtttcgataacttgttagaggttggcccaatatgcaataaagaggatatttggctgcatgtagatgccgcttatgctggcagcgccttcatctgccctgaatttcgccatcttctgaacggggttgaatttgcagacagtttcaattttaacccgcacaagtggctcctagtgaattttgactgctcagccatgtgggtgaagaagcgtaccgatctgactggtgcctttcgcctggacccaacgtatctgaagcacagtcaccaggactccggtctgatcacagattatcgccactggcagatcccgctgggacgtagatttagatctctgaaaatgtggtttgtgttccggatgtatggagtcaaaggactgcaggcttatatacgcaagcacgtgcagttgtcgcatgaatttgagtccttagttcggcaggatccccggttcgagatctgcgtggaggtcattttaggcctcgtgtgcttcaggctgaaaggcagtaacaaagtcaatgaagctctcctacagaggatcaactccgctaagaagattcatttggttccctgtcatctgcgtgataaattcgtgctccggtttgccatttgtagtagaaccgtcgagtccgcacacgttcagagagcatgggaacacattaaggagttggccgccgacgtcttacgcgcagaacgggagtag

SEQ ID NO: 185775 - DNA, 96 bp, synthetic construct
  misc_feature 1..96: note = Description of Artificial Sequence: Synthetic coding sequence
  source 1..96: mol_type = other DNA
atgaacgccagcgagttccggcggcggggcaaggagatggtggactacatggccaattatatggaggggatcgaaggcagacaggtctacccatag

SEQ ID NO: 185776 - DNA, 51 bp, synthetic construct
  misc_feature 1..51: note = Description of Artificial Sequence: Synthetic coding sequence
  source 1..51: mol_type = other DNA
atgaacgccagcgagttccggcggcggggcaaggagatggtggactactag

SEQ ID NO: 185777 - DNA, 1443 bp, synthetic construct
  misc_feature 1..1443: note = Description of Artificial Sequence: Synthetic coding sequence
  source 1..1443: mol_type = other DNA
atgaacgccagcgagttccggcggcggggcaaggagatggtggactacatggccaactacatggaggggatcgagggacgccaggtgtacccagacgttgagcctggatacctccgcccactgattccggcagccgctccgcaggaacccgatacttttgaggatatcattaatgacgtcgagaagatcataatgcctggtgtcacccactggcacagcccctacttttttgcatactttcccactgcctccagttatcccgcgatgttggcagatatgctctgtggtgcaatcggctgtatcgggttctcttgggcggcaagccccgcttgcacagagctggagacagtaatgatggattggcttggcaagatgctcgagctgcccaaggctttcctgaacgaaaaagcaggggagggcggcggcgtgattcaggggtcagcatccgaggcgaccctggtggccctgctggctgccaggacaaaggtcattcatagactgcaagccgcatctcccgaactcacccaagccgccattatggagaaactggttgcttacagtagtgaccaggctcacagtagcgtcgagagagcaggtctcattggcggagtgaagttgaaggcaataccatcagatgggaactttgcaatgcgcgctagcgctctgcaggaggcactcgagcgagacaaggccgccggtttgatacctttcttcatggtggccactttgggcactaccacttgctgttcctttgacaatttgctcgaggtgggtcctatctgcaataaggaggatatctggttgcatgtggacgccgcatacgcgggcagcgcctttatctgtcccgagttccgccacttattgaacggagtggagttcgccgatagcttcaatttcaatccccacaaatggcttcttgtcaattttgactgcagtgctatgtgggtgaagaagcggacggacttgacaggagcattccgccttgatcctacgtacctgaagcactcacaccaagattctggcttgatcaccgactacagacattggcagatccccttgggtagaaggtttcgcagcttaaaaatgtggttcgtctttagaatgtacggagtgaaagggctgcaggcctacattaggaaacacgttcagctctcccacgagtttgaatctttggtccgtcaagacccacggtttgaaatttgcgttgaagtgatcctcgggcttgtatgtttcagattgaaggggtccaataaggtgaacgaagctcttctacagaggattaactcagctaagaagatccatctcgtgccctgccatctaagagataagttcgttttaagatttgctatctgctcccggacggttgaaagcgcgcacgtgcaacgcgcttgggaacatatcaaggagctggcagcagacgttttgagagccgagagagagtag

SEQ ID NO: 185778 - DNA, 1017 bp, synthetic construct
  misc_feature 1..1017: note = Description of Artificial Sequence: Synthetic coding sequence
  source 1..1017: mol_type = other DNA
atgaacgccagcgagttccggcggcggggcaaggagatggtggactatatggcaaactacatggagggaattgagggacgacaggtgtatcctgacgttgagccaggatatctgagacctctgatacctgcggctgcgccccaggagccagacacctttgaagatattatcaatgacgtcgagaaaattatcatgccaggggtcactcattggcattccccatatttcttcgcctactttcccactgcatcgtcctacccggccatgttagccgacatgctctgcggggcaattggctgcatcggcttcagctgggctgcgtcccctgcctgtaccgaacttgagaccgtgatgatggattggctcgggaagatgctggaattgccaaaagctttcctcaacgaaaaagccggcgaaggcggaggggtgattcagggttccgcgtcagaggctacgctcgttgctttactggccgcacgtaccaaggtgattcaccgcctccaggctgcctctccagaactgacccaggcagccatcatggagaagttggtagcatattcttcagaccaggctcatagttccgttgaacgagcaggccttatcggaggtgtcaagctgaaggcgattccctccgacgggaacttcgctatgagggcatccgccctgcaggaggctttggagagagacaaagccgccggccttattccatttttcatggttgcgacgctcggtacaaccacctgttgcagtttcgacaacctgctcgaagtggggccaatatgtaacaaagaagacatctggctgcacgtagatgcagcctacgctggtagcgcctttatctgtccagagtttagacatttgctgaacggcgtggaattcgctgattcattcaatttcaatcctcataaatggctgctcgttaatttcgactgttctgccatgtggagcagacagcctgtccgaatgcttcggctaaagaagacctgcctggtgagcgctgtggtcagaagaagctag

SEQ ID NO: 185779 - DNA, 1209 bp, synthetic construct
  misc_feature 1..1209: note = Description of Artificial Sequence: Synthetic coding sequence
  source 1..1209: mol_type = other DNA
atgaacgccagcgagttccggcggcggggcaaggagatggtggactacatggcgaactacatggaaggcattgagggacgtcaagtgtacccagatgtcgagcctggatatctgcgccctctcattcctgctgctgccccccaggaaccggatacgtttgaagacataataaatgatgtcgagaaaattatcatgcctggggggagtgcgtccgaagctaccctggtcgccctgcttgctgcacgtactaaagtcatccatcgccttcaggcagcgtcaccagaactgacgcaggccgcaattatggagaagttggtcgcctatagttctgatcaagcacatagttcagtcgagagggcggggcttatcggaggggtgaagctaaaggctattcctagtgatggaaactttgcgatgcgcgctagcgccctacaagaggccctggaacgggacaaggcagctggcctgatcccattcttcatggtggcgactctagggactaccacctgttgcagtttcgacaatctattggaagttggacccatatgtaataaagaggacatttggctgcacgtggatgccgcttatgccgggtccgccttcatttgcccagaattcagacatcttctcaatggcgttgaatttgccgattccttcaattttaaccctcataagtggctcctggtcaatttcgattgcagcgccatgtgggtgaagaagcgcacagacttgaccggagccttccggctggatcccacctacctcaagcactcacatcaggacagtggcttaatcactgactaccggcactggcagatacccctggggaggcgcttccgcagcctgaagatgtggtttgtttttaggatgtacggggtcaaaggacttcaggcttacatccggaagcatgtgcagctcagccatgaatttgaaagcctggtgagacaggacccacgatttgagatatgcgtggaggtgatcctcggactggtctgtttccgcctcaaagggagcaataaagtgaatgaggccctgctgcaaaggatcaactccgcgaaaaaaattcatttagtgccttgtcacctccgcgacaaatttgtattgcggttcgcaatctgttcccgtacagttgaaagcgctcacgtacagcgggcatgggaacacataaaagagctcgccgcagacgtactgcgcgccgaaagggagtag

SEQ ID NO: 185780 - DNA, 1164 bp, synthetic construct
  misc_feature 1..1164: note = Description of Artificial Sequence: Synthetic coding sequence
  source 1..1164: mol_type = other DNA
atgaacgccagcgagttccggcggcggggcaaggagatggtggactacatggcaaattatatggagggaattgagggaaggcaagtgtaccccgacgtagagcctggctatctgcgccccctaatccctgccgctgcacctcaggaacctgatacattcgaagatattatcaacgacgtcgaaaagataatcatgccaggggtgactcattggcactctccatacttcttcgcatacttccccaccgctagctcttatcccgccatgctagccgacatgctctgtggagcaatcggatgtattggattcagctgggctgcttcacccgcgtgtacagagctggaaacagtaatgatggattggctcgggaaaatgctggaactgccaaaggccttcttgaacgaaaaagccggtgaggggggcggagtcatccagatggtagctacgctgggtacaactacgtgctgctccttcgacaacctgttggaagtgggcccgatatgtaataaagaagacatctggctccacgtggatgcggcctatgctggctccgccttcatctgtcctgaatttcgtcatctcctgaacggcgtggagtttgccgattccttcaattttaatccccacaaatggcttcttgttaactttgattgctcggcaatgtgggtgaaaaagcgtaccgatctcacaggggcattcagactggacccaacttatctcaaacatagccatcaggactccggattgatcacagattaccggcattggcagatccccctaggcaggcgctttcgaagtctgaagatgtggtttgtcttccggatgtatggggtgaaggggctgcaagcctacattcggaagcacgtccaactgtcacatgaattcgagtccttggttcgacaggatcccagatttgagatttgcgtcgaggttattctcgggctggtgtgctttaggctgaaagggtcaaacaaagtgaatgaggccttactgcagagaattaacagcgctaaaaagatacacctggtcccatgtcacctgagggacaaattcgtgctgcgttttgctatctgctctcggaccgtggaaagcgcacatgtccagcgggcctgggaacacattaaggaactcgccgccgacgttctgcgcgcagagcgggaatag

SEQ ID NO: 185781 - DNA, 735 bp, synthetic construct
  misc_feature 1..735: note = Description of Artificial Sequence: Synthetic coding sequence
  source 1..735: mol_type = other DNA
atgcgggaggccgccttcatgtacagcaccgccgtggccatcttcctggttatcctcgtggctgccctacagggcagcgcacctagggaaagccctctcccttatcacatcccgttggatcctgagggctccctggagttatcatggaacgtgagctatacccaggaggccattcatttccagctcctcgtacggagactgaaagcaggcgttctgtttggaatgagcgatcggggagagttagaaaacgcagatctcgtggtgctgtggacagatggcgatacagcttactttgcagatggcaccgtgcatctcgtgtatggcatactggaagagccattcagaagtctggaggccatcaacggctctggccttcagatggggctgcagagagtccagctattgaaacctaacatcccagagccagagctgccatctgacgcttgtacaatggaagtgcaggcccctaatatacagatccctagccaggaaaccacttactggtgttacattaaggagctgcctaaagggttttcccgccatcatatcatcaagtatgagccgatcgtgacgaaagggaatgaggccctagtgcatcatatggaggtgtttcagtgcgcccctgagatggattcagtgccacacttcagtgggccctgcgattctaaaatgaaacccgaccggttgaactactgtcgtcacgtgctggcggcttgggcactgggtgccaagtag

SEQ ID NO: 185782 - DNA, 1854 bp, synthetic construct
  misc_feature 1..1854: note = Description of Artificial Sequence: Synthetic coding sequence
  source 1..1854: mol_type = other DNA
atgcccgccctgagccggtgggccagcctgcccggccccagcatgcgcgaagctgcgttcatgtatagcacagccgtggccatctttctagttattctcgtcgccgcccttcagggctctgcgccccgggagagccctcttccatatcacattccactggatcccgagggatctctggagctcagttggaatgtctcgtacacccaggaggccatccactttcagctcttagtgcgacggttaaaggctggcgtcctatttggaatgtcagacaggggcgagttggagaatgctgatctcgttgttctttggactgatggagatacagcatactttgccgatgcttggtccgatcagaagggccagatccacctggatccgcagcaagattaccagctgcttcaggtccagcggactccagaggggcttaccttgttgtttaaacggccctttggtacttgcgatccgaaggattatctgatcgaggatggaactgttcatctcgtctatggcattctggaggagccgttcaggagtttggaagcaattaacgggagcggcctgcagatgggcctgcaaagagtccagctgctgaagcccaatatccccgagcccgagctgccgtccgacgcctgcactatggaagtacaagctcctaatattcaaattcccagtcaggagactacatactggtgctatattaaggagctgcctaagggattttctagacaccacatcataaaatacgagcctatcgtaaccaaggggaatgaagcacttgtgcaccatatggaagtgtttcagtgcgcaccggagatggactctgtgccccattttagtgggccctgtgatagtaaaatgaaaccagatcgcctaaattactgcagacacgtccttgccgcctgggctttgggcgctaaggcattttattatcccgaggaggctggtctcgcattcggagggcctggtagtagccggtacctccgattagaggtgcactaccacaatcctctggtcatcgaaggccgaaatgactcctcgggcatccgcctctactatactgccaaactgcgccgatttaacgctgggattatggagctcgggctcgtgtacacaccagtcatggctatcccacctcgcgagaccgcattcattctcaccgggtattgcaccgacaaatgtacacagttggctctacccccgtccggtatccacatctttgcatcccagttgcatacccatcttacaggtcgcaaagtcgtgaccgttctcgtcagagacggacgggagtgggagattgtcaaccaagataatcactatagtccccatttccaggagatacgcatgctgaagaaagtcgtatcagtacacccaggagatgtcttaataactagctgtacatacaacaccgaggatagggagctggctacagtggggggattcggtatactcgaagagatgtgcgtaaactatgttcactattacccacagactcagttggagttatgcaaaagcgccgtagatgccggcttcctgcagaagtattttcatctgattaataggtttaacaatgaagacgtgtgcacctgtcctcaggcatctgtcagtcagcagtttactagcgtgccgtggaactctttcaatagagacgtccttaaagctctctattccttcgcgccgatctctatgcactgcaataagtccagtgccgttaggttccagggcgagtggaacctccagcccctgcccaaagttatttctactcttgaggagcctacgcctcagtgtcccacttctcaaggcagatcccctgcaggaccgacagtcgtatccattggtggcgggaaaggttag

SEQ ID NO: 185783 - DNA, 1341 bp, synthetic construct
  misc_feature 1..1341: note = Description of Artificial Sequence: Synthetic coding sequence
  source 1..1341: mol_type = other DNA
atgcggaccctgaacaccagcgccatggacggcaccggcctggtggtggagcgcgatttctctgtgagaatcctgaccgcatgttttctgtcactcctcatactctcaacattgttggggaatacactcgtttgtgctgcagttataagatttcgccacttaagatctaaagttactaattttttcgtgatcagcctggccgtcagcgacctcctcgtggctgtattggtcatgccttggaaggctgtggctgagatcgccggtttctggccttttggctctttttgcaacatctgggtggctttcgatattatgtgtagcaccgcctccatccttaatctgtgtgttattagcgtggacagatactgggccatttccagcccattccggtacgagaggaagatgacacctaaggctgctttcatcctaatctcagtggcctggactctatccgtgctgatctcatttatccctgtccaactcagctggcacaaggccaaacctacctcccccagcgacgggaatgccacctcactggccgagacaattgacaattgcgactccagcctgagtagaacctatgccataagctcgtccgtgatctcgttctacatccccgtggccatcatgatagtcacctacacccgcatctatagaatcgcccaaaaacagatccgccgcatcgccgctctggagagagctgctgtccacgcgaagaactgccaaaccaccaccgggaacggaaagccagtggagtgttctcagcccgaatcaagcttcaagatgagctttaaaagggagactaaggttctgaagacgctctcggtcatcatgggcgtgttcgtgtgttgctggcttccctttttcatcctgaactgtatcctgccgttttgcggctcaggcgaaacccaaccattttgtatcgactccaacacgttcgacgtctttgtgtggttcggatgggccaattcatctctcaatcctatcatctatgcgttcaacgcggacttcaggaaagctttctcaactctccttggttgttaccgcctttgtcctgcaacaaataacgctatcgaaacggtcagcattaataacaatggcgccgccatgttttcatctcatcatgaacccagaggcagtatctctaaagagtgcaatctggtttatctgattcctcatgctgtgggaagcagtgaggatctgaagaaggaggaggccgcaggaattgcacgtcccctggaaaagctgtcaccagctctctctgttattcttgattacgacacagacgtgtcgctggaaaagatccagccaatcacacagaacggacagcacccgacttag

SEQ ID NO: 185784 - DNA, 1341 bp, synthetic construct
  misc_feature 1..1341: note = Description of Artificial Sequence: Synthetic coding sequence
  source 1..1341: mol_type = other DNA
atgcggaccctgaacaccagcgccatggacggcaccggcctggtggtggagcgggacttcagcgtcaggatcctgacagcttgttttctctcgttgttaatcctgtctacccttctcggcaacactctggtctgcgcagctgtcatacggtttagacatctgcggtccaaagtcaccaattttttcgtgatcagccttgccgtcagcgatcttctggtggcagttctggtgatgccttggaaggcagtggctgaaatcgcaggattctggccatttggtagcttctgtaacatttgggtggcgttcgatataatgtgttccacagcttctatactcaatctgtgcgtgatctctgtcgatcgttattgggccatcagtagtccattcagatatgaacggaagatgactcctaaagccgcattcattttaatcagcgtggcctggactctgtctgtgctcatttcttttattcctgtccaactatcctggcacaaagccaaacctacaagcccctccgatggcaatgctactagcttggctgagactatcgataattgtgattcatctctgtctcgcacctacgccatcagttcaagcgtcatcagtttctatatccccgtagccatcatgattgtgacttatacccggatttacaggattgcacagaagcagattaggaggattgccgctctcgaacgtgccgctgtgcacgccaagaattgtcaaacaactaccggcaacggcaagccagtagaatgctcacagcccgagagctccttcaagatgtccttcaagagagagacaaaagtattgaagacactaagcgtcattatgggggtctttgtgtgctgttggctccccttctttattctcaattgtatcttgccattctgtgggagcggggagacccagccattttgcattgatagtaacacttttgacgtattcgtttggttcggctgggctaatagcagcttgaatccaatcatatacgccttcaatgccgacttccgcaaagcgttctccacattgttgggctgttatcgcctatgccctgccacaaacaacgcgattgaaacagtcagcatcaataataacggcgccgctatgtttagctctcatcatgagccccgaggctctatcagtaaggaatgcaatctcgtgtacctgatcccccacgccgtgggcagctcggaagatctgaagaaagaggaggctgccggcattgctcgtccacttgaaaagctcagcccagctttatcagtcatactagactacgacactgatgtgtcgctggaaaaaattcaacctattactcaaaacggacaacatcctacctag

SEQ ID NO: 185785 - DNA, 1245 bp, synthetic construct
  misc_feature 1..1245: note = Description of Artificial Sequence: Synthetic coding sequence
  source 1..1245: mol_type = other DNA
atggaccccctgaacctgagctggtacgacgacgacctggagcggcagaattggagccgaccttttaacggcagcgacggtaaggctgaccggccacactacaactattacgcgacgctcctgactctgctgatcgccgtcatcgtcttcggtaacgtgctcgtgtgtatggccgtgtctagggagaaggccctgcagaccactactaactatctcattgtgagccttgccgtggcggacctactggtggctacgttggtcatgccctgggtagtttatcttgaggtcgttggcgaatggaaatttagccggattcattgtgatatctttgtgacgctggatgtgatgatgtgtacagcgagtattctgaatttgtgcgccatcagtattgatagatacaccgctgtggctatgccaatgctgtataacacccggtactcctcaaaaagacgggtgaccgtgatgataagcatagtgtgggtcctcagctttaccatctcctgccctttgctgttcggccttaataatgcggaccaaaatgagtgtatcattgccaaccctgcttttgtggtttacagtagtattgtgagtttttacgttccgttcatagtgactctgttggtatacatcaaaatctatattgtgctgagaaggaggcgtaaaagggtcaacaccaagcgttcttcacgtgcttttcgtgcacatttgcgggcccccctgaaagaggccgcccggcgagctcaagaactcgaaatggagatgctatccagtacctcgcccccagaaaggaccaggtattcccccattcctccctcccatcatcagctgacactgccggacccttcccaccatgggttacattccactcccgactcacccgcaaaacccgaaaagaacggacatgctaaagaccaccctaaaatcgccaaaatcttcgagatccagacgatgcccaacggcaaaacacgaacctccttgaagactatgagccgacgcaagctgtcccagcagaaggagaaaaaagccacccagatgttggctattgtgctcggcgtattcataatctgttggttgccattcttcattactcatattctcaacatccactgcgattgcaacatcccccctgtactgtatagtgcctttacttggcttggatacgtgaactcagcagtaaatccaattatttacaccacttttaacatcgagttcagaaaagcctttctgaagattcttcactgttag

SEQ ID NO: 185786 - DNA, 1338 bp, synthetic construct
  misc_feature 1..1338: note = Description of Artificial Sequence: Synthetic coding sequence
  source 1..1338: mol_type = other DNA
atggaccccctgaacctgagctggtacgacgacgacctggagcggcaaaactggagccgtccgtttaatggcagtgacggtaaggcggataggccccactacaactactatgctacgctacttacactgttaatcgcagtcatagtgtttgggaatgttctcgtttgtatggccgtgtcacgtgagaaggcattacagacaacaacgaactacctcatcgtatctctggctgtcgccgacctccttgtcgcgacactcgtcatgccctgggtcgtgtaccttgaggtcgtgggggagtggaaattttctcgcattcactgtgatatattcgtcaccctagatgttatgatgtgtacagcatccattctcaatctgtgcgccatctcaatcgaccgctacactgcagttgccatgcctatgttatacaacactcgttactcttctaaacgaagggttacagtaatgattagcatcgtgtgggtgttgtccttcacaatttcctgcccccttctttttggactgaataatgcagatcaaaacgaatgcatcatagccaacccagcttttgtggtgtatagcagcatcgtgtctttctatgtgccatttattgttactttactggtatacattaagatatatatagtcctgaggagaaggcgcaagcgtgtgaatacaaaaaggtcttcccgcgcattccgggcacacctgcgagctcccctgaaaggaaactgcacgcacccagaagatatgaaactgtgtactgtcatcatgaaaagcaatggcagtttccctgttaacaggcggagggtggtgcaggaggctgcacgccgcgcccaggaactggagatggagatgctctcatctacatctcctccagagcgcactcgctactcgcctatccctccatctcaccaccagcttaccctccccgaccctagtcatcacggtttgcattccacccccgatagcccagcaaagccagaaaagaatggacacgcaaaggatcatccaaagatagcaaagatatttgaaatacagacgatgcccaacggcaaaacgcggaccagtctcaagacaatgtctaggcgaaagctgtcccagcagaaggagaaaaaagctacacagatgctggccatcgtgttaggtgtctttataatttgctggctgcctttttttattacccacatcctcaacatccactgcgattgtaatatccctcccgtcctgtattccgcttttacgtggttaggctacgtgaactcagccgtcaatcccatcatttataccactttcaacattgagttcaggaaggcatttctcaaaattttgcactgctag

SEQ ID NO: 185787 - DNA, 1332 bp, synthetic construct
  misc_feature 1..1332: note = Description of Artificial Sequence: Synthetic coding sequence
  source 1..1332: mol_type = other DNA
atggaccccctgaacctgagctggtacgacgacgacctggagcggcagaactggtctcgacctttcaacggctccgatggcaaggcggacagaccacactacaattattacgctaccctgctcactcttctcatcgctgtgatcgtctttggcaacgtgttggtgtgtatggctgtgtccagggaaaaggcgctgcagactacgactaattatttgatcgtaagtttggccgtggcggatctgctcgtggctactctcgtgatgccttgggtggtctatctcgaggtggttggcgagtggaagttcagccgcatccactgcgacatttttgtgacattagatgtcatgatgtgcacagcttccattctgaacctttgcgccatttcaattgaccggtacactgccgtggcaatgccaatgttgtataacactcggtatagctctaaacgccgggtgactgttatgatctcaattgtgtgggtgctgagttttactattagctgcccgctgctcttcgggctgaacaacgctgatcagaatgagtgcattattgccaacccagcattcgtcgtgtactccagcatcgtgagcttctatgtgccctttatcgtgaccctgctggtatacatcaagatctatattgtccttcgccgtcgccggaagcgcgtaaataccaagcgatcctcacgagcatttagggctcacctgcgtgctcctctcaaaggaaactgcacacaccccgaggatatgaagctgtgtactgtgattatgaagtctaatggctccttcccggtgaatcggagaagagtggaggctgccaggagggcccaagagctggagatggagatgttaagctcaaccagcccacctgagcggaccaggtacagccccatccccccctcccaccaccagctgactcttcctgaccccagtcatcatggcctccattctaccccagattcacctgctaagcccgaaaaaaatggccatgcgaaagatcatcctaagatcgcaaagattttcgagatccagactatgcctaatggaaaaacccgaaccagcttaaaaaccatgtctcggcggaaactgagccaacagaaagaaaagaaggcgacccaaatgctggcaatcgtgctgggggtgtttatcatctgctggttgcccttttttattacacacatcctgaacatccattgtgattgcaatatcccacccgtgctgtatagtgctttcacatggctgggatatgtgaacagcgctgtgaaccccattatctacactacctttaacattgaattcagaaaagccttcctgaagattcttcactgctag

SEQ ID NO: 185788 - DNA, 1338 bp, synthetic construct
  misc_feature 1..1338: note = Description of Artificial Sequence: Synthetic coding sequence
  source 1..1338: mol_type = other DNA
atggaccccctgaacctgagctggtacgacgacgacctggagcggcagaattggagccgcccatttaacggcagtgatgggaaggccgatcgaccgcactataactactacgcaacactgttgacactgcttatcgccgtgatcgtgttcggaaacgttttggtgtgtatggccgtgtcccgggagaaggcattgcagacaaccaccaactacttgatcgtgtcgttagcagtcgctgacttgctggtcgccacgctggttatgccttgggtggtgtacctcgaagtagtcggggagtggaagtttagcaggattcactgcgacatattcgtaaccctggacgttatgatgtgcactgcatctattttgaatttgtgcgctatcagtatcgaccgctatactgccgttgcgatgccgatgctttacaatactaggtattctagtaagagacgcgtgacagtgatgatctccatcgtgtgggtactaagcttcaccatcagctgtccacttctttttggcctcaacaatgcagaccagaatgagtgcatcattgccaatcccgccttcgttgtttattctagcatcgtgtcattctacgtgccattcatcgtgacccttctggtgtatataaagatttatattgtgctgcgccgacgacgcaaacgggtgaacactaaaagatcatctcgggccttcagggcccacctgcgggcaccccttaagggaaactgcacccaccccgaagacatgaaactttgcactgtgatcatgaaatctaatggttcgttcccagtgaacaggcgtcgggtcgtgcaagaggccgccaggcgcgcacaggagcttgaaatggagatgctgtcttccaccagcccccctgaaagaactcgctattcaccaatcccaccttctcatcaccagcttactctaccggatccttcacaccatggacttcactccaccccagacagccccgcgaagcccgagaagaatggacacgcaaaggatcatcctaagatcgctaagatcttcgagattcagactatgccaaacggaaagacccggactagcctgaagactatgtctcggcgtaaattatctcagcaaaaagagaagaaagcaacccaaatgctggctatcgttctcggagtttttatcatctgttggctccctttctttatcactcacatcctgaatattcactgtgactgcaacattcctcctgtgctgtacagtgcattcacttggttaggttacgtgaactcggccgttaatcctatcatctacacaactttcaatatcgagttccggaaagctttcctgaaaattttacattgctag

SEQ ID NO: 185789 - DNA, 24 bp, synthetic construct
  misc_feature 1..24: note = Description of Artificial Sequence: Synthetic coding sequence
  source 1..24: mol_type = other DNA
atggaccccctgaacctgagctag

SEQ ID NO: 185790 - DNA, 1332 bp, synthetic construct
  misc_feature 1..1332: note = Description of Artificial Sequence: Synthetic coding sequence
  source 1..1332: mol_type = other DNA
atggaccccctgaacctgagctggtacgacgacgacctggagcggcagaactggtcacgccctttcaatggatctgacggtaaagcggataggcctcattataattactatgccaccttactgaccctcctgatagctgtgatcgtctttggaaacgttttggtgtgcatggcagtgtctagggaaaaagcccttcagacaactacaaactatctcatagtctctcttgctgtggctgacctgctggtggctactctcgtgatgccctgggtggtgtatcttgaggttgttggggagtggaagtttagccggattcattgcgacattttcgtgacactggacgtcatgatgtgtacagcatccattcttaatctttgtgcaatatcaattgatcgctacactgcagtagctatgcccatgctctacaacacacgatattcatccaagcggcgcgtgaccgtaatgatcagcattgtgtgggtcctgtccttcacaatatcttgcccgctgctttttgggctgaataacgccgatcagaacgagtgtatcattgctaatccagcctttgtggtttactcgtcaattgtgtccttttacgtcccattcatagtcactctcctggtttacatcaagatctatattgtgcttagaagaagacgaaagcgcgtgaatactaaaagatccagtcgggccttccgggctcacttgagggctcctctcaaaggtaactgtacccacccggaggatatgaagctctgcactgttatcatgaagtcgaacgggtcatttcctgttaaccgccggagggtagaagccgcaagacgggctcaagaactggaaatggagatgctgtcatctacatcacctcccgagcggactagatactcccctattccaccaagccatcatcagctgactttgcctgatccttcccatcatgggctacattccacgcccgacagtccagcaaagcctgaaaagaacggtcacgccaaagaccatcctaaaatcgcgaaaatcttcgagatccaaaccatgcctaacggcaagactcgaacaagtctgaaaaccatgtctaggaggaaactgagtcagcagaaggagaagaaggccacccagatgttagcaatagtgcttggagtgtttattatttgttggttgccatttttcattacacacatcttgaatatccactgcgactgtaacatcccgcctgttctgtactctgcttttacctggctcggatacgttaattctgccgtgaatcccatcatctatacaacttttaatatcgagttccgcaaggctttcctgaagatccttcattgttag

SEQ ID NO: 185791 - DNA, 534 bp, synthetic construct
  misc_feature 1..534: note = Description of Artificial Sequence: Synthetic coding sequence
  source 1..534: mol_type = other DNA
atggaccccctgaacctgagctggtacgacgacgacctggagcggcagaactggagcagaccattcaacggctctgatggtaaggccgacaggccacactataactactacgctacgctgcttactttgctcatagcggttatcgtttttggaaacgtactggtatgcatggccgtgtcccgtgagaaggcattgcagaccaccacaaattacttgatcgtttctttggctgtggcggacctgctcgtggcgacattggttatgccttgggttgtgtatctggaggtcgtaggggaatggaagttttctaggatccattgcgacatcttcgtgactctagatgtcatgatgtgtactgcatccatcctgaacctatgcgcaatctctatagaccgctatacagccgtggctatgccaatgctttataacactagatactcatctaaacgaagggtcaccgtgatgattagcatcgtgtgggtgttgagttttacaattagttgcccacttctctttggactgaacaacgcctag

SEQ ID NO: 185792 - DNA, 1329 bp, synthetic construct
  misc_feature 1..1329: note = Description of Artificial Sequence: Synthetic coding sequence
  source 1..1329: mol_type = other DNA
atggaccccctgaacctgagctggtacgacgacgacctggagcggcaaaactggtctagaccattcaatggaagcgatgggaaagccgacaggccccactacaactattatgcaacattgctgactcttctcattgccgttatcgtgttcgggaatgttctggtctgcatggccgtgtcaagggagaaggcactgcaaaccacaacgaactacctgattgtcagtctggcggtagccgatctacttgtcgccaccctcgtgatgccctgggtggtgtatctcgaagttggggaatggaaattctcgaggatccattgtgatatctttgttacactcgacgttatgatgtgcactgctagcatcttaaacctatgtgcgatttccattgatcgctacacagctgtggccatgcctatgttgtacaatacgagatattccagtaaacgacgcgtgactgtaatgataagcatcgtgtgggtgctgagtttcacgattagttgcccactcctgtttggccttaataacgcggaccaaaacgagtgcatcatagctaaccccgcctttgttgtctactctagcatagtctccttttatgtgccattcatcgtgactctcctagtttacattaagatatacattgtcctacggcgtcgtcgaaagcgggtcaataccaaaagaagttctcgggcctttcgcgcacatttaagagccccgttgaaaggcaactgtacccaccctgaggacatgaagctctgcaccgtcattatgaaatccaatggatcattccccgtgaatcggcgcagagtggaggccgcccggcgggctcaagagctcgagatggagatgttgtcctccacctctcctcccgaacgaaccagatattcccctattcctccttcccatcaccagctgactctgcccgacccttcacatcacggtcttcactccacaccagattcacccgctaagcctgagaagaatgggcacgccaaggatcacccaaaaattgctaagatcttcgaaatccagaccatgccaaatgggaaaaccagaacgtccctgaagacaatgtctcgcaggaagttgtcgcagcagaaggagaagaaggcaacgcagatgctagccatagtgctgggggtttttatcatatgttggcttccattttttattactcacatccttaacatccactgcgattgtaacatccctcctgtgctgtatagcgctttcacctggctgggatacgtcaactccgcagttaacccaataatctatactaccttcaatatagaatttagaaaagcctttctgaagatacttcattgctag

SEQ ID NO: 185793 - DNA, 1029 bp, synthetic construct
  misc_feature 1..1029: note = Description of Artificial Sequence: Synthetic coding sequence
  source 1..1029: mol_type = other DNA
atggccagcctgagccagctgagcggccacctgaactacacctgcggggcggaaaactctacaggagcctcccaagcacggccacacgcctactatgccctgagttattgtgcgcttatcctggcgattgtgttcggaaacggactcgtctgcatggctgtgctcaaggagcgagcgctgcagacaacaacaaactacttagtcgtgtcattagccgtggccgacctgctggtggcaactttagtcatgccctgggtggtctatctggaagtgactggtggggtgtggaactttagccgaatttgctgtgatgtgttcgttacgctggacgtgatgatgtgtacagcgtctatccttaacctatgtgcgatttcaattgacaggtataccgccgtggttatgcccgtgcattaccaacacgggaccggccagagctcctgccgccgcgtggccctcatgatcacggccgtatgggtcctggcctttgcagtttcctgtcctcttctattcggtttcaacaccacgggagaccctactgtgtgcagtatatcaaatcccgactttgtgatttacagttctgtagtctctttttacctgcctttcggcgtaactgttctggtttacgcaaggatatacgtggttctgaagcagcgcagacgtaaacgaatactcactcggcagaactctcagtgcaacagcgtgcggccagggtttccccagcaaaccctgagcccagatcctgcacacctggagctcaagaggtattattcgatctgtcaggacaccgccctgggagggcctggtttccaggagaggggcggggaactaaaacgagaggagaaaacacgaaattctttgtctgcaactagtggagaggaaggcaaccctaatggcggtcactgtgcctgggggctgcactgtttactggcagctctgctgctggatccttgttctcagtaccctttgcccgacatgccacgcgtccccagagctctgcagtgccacgatatggctgggctccgcgagtag

SEQ ID NO: 185794 - DNA, 1104 bp, synthetic construct
  misc_feature 1..1104: note = Description of Artificial Sequence: Synthetic coding sequence
  source 1..1104: mol_type = other DNA
atggccagcctgagccagctgagcggccacctgaactacacctgcggagctgagaacagcaccggtgcttcacaggcccggccacacgcctattatgccctctcctactgcgcactcatcttagccattgtcttcggcaacggactggtgtgtatggccgtcttaaaggaacgggccttgcaaacgacaaccaactacctggtagtaagcctggcggttgccgatctgctggtggcgacactggtgatgccatgggtcgtgtatttggaggtcacagggggtgtgtggaacttctctaggatctgttgtgatgtatttgtgactctagatgtaatgatgtgcaccgcatcgattttgaatctgtgcgcaatcagcatcgaccgctacaccgctgtggtgatgcccgtgcattatcaacatggaaccgggcagtcctcttgccgaagggtggctcttatgatcacagccgtgtgggtcttagccttcgccgtgtcctgcccactcttgttcggttttaacaccacgggcgatccaactgtgtgctccatctccaaccccgactttgtgatttattcatccgttgtctccttttacctgccattcggggttaccgttttggtatacgctcgaatttacgtcgtcctgaaacagcgcagaagaaaacgcatccttacaagacagaatagtcagtgcaattccgtgcgacccggctttccccagcagactctcagccccgaccccgcgcacctggaattgaagcgctactacagcatatgccaggacaccgctctgggcggcccaggtttccaggagaggggaggcgagctgaaaagagaggagaagacacgcaatagtctgatgcccctgagggaaaagaaggcaacacagatggtcgcaattgtgctgggtgcttttattgtctgctggttacctttttttctgacacatgtgttaaatactcattgccagacctgccatgtgtcgccagaactctactccgcaactacctggctcggctacgtgaacagcgcacttaatccagtgatctacacgacattcaacatcgaatttcgaaaggcatttctcaagattcttagctgctag

SEQ ID NO: 185795 - DNA, 1203 bp, synthetic construct
  misc_feature 1..1203: note = Description of Artificial Sequence: Synthetic coding sequence
  source 1..1203: mol_type = other DNA
atggccagcctgagccagctgagcggccacctgaactacacctgcggcgctgaaaatagcactggcgcctctcaggcccgaccccacgcgtactacgccctgtcttactgcgccctgattctggccatcgtgttcggtaatggcctggtctgtatggcggtgctgaaggaacgtgctctccagaccactacaaattacttagtggtgtctctggctgtggccgacctcctcgttgctacactagtcatgccgtgggtggtctacctggaggtgactggcggcgtttggaacttttcccgtatatgctgcgatgtgttcgtgactctggacgttatgatgtgcacagcaagcatccttaatttatgtgctatcagtattgatcgctacactgcagtggtcatgcctgtccattatcaacatgggactggacaaagttcatgcagacgtgttgccctgatgatcaccgctgtgtgggtcctggcttttgctgtgtcatgccctctcctttttggattcaacactacaggggacccaacggtatgctcgatttctaaccccgatttcgtgatttatagcagcgtggtgtcattctatttaccattcggggtcacggtactggtatatgcacggatttacgtcgttctgaaacagcgtagaaggaagcggattctgacccgccagaacagtcaatgcaatagtgtgcgacctggattcccccaacagacattgtcacccgatcccgctcaccttgagctaaaaaggtattactcgatatgccaagacacagcccttggcggcccaggcttccaggaacgggggggcgagttgaaacgggaagagaagactagaaacagtctttctcccacaatcgcaccaaagctgtcattggaagtgcgcaaactatcaaacggacgcttgagcacatcacttaagctggggccgcttcaacctcgcggtgtccccttacgcgagaagaaagccacgcagatggtcgctattgtgctcggagcttttatcgtgtgctggctacccttctttcttacccacgtgcttaacacacactgtcagacctgtcatgtgtctcccgaactatactcggccaccacgtggctgggatatgtgaattccgccctgaaccccgttatttacacaacttttaacatcgagtttcgcaaggctttcctaaaaattctcagctgttag

SEQ ID NO: 185796 - DNA, 1203 bp, synthetic construct
  misc_feature 1..1203: note = Description of Artificial Sequence: Synthetic coding sequence
  source 1..1203: mol_type = other DNA
atggccagcctgagccagctgagcggccacctgaactacacctgcggagccgaaaatagtactggagccagtcaggcccggccccatgcatactatgcgttgtcatattgcgccctcatcctggccattgtgtttggaaacgggctagtttgcatggccgtgctgaaggagagggccctccaaacaactaccaattacctcgttgtgagcctagcggtggcggacttactcgtcgcaaccctggtgatgccctgggtggtctacctggaggtcacaggtggcgtctggaacttctctaggatttgctgtgacgtgtttgtaacactggacgtcatgatgtgcaccgcatccattctgaacctgtgcgcgatctcaatagaccgatacacagccgtcgtcatgcccgtgcattaccagcatggaactggacagtcttcctgcagaagagttgccttaatgatcacagccgtgtgggtcctggcctttgctgtcagctgtccacttctgttcgggttcaatacaacaggtgatcccactgtctgcagcatatctaatccagatttcgttatctatagcagcgtagtgagcttttatctgcctttcggcgtcaccgtgctcgtttatgcacgaatctacgtggttctgaagcagagaagacgaaagcgaattctcacgcggcaaaattcccagtgtaactccgtcaggcccgggttcccacagcagacgctatctcctgatcctgcccacttggagttgaagcggtattactctatctgtcaggacaccgctcttggagggcctggatttcaggagaggggaggagagctgaagagagaggagaagacacgcaactccctaagccctaccattgccccaaagctgagcctcgaagtcaggaaattgagcaacgggcgcctaagtaccagcctgaaattaggccccctgcaacctagaggagtgccactgcgagaaaaaaaggccactcagatggtcgctatagtgttgggagccttcattgtctgctggctgccattttttttgacacacgtgctgaacactcactgtcagacttgccacgtgtcaccagaactgtattccgctactacttggctcggctatgtcaactccgccttgaaccctgtcatctacactactttcaatatcgaattccggaaagctttcctcaagatactctcctgttag

SEQ ID NO: 185797 - DNA, 1203 bp, synthetic construct
  misc_feature 1..1203: note = Description of Artificial Sequence: Synthetic coding sequence
  source 1..1203: mol_type = other DNA
atggccagcctgagccagctgagcggccacctgaactacacctgcggggccgagaacagcacaggtgccagccaagccagacctcacgcttattacgccctatcctattgcgcactcattctagccatcgtgtttgggaacggactggtgtgtatggctgtgcttaaggagcgcgccctccaaaccactacgaactacctcgtagtgagcttggctgtcgctgatctgctggtggccaccctcgttatgccttgggtggtctacctggaagtcacgggcggcgtttggaatttttcacggatttgctgtgacgtctttgtcacccttgacgtgatgatgtgtaccgcgtcaatcctcaacctttgcgctatttccattgatcgatacacagcagttgtcatgccagtgcactatcagcacggaaccgggcaaagctcgtgcaggagggtggcactgatgatcactgcagtgtgggttctggcatttgccgtgtcatgtccactcctcttcgggttcaatacaactggagacccgactgtttgctctatctccaaccctgactttgtcatatatagctccgtcgtgtcgttttacctgccttttggggtaactgtgctggtgtacgcaaggatctatgtggtgctaaagcagcggcgcaggaaacggattctcacgagacagaatagtcaatgtaacagtgtgcggcccggattcccgcaacagacacttagccctgaccctgcccacttggagctgaagagatactatagtatctgccaagatactgccctcggtggtccaggattccaagagcgggggggagagctaaaacgcgaggaaaaaacgcggaactcacttagcccaaccatagctcctaaactatcactggaagtgcgcaaactctcgaatggcagacttagtaccagtttgaagctggggcccctgcaaccacggggcgttccattgcgcgagaagaaagccacgcagatggtcgcaattgtgctgggcgctttcatcgtttgttggctgcctttcttcctgacccacgttctcaacacacactgtcaaacgtgccatgtctctccggaactatactccgccacaacctggcttggctatgtgaattccgcccttaacccggtaatttacactacattcaacatcgaatttagaaaggcgtttcttaagatcttaagttgctag

SEQ ID NO: 185798 - DNA, 1260 bp, synthetic construct
  misc_feature 1..1260: note = Description of Artificial Sequence: Synthetic coding sequence
  source 1..1260: mol_type = other DNA
atgggcaaccggagcaccgccgacgccgacggcctgctggccggccgcgggcctgcagcaggcgcatcagctggcgccagtgccgggctggcgggccagggagcagcagctctggttggaggagtactcctgatcggtgctgtcctggccggcaacagcttggtgtgcgtctcagttgccaccgaaagggcattgcagacccctactaacagcttcatcgtctccctggcagcggccgacctgctgctagctctgctggtgcttccactgtttgtatattctgaagttcagggaggggcgtggcttctgagcccacgcctctgtgacgccctgatggccatggacgtcatgctctgcactgcttctatttttaatctttgcgccatctccgtggacagattcgtcgccgttgctgtccccctaaggtataaccgccagggcgggagcagaaggcagctactcctcatcggagcaacctggttgctgagcgcggcagttgcagccccagtcctttgtggcctcaatgatgtgcgcggacgcgatcctgccgtgtgtagactggaggaccgggactatgtggtttactctagtgtgtgtagcttctttctaccatgccctctaatgctgttgctctactgggctacattccgcggtctacaacgatgggaggtggcccgcagagccaagctccatggtagagcaccccgacgaccttctggcccgggtcctccctcccctacacctcctgccccccggctgcctcaagacccgtgtgggcctgactgtgctccccctgcccccggattaccaagaggcccatgcgggcccgactgtgcacccgctgcgcctagtctgccccaggatccttgtggtccagactgtgctcctcctgcccccgggctgccacctgatccctgtggatccaactgcgccccccccgacgccgtgagagcagctgccctgccaccgcagacaccaccacagactcgaagacgtcggagagccaaaatcactggcagggagcgcaaagctatgagagttttgcccgttgtggtaggagccttcctcctttgctggacgcccttcttcgtcgtgcacattacccaggcattgtgtcctgcttgcagcgtccccccacgcctggtttcagccgttacctggctgggatacgtgaactccgctctgaaccccgttatatacactgtcttcaatgctgaatttagaaacgtattccgaaaagctctgcgagcctgttgctag

SEQ ID NO: 185799 - DNA, 1434 bp, synthetic construct
  misc_feature 1..1434: note = Description of Artificial Sequence: Synthetic coding sequence
  source 1..1434: mol_type = other DNA
atgctgccccccggcagcaacggcaccgcctaccccggccagttcgccttgtatcaacagctcgctcagggaaacgccgtcggggggtctgcaggagctcctccactgggcccgagccaagtggtgaccgcatgtctgctgaccctgctgatcatatggactctgctgggaaacgttcttgtgtgtgcagctatcgtgaggtcaaggcatttgcgagctaacatgacgaacgtattcattgtgtctctggcagtaagcgacctgtttgtggccctcctcgtgatgccttggaaggcagttgcggaagttgccggctactggccatttggcgcgttctgtgatgtttgggtcgcatttgatatcatgtgttcaactgcctccattctgaacctttgcgtgattagcgtggaccgttattgggctatcagccggcccttcagatataagcgcaagatgactcagagaatggccctggtaatggtgggactggcatggaccctatccatcctaatttcattcattccagtacaacttaactggcacagagatcaggctgcctcgtggggcggtctcgacctacctaacaacctcgccaactggacgccctgggaggaagatttctgggaaccggatgtaaacgcagagaactgcgacagcagcctgaaccggacatatgcaatttcctcctcactcattagcttctatatccctgtggccatcatgatagtgacgtacacaagaatttaccggatcgcccaggtgcagattcgacgcatttccagcctagagcgtgccgccgagcatgcacaaagctgtaggtcttccgccgcatgcgcccctgataccagcctacgagcatctatcaagaaggagacaaaggttttgaagactctgagcgttatcatgggagtgtttgtctgttgctggctgccctttttcattcttaattgtatggttccattctgctccggacatccagaagggcccccggccggttttccctgcgtcagtgagactacatttgatgtctttgtctggtttgggtgggctaatagctctctgaatcccgtgatctatgccttcaacgccgatttccaaaaggtcttcgcacaattgctggggtgcagccacttttgttctcgcacaccggttgaaacagttaatatatcaaacgagctgatttcttataaccaggatatcgtttttcacaaggagattgctgctgcctacatccacatgatgccgaacgccgtgactcccggtaatcgcgaggtggacaatgatgaagaggaagggcctttcgataggatgtttcaaatttatcagacttccccagacggggacccagttgcggagagtgtttgggaactcgactgtgaaggagaaatctctttggacaaaatcacaccattcacccccaacgggtttcactag

SEQ ID NO: 185800 - DNA, 438 bp, synthetic construct
  misc_feature 1..438: note = Description of Artificial Sequence: Synthetic coding sequence
  source 1..438: mol_type = other DNA
atggaccccgaggagcaggagctgctgaacgactaccggtaccggagctactcttcagttatcgagaaggccctgcgtaatttcgagtccagcagcgagtgggctgacctaatctcgtccctgggaaagctcaataaggcgctccagtccaacctgcgctactcacttctgcctaggagactgctgatcagcaagagactcgcccagtgtctgcatccagctctgccgtcgggcgtacacctgaaggcgctggagacgtatgagataatctttaagatcgttggaaccaagtggctcgccaaggaccttttcttgtacagttgtggactgttccctctgctagcccacgccgctgtatccgtgagacccgtattactcacgctgtacgagaaatattttctaccacttcagaagcttctcctgccctctctgcaatag

SEQ ID NO: 185801 - DNA, 6897 bp, synthetic construct
  misc_feature 1..6897: note = Description of Artificial Sequence: Synthetic coding sequence
  source 1..6897: mol_type = other DNA
atggaccccgaggagcaggagctgctgaacgactaccggtaccggtcatacagctctgttatcgaaaaagccctacggaattttgaaagctcctctgaatgggcagacctgatcagtagtcttggcaagctgaacaaggcgctccagtcgaatctgcgctactctcttcttcctcgcaggcttctgattagcaagcgattagcccaatgccttcatccagccctaccatcgggcgttcacctgaaagcccttgagacctacgagatcattttcaaaattgtgggaacaaagtggcttgccaaagacttgtttttgtactcttgtggcttgtttccactgctggcgcacgccgcagtgtctgtcagaccggttctgctgaccctgtacgaaaagtactttctgccccttcagaaactcttactgccaagcctgcaggcctttattgttggtctcctgccagggttagaagagggctcggaaatctcggatcggacagacgcactcctgctacggctaagtttggtagtagggaaggaggtattctacaccgcgctgtgggggtctgtactcgcatcgccgtccatcaggttgccggcatcagtctttgtggtaggacatattaacagagatgctcctgggagggaacagaagtatatgctaggtaccaaccatcagctgacagtgaagagtctccgggcaagtctgctggactccaacgtgctagtgcagcgcaataacctggaaatcgtcctgttcttctttcccttttatacatgtcttgattcaaatgagagggcaatccctttgctgagatcagacatcgtccgaatcctgagtgctgctacccaaactttgctgcggcgggacatgtccctgaatcgaagactgtatgcctggctgctcggctcagacattaagggcaacaccgtcgtgccggagtccgaaatcagcaatagctacgaggaccaaagctcttactttttcgagaagtattcgaaagatctccttgtcgagggactcgcggagattttgcatcagaagttcatcgacgctgacgtggaggagcgtcaccacgcatacttgaagcccttccgcgtgttgataagtcttctggataaacccgaaatcggacctcaggtcgtaggcaatttgtttcttgaagtgattagggcattttactcttattgccgggatgctttaggctcggacctcaaactgtcctatacacagtctggcaacagtcttatatcggcaatcaaggagaatcggaatgcatccgaaatcgtaaaaacagtgaatcttctcatcacaagcctgtcaactgattttctgtgggactatatgactcggtgcttcgaggagtgctttcgccccgtgaaacagcgatacagcgtcaggaactccgtgagcccacctcccacagtatccgagttatgtgcgttgctggtatttctcttagacgtcatacccctcgagctttacagtgaggttcagacacaatatctgccccaagttttgggctgcctcgtccagccgttggctgaagacatggaagctctgtctctgcctgagttgacccacgccctcaaaacttgctttaaagtgctctctaaggtccagatgccaccatcttatctggataccgaatccaccagtggcacctcaagtcccgtaaagggtgagaacggtaaaattatactggagacaaaggctgtgatacccggagacgaggacgctagtttcccgccactcaagtcagaggactcaggaatcgggctttcagcctctagccccgagttatctgagcatcttagagtacctcgtgtgtctttggagagggatgacgtgtggaagaagggagggagcatgcaacggactttcttgtgcattcaggagttaattgcaaatttcgccagcaaaaacatttttggagtccagttgacagccagcggtgaggagtccaaatcagaggagcccgcagggaaacgagacagggatggcactcagtccctggctgccaatgattccagtcgtaagaacagttgggaacctaaaccaatcaccgtgccccagtttaagcaaatgctctcagacctgtttacagcccgaggcagtccttttaagacaaaatcttcagaaagcccctcttcttctcctagttccccagcaaggaagaacggaggcgaatgggacgtggagaaggttgttatcgacctgggggggtcccgtgaggagaggcgggaagcatttgcggccgcttgtcacctgttgcttgattgtgccacattccccgtgtatctaagcgaggaagaaaccgagcagctttgcgcaaccctgttccagctgcccggggctggggacagctcgttcccctcctggctgaagtcattgatgaccatctgttgttgtgtaactgattgttaccttcagaatgttgctatctccactctcctggaagtaatcaaccactctcagagcctggccctagtcattgaggataaaatgaagaggtataagtcaagtggccataatccattctttggaaagctgcagatggtcactgtgccccccattgcacctggtatactcaaagtgattgctgaaaagaccgacttttaccagagagtcgctagagtgctgtggaaccaactgaacaaggaaactcgagaacaccatgtgacatgcgtcgagttattctatcggcttcattgcttagcacctactgctaatatttgcgaagacatcatttgccacgctctactggaccccgacaagggaacccgcctggaggcgctgttccgcttcagtgtaatttggcacctcactcgagaaatacagggcagtagggtcacatcccacaaccgttcctttgaccggagcctgtttgttgtgctggattccttagcgtgcaccgacggtgcaatcggggcggccgcccagggctggctagtgagagcgctttctcttggtgacgtggcccgcatcctggaacccgtgttgctgttgctgctgcagcccaaaacccagagaacctcaattcattgtctgaaacaggagaactccgccgatgacctgcaccgttggttcaacagaaagaaaacatctttccgcgaggcctgtgccgtgcccgagccgcaggagagcggcagcgaggagcatctgccattgagccaattcactacagtggatagggaagcaatttgggcagaagttgagaaagagcccgagaagtaccctctaagaggggagctttctgaggaagaacttccatactacgtggaacttccggatcgcacagcgcatggagccccggacagctccgagcatactgaatccgctgatacttcgagttgtcacaccgactcagagaacacatccagttttagcagcccctcacatgacctccaggagctgagcaatgaagagaactgttgcgcgcccattcctatgggaggccgagcatacccaaaaagatcggccctcctggccgcattccagagcgaaagctttaaggcaggcgccaagctgtcgctggtgcgggtcgacagcgacaaaactcaggcatctgaaagctttagcagtgacgaggaggccgacctggaactgcaggcacttacaacctctaggctcctgaagcaacaaagagagcgccaggaagctgtcgaggcacttttcaaacatattctattatatctgcagccttacgacagtcgaagagtgttgtatgcattttccgttctggaggcagtgcttaagaccaaccccaaagagtttatagaggccgtgagtagaacctccatggatacctccagtaccgctcacctcaacttaatatctaatcttctggccagacaccaggaagcattaattggtcagagtttttacgggaaactacagacccaagtgcctaacgtgtgcccccactccttgctacttgagttgttaacctatctgtgtctcagttttctgagatcctactacccttgttatcttaaagtatcccaccgcgacatcctgggcaatcgcgatgtgcaagtgaagagcgttgaggtactgatcagaattatgatgcaacttgtgagcgtagcaaagtcttccgagggcaagaacgtcgagttcatccatagtcttctacagcggtgtaaagtccaggaattcgtcctgctaagcctgagtgcatccatgtatacgtcccagaaacggtatggactggcgaccgctcaccacggtagggctctgcccgaggattccctgttcgaagagtccctgatcaatctgggccaggaccagatttggtctgaacatcctttgcagatcgaactgctcaagttactccaggtacttatcgtcttagagcatcatctgggaagagctcatgaggaggccgagaatcagcccgatctgtcacgggagtggcagcgagctctgaatttccagcaggccatctctgcacttcagtacgtccagccacaccctcttacctctcaaggactgctggtgtccgccgtggttaggggcttgcaacctgcttacgggtatggaatgcatcccgcctgggtttcattggtgacccactccctgccttacttcggtaaatccctgggttggaccgtcaccccttttgtggtgcagatctgcaagaatctagatgatctcgtaaaacagtatgaaagcgaatctgtcaaactgagtgtctccaccacgtccaaacgtgaaaatatcagtccagactatcctctgacgctcttagaggggctgacaaccattagccatttttgcctgctcgagcaggccaatcagaacaagaaaaccatggccgccggggacccagccaaccttcgaaacgccagaaacgccatccttgaagaattgccccggaccgtgaataccatggctctgctgtggaatgtacttaggaaagaagagacacagaagcggccggtggacctactgggcgcaacgaagggcagctcttcagtatatttcaagactaccaagaccattcggcagaagattttggatttcttgaacccacttactgctcatctcggggtgcagttaacggcggccgtggcagccgtgtggtctagaaaaaaagcccagagacactccaaaatgaagattatccccacggcatccgcaagtcagttgacattggtcgacctagtatgcgctctgtctacgctgcagacggacactctgctgcacctggtgaaagaagtggtgaagaggcctcctcaggtcaagggcggggacgagaagagtccactcgtggatatccccgtgctgcagttctgctatgcctttctccaacgcctccccgttcccgcattacaggagaacttttcttccctgctgggagttctgaaggagagcgtgcagctgaatcttgctccaccaggatactttttactcttgagcatgcttaatgattttgttaccagaacacctaatcttgaaaataagaaggatcagaaggacctccaggagattacgcagaaaatcttagaggccgtgggcaacatcgcagggagcagcttggagcagacatcctggttatctagaaaccttgaagttaaggcacagccgcaagcatccctggaggaatccgatgctgaagaggacctgtacgacgctgcagctgcaagtgccatggtctcaagtagtgctccgagcgtgtattcagtccaggctctcagcttattggccgaagtgctcgcctccttgctagacatggtttataggtcagatgaaaaggagaaagccgtacccctcatctcaaggctgctgtattacgttttcccttatctgcgtaatcactctgcctataacgccccgtcctttagggccggcgcacagttactgagtagcctgtcaggatacgcctacaccaagagggcttggcggaaggaagttctagagctctttctcgacccggccttctttcagatggacacaagctgtgttcactggaagtctatcattgaccaccttctcacccatgaaaagaccatgttcaaggatttaatgaacatgcaatcttcttcgcttaagctgttctcatctttcgagcagaaggctatgctgctgaaacggcaggcatttgcagtcttttcgggtgaactcgatcagtatcacctctacctgccacttatacaagaacgtctaaccgacaacctccgtgtcggccagacttcaatcgtcgcggctcaaatgtttctcttttttagagtgctgctattgaggatctccccgcaacacctgactagtctctggcccattatggtgtccgagctcatacagaccttcacccagttggaggaggatctaaaggacgaagatgaatcattgcgtagcactaataaagtgaaccggacgaaagtgagtgtgccagatgctaacggcccgtctgtgggagagatacctcagtccgaattgatactttacctgtctgcatgcaaatttcttgacaccgcactgtcctttcccccagataaaatgccgctatttcagatctacagatgggcattcattcccgaagtcgataccgagggaccagctttcctctctgatgtggaggagaaccatcaagaatgtaagcctcacaccgtgcggatcctcgagcttctgaagctcaaattcggcgagatcagtagcagtgatgaaatcaccatgaagagcgaatttcccctcctgaggcaacattccgtgagctccataagacaacttatgcccttctttatgaccttaaatggtgcctttaaaacccagcggcaactccctgctgatagccctggaactccattccttgatttccctgtgacagattctccgaggattctgaagcagttggaggagtgtatcgagtacgactttctagagcacccagagtgctag

SEQ ID NO: 185802 - DNA, 792 bp, synthetic construct
  misc_feature 1..792: note = Description of Artificial Sequence: Synthetic coding sequence
  source 1..792: mol_type = other DNA
atgttctacttccactgccccccccagctggagggcaccgccaccttcggaaatcactcgtcaggggattttgacgatggtttccttcgacgaaaacagcggcgtaaccgcacaaccttcaccctacagcagcttgaggccctggaagccgttttcgcccagacacactatcccgatgttttcacccgggaagaattggcaatgaagataaacctgaccgaggctagggtgcaggtatggtttcagaatcggagggcgaaatggcgcaaaactgaaaggggcgcctctgatcaagaacctggcgctaaggagccaatggcagaagtaacccctccacccgtgagaaacatcaactctccccctcctggggaccaggcccggagtaaaaaggaagcccttgaagcccagcaatctttgggaaggacagtgggcccagcaggcccgttcttcccatcttgtctacctggcaccctgctgaatacagctacatacgctcaagcactcagtcacgtcgcctctctgaaaggcggccctctgtgttcctgttgtgtccctgatccaatgggcctgtctttcctaccgacctatggttgtcaatctaaccgaactgcgagcgtagcaacgcttcgcatgaaggccagagagcactctgaggccgtgctgcagtccgctaatcttctcccctctaccagttcctctcccgggcctgtcgctaagccagcgccacccgatggctctcaggaaaagacaagtcccactaaggagcagtcagaagctgagaaaagcgtgtag

SEQ ID NO: 185803 - DNA, 807 bp, synthetic construct
  misc_feature 1..807: note = Description of Artificial Sequence: Synthetic coding sequence
  source 1..807: mol_type = other DNA
atggtgctgatgagctgcgaccagcggctgatcagcctgctgctggtcggaacagccacgttcggaaatcacagctctggcgatttcgacgatggatttctgaggcggaaacagaggcgcaatcggacgacattcacactgcaacagctcgaagcccttgaagcagtgttcgcacagacccactatcccgatgttttcaccagggaggagctcgccatgaagataaacctgaccgaagcgcgtgtgcaggtgtggttccagaacaggagggctaagtggcggaagaccgagcggggagcctctgaccaggagccaggagctaaggagcccatggctgaggtcacccctccacccgtccgaaatattaattccccacctcctggagatcaagctaggagtaagaaagaggctctggaagctcagcagagtcttgggaggaccgtcggtccggcaggcccgttcttcccttcatgcctgccaggcacacttctgaacaccgcgacttacgcacaggcactgtcccatgtggcttcgttgaagggcggtcccctttgctcatgttgcgtgcccgatcctatgggattatctttcctgcccacctatggctgtcagagcaatcgtaccgcttcagtggcgaccctccgcatgaaagcccgggaacacagcgaggctgtcctccagtctgccaacctgcttccatcaacctccagttccccaggcccagttgcaaagccagcaccccctgacggctcacaggagaaaacttctcctaccaaagagcaaagcgaggcagaaaagagcgtatag

SEQ ID NO: 185804 - DNA, 384 bp, synthetic construct
  misc_feature 1..384: note = Description of Artificial Sequence: Synthetic coding sequence
  source 1..384: mol_type = other DNA
atgaagctgaacgtggacggcctgctggtgtacttcccctacgactacatctacccagagcaattcagctatatgagagaactgaaacgaaccctggatgcaaagggacacggggtcttggaaatgccttcagggaccgggaagaccgtgtcactcctggctctcatcatggcttaccaacgagcttatccactggaggtgacaaagctgatctattgttcaaggacagttcctgaaatagagaaggtaattgaggagctgcggaaactgttaaacttttatgaaaaacaggagggcgagaaactcccctttctcgggctcgcgcttagctcgagaaaaaacctgtgtatacatcccgaaacaacttcagcttccacaccctag

SEQ ID NO: 185805 - DNA, 4614 bp, synthetic construct
  misc_feature 1..4614: note = Description of Artificial Sequence: Synthetic coding sequence
  source 1..4614: mol_type = other DNA
atgggcgagaagctggagctgcggctgaagagccccgtgggcgccgaaccggcagtttatccctggccactccctgtgtatgacaagcatcatgatgcggcccatgaaatcattgagaccattcggtgggtgtgcgaggagattcctgacctgaaactcgccatggagaattatgtgctcattgactacgataccaagtctttcgagtcgatgcagaggttgtgcgataagtacaaccgggcgatagacagtatccatcaactctggaaaggaaccacacagcccatgaaattaaacacaaggccttctacagggcttctgcgtcacatcttgcagcaggtgtacaaccactcagtgacagatcccgagaaactcaacaactacgaacccttctcacctgaagtatatggggagacttctttcgatttagtggctcaaatgattgatgaaatcaaaatgactgatgatgatctgttcgttgatctgggaagtggagtaggccaagtcgtcttgcaggtagccgcagcaacgaactgcaagcaccactacggtgtagaaaaggccgacatccccgcaaaatatgccgagaccatggatagggagtttcgtaagtggatgaagtggtatggcaagaagcacgccgagtacacccttgagagaggtgatttcctctcagaggaatggcgagaaaggattgctaacacttccgttatatttgtgaataactttgccttcggacctgaagtggaccaccagctcaaggaacggtttgccaatatgaaagaaggcgggcgaatcgtttcaagcaaaccctttgccccactgaatttccggatcaactcacggaacttgtccgatatcggtacaattatgagagttgtggaacttagcccactgaagggcagcgtctcatggacagggaagcctgtttcatattatctgcacacaatcgaccgtacgatcctggagaattacttctcatccctgaagaatcccaagttacgcgaagagcaggaagctgccagacggcgtcagcagagggagtctaaatcaaacgctgcaacccctacaaaagggccagagggtaaggtggcgggccctgcggatgcccccatggattccggagccgaagaagagaaggcaggcgcagctacggtcaagaaaccaagccccagcaaggccaggaaaaagaagttgaataagaagggcagaaaaatggcaggccgcaagcgtggccgaccaaagaagatgaacacagctaatcctgaacgtaaaccaaaaaaaaatcagaccgccctggatgctctccacgcacagaccgttagccagacggctgcttcaagtcctcaggacgcctacagaagcccccactcacccttctatcagctgccccccagcgtgcagcgtcactcccccaacccactcctcgtggcacctacacccccagccctgcagaagctactcgagtcattcaagattcagtatttgcagttcctcgcctacactaagacgcctcaatacaaggctagccttcaggagctcctgggacaggaaaaagaaaaaaacgcgcagttactgggcgcagctcagcagctgctttctcattgtcaggctcagaaggaggagattcggaggttgtttcagcagaagttagacgaacttggtgtcaaggcactcacgtacaatgaccttatccaagcacagaaggagatctccgcccacaatcagcaacttcgcgagcaatctgaacagctggagcaagataaccgtgcccttagaggacagtctttacagctgctcaaagcgcgctgtgaggagcttcagctcgactgggcaacattgtcgctcgagaaactgctgaaggagaagcaggccttgaaatcccaaatatcagagaagcagcgacactgtctggagctgcaaatttcgattgtggaactcgagaagtcccagaggcaacaagagctcctgcaactaaaatcatgtgtgcctcctgacgatgccctgagtctccatctgcgcggaaagggggcactgggaagagaactcgagccagacgcctctcgactgcatctggaactggattgtactaagttttctttgcctcatctgagtagcatgtcacctgagctgtctatgaacggtcaagctgctgggtacgagttgtgcggggtcctttctcgaccatcaagcaaacagaatactccacaatatctagcttctccattagaccaagaagtggttccttgcaccccatcccatgttggccggcccagacttgagaaactgagtggactggccgctcccgactatacccgcctctcccctgccaagatcgtcttacggcgacacctatctcaggaccacaccgttcctggccggcctgctgcatctgagctacacagtagggcagagcataccaaggagaacgggttaccttaccaatccccctctgttcccgggagcatgaagctcagtccgcaggaccctcgccctctctctcctggagcactacagcttgctggggaaaaaagttccgaaaaaggcctgcgcgaaagggcctatgggtcctccggggagcttattacctcattaccaattagtatcccgctgagtacggtgcagcccaataaactgcccgtatctatccctcttgccagcgtcgtgctaccttccagagctgagagggcgagaagcaccccttctcccgttctgcagcccagggacccttcatccaccctcgagaagcagatcggggccaacgcacatggcgctgggtcccggtctctggccctggctcctgccggcttcagctacgcaggcagtgtggccataagtggcgccctggccggatcacctgcgtctctgactcctggagccgaaccggcgactctggatgaatcaagcagcagcggctccttatttgctactgtcggaagtcggtcttccaccccacaacatcctctgcttttagctcagccccggaactctttgccggcctcccctgcccaccaattatcaagttccccaagactcggtggggcggcccagggccctttacctgaagctagcaagggggatcttccaagtgactctggtttttcagatcccgagagcgaagctaaacggcgtatcgtcttcaccatcactaccggggccggcagtgctaagcagtctccctcctccaaacactctccgttgaccgctagcgcacgcggtgattgtgtaccatcccacgggcaggacagccgacgcaggggcaggcggaaaagggctagcgcgggcacaccaagcctaagcgcgggagtctctcctaagaggcgggccctgccgtctgttgcaggcctgtttacacagcccagcggatcccctcttaacctgaactcaatggtaagcaatatcaaccaacccctggaaataacagccatctcctcccccgagacttcgctgaagtcatcacccgtgccataccaggaccacgatcagcctcccgtgcttaaaaaagaaaggcccctgtctcaaactaatggggctcactacagcccattgaccagcgacgaggagcccggctcagaagacgagccttccagtgctagaatcgaacggaagattgctacaatatccctggaatccaaatcacctccgaagactttggagaacggtggcgggctcgcaggccgaaaacccgctcccgccggggaacccgtgaactcatccaagtggaagagcactttctcaccaatttctgatatcggcctcgcaaaaagcgcagattcacccctccaggcttcttcggctctctcacagaatagtctctttacttttcgcccagcactggaggagcctagtgccgatgctaagctagcagcgcacccacgcaaggggtttcctggctctctgagcggcgccgacggtctctcccctggtaccaacccagcgaatgggtgcacatttgggggagggctggccgccgacctcagcctccacagttttagcgacggcgcttcactcccccataaagggcccgaggcggctggcttgtcgtcgcccctgagctttccttcccagcgaggtaaggagggctcagacgctaacccatttttgtcgaagaggcagctggacggacttgctgggcttaagggagagggatcccgtggtaaggaggcaggcgaagggggcctgcctctgtgcgggccaaccgacaaaactccgcttcttagtggcaaggccgccaaggctagggaccgagaagtcgatctcaaaaatgggcataatctcttcatcagcgctgcagcggtgccccccggctccctactatccgggcctggtttggcaccggcagcgtcttctgccggtggggctgcctcctcggcgcagactcatagatcattccttggaccattcccgcccggtcctcagtttgcccttggaccgatgagccttcaagccaacctgggttctgtggcgggctcgtctgttttacagagcctcttttctagcgtgcctgcggcagctgggctcgtccatgtttcaagtgctgcaacgcgattgactaattcgcacgctatgggcagtttctccggcgtggctggcgggaccgtcggggggaactag

SEQ ID NO: 185806 - DNA, 1203 bp, synthetic construct
  misc_feature 1..1203: note = Description of Artificial Sequence: Synthetic coding sequence
  source 1..1203: mol_type = other DNA
atgcggggccggcggggcgaccggatgaccatcaacatccaggagcatatggctataaacgtgtgtcccggtcccatccgtccaattagacaaatcagcgattacttcccacgggggcctggcccagagggcggaggcgggggcggtggtgaggccccagctcacctggtgccgctggctctggcacctcccgcggctctgctgggcgccaccaccccagaagatggcgctgaggtggacagctacgacagtgacgatgccacagctctggggacactggagtttgatctgctgtacgaccgggcttcctgcactctgcattgttcaatcctaagagccaagggcctgaaaccaatggacttcaatggcctcgctgacccgtacgtcaagctgcaccttctccctggagcatgcaaggccaataagctgaagacgaagactcaacggaacaccctaaatcccgtctggaacgaagatcttacgtatagcggaattacagatgatgatattacccacaaggtgctccgcatcgcagtgtgcgatgaggacaaactcagtcacaacgagttcatcggcgaaatacgggttcctctccgtaggcttaaacccagccaaaagaagcactttaacatatgcttggaaagacaagtccccctggcttccccatctagcatgagcgcagccctgcgaggaattagctgctacctcaaggagctcgagcaggccgagcagggccagggcttactagaggaacgagggaggattcttctcagtctgagctattctagcagaagaagaggattacttgttggaattttgaggtgtgcgcatcttgctgccatggacgttaacggctacagcgacccttatgtcaaaacttacttaagaccggatgttgataaaaagagcaaacacaagacatgcgttaaaaaaaagacacttaaccccgagtttaacgaggagttcttctatgagatcgaacttagcactctagcaacaaagacgttagaggtgacagtgtgggactacgatatcgggaaaagcaatgactttataggcggcgtgtcccttggccccggggccagaggcgaagcaaggaaacattggagcgactgtctacagcagccagacgccgcgctggaacgttggcacacacttaccagtgaactgccacctgctgccggtgctttgtctagcgcctag

SEQ ID NO: 185807 - DNA, 927 bp, synthetic construct
  misc_feature 1..927: note = Description of Artificial Sequence: Synthetic coding sequence
  source 1..927: mol_type = other DNA
atgaccctgcggcggcggggcgagaaggccaccatcagcatccaggagcacatggcaatcgacgtatgtcctgggcccattcgccctatcaaacaaattagcgattacttcccgcgtttcccaagaggcttacctcctgacgccggcccgagggctgccgcccctccagacgcgccagccagacctgctgttgccggagcaggtcggagatctcctagcgatggtgctagggaggatgacgaggacgtggaccagctttttggagcctacggcagctctcccgggccttcacccggtccgtcaccagcaaggccacctgctaagccaccggaggacgagccggacgctgatggctacgaatcagacgactgcactgcccttggaacactcgacttctctcttctatatgatcaggagaacaatgccctccattgcacaatcaccaaagcaaaaggtttgaagcctatggaccacaatggcctagcagacccctatgtgaagctacaccttctgccgggtgccagcaaagccaataagctaagaactaagactttgcggaatactctgaacccaacatggaatgagacactcacctactatggcatcaccgatgaggacatgattcgcaagacattaagaatctcagtgtgtgacgaggacaagttccggcataacgagtttataggagagacccgggtgcctctcaagaagctgaagccaaatcacacgaaaaccttctccatttgtttggaaaagcagctgcccgtggataagactgaggataagagtctggaggagcgagggcgcatcctgatcagtctcaagtactcttcccagaagcaggggttgctcgtaggcatcgtccggtgcgcccacctggcggccatggatgccaacggttacagtgatccctatgtaaagacgtag

SEQ ID NO: 185808 - DNA, 927 bp, synthetic construct
  misc_feature 1..927: note = Description of Artificial Sequence: Synthetic coding sequence
  source 1..927: mol_type = other DNA
atgaccctgcggcggcggggcgagaaggccaccatcagcatccaggaacacatggcaatcgacgtgtgtcctggcccaatcagaccaatcaagcagatttccgactattttccccggttcccaagaggtctcccacctgatgccgggccacgagctgctgcccctcccgatgctcccgccagacctgctgtcgccggggctggccgcaggagcccctcggatggcgcaagagaggacgacgaagatgttgatcagctctttggcgcctatggatcatcaccagggccctcccccggaccttcccccgcccgcccgcctgccaaaccacctgaggatgaacccgatgccgatggctacgagtccgatgactgtaccgccctgggaacgttggacttcagccttctttacgatcaggaaaataacgcactccactgtacaattacgaaagctaaaggactaaagccaatggatcacaacggactagccgacccatatgtgaagctccacctactgcctggtgcatctaaggctaacaaattacggaccaaaaccctgcggaacacactgaatcctacttggaacgaaactctgacctactacgggataactgacgaggatatgattcgtaagactctgagaatttctgtctgtgatgaggataaatttcggcacaacgagtttatcggagaaactagagtgcctttgaagaagttgaagccaaaccacactaaaactttcagcatttgtctggaaaagcagttacccgtggataaaaccgaagataaaagcctggaggagcgaggaagaatcttgatatctctgaagtacagcagtcagaaacagggactcctagtcggtatcgtgcgatgcgcccaccttgcagcgatggacgcaaacggatacagtgacccatatgtgaagacatag

SEQ ID NO: 185809 - DNA, 1275 bp, synthetic construct
  misc_feature 1..1275: note = Description of Artificial Sequence: Synthetic coding sequence
  source 1..1275: mol_type = other DNA
atggccctgcccacccccagcgacagcaccctgcccgccgaggccaggggacgggggcggagaaggcggctggtctggactcccagccagtcggaggccttgcgtgcctgtttcgagcgtaatccctaccccgggatcgccacgagggagagactcgcgcaagctattggaatccccgagccccgggtgcagatctggtttcagaacgaacgtagccggcagctccgacagcatcgccgcgagagccgcccctggccaggacggcgcggtcctcccgaaggaagaaggaaacggacagctgtgacgggatctcagaccgctcttttgttaagagcttttgaaaaggataggttccccgggatagctgcccgggaggaattggcccgggagaccggattaccagagtctaggatccaaatttggtttcagaacaggcgggctcgacatcccggtcaggggggcagagcaccagcgcaggctggtggactgtgctcagctgccccgggcgggggccatccagcaccatcctgggtcgcattcgctcatacaggcgcgtggggtactgggctgcctgctcctcatgtcccctgtgcacccggggccttaccgcagggagccttcgtcagtcaagctgctcgcgctgctcccgcccttcagccaagccaggccgcccctgcagagggcgtgtcacaacctgcaccagccagaggcgacttcgcatacgccgccccagcgcctcctgacggcgcactgtctcaccctcaggctccacgatggccccctcaccctggtaagagccgagaagatagagatcctcaaagggacggactcccgggcccttgtgccgttgcgcagcccggcccagcccaagctggcccacagggacaaggcgtccttgccccaccaactagccagggaagtccttggtggggctggggacgaggacctcaagtggccggcgcagcctgggagccacaggctggtgccgcaccccctccccaacccgcgcccccagatgcctcagcctccgcccgccagggccaaatgcaaggaatcccggctccctctcaggccctgcaggaaccggcgccctggtctgcactgccttgtgggctgctgttggacgagctcctggcttcgcccgagttcctgcagcaagcacagccgctactggaaactgaagcccccggtgagctcgaggcttcagaagaagccgcatctttggaagcccctctctcagaggaggagtatcgcgcactactcgaagaactgtag

SEQ ID NO: 185810 - DNA, 1458 bp, synthetic construct
  misc_feature 1..1458: note = Description of Artificial Sequence: Synthetic coding sequence
  source 1..1458: mol_type = other DNA
atgaagggctggagcctgcccgcctgcggccccctgcagggccggctggcaggttggttggcagtgcgcgctggcctccttgctgccccagctgcggtacattcccctgcagaggttcacgggtcaccgcctgctagtctctgccccaggccctccgtcaaatttcggcccgggctgacagccatggcactacccacgccaagcgactctacgttgccagctgaagcccgaggtcgaggcagacgtcgcagactcgtgtggaccccaagtcagtcggaagctctacgggcctgctttgaaaggaatccatatcctggaatcgccaccagagaacggcttgcccaagcgattgggattcccgagccccgggttcagatctggttccaaaacgaacgcagccgacagctccggcagcatcggagggagtctcgtccctggcctggccgcagagggcccccagagggcaggcgaaagcggaccgccgtaactgggtcccagacagcactgctgttgcgtgcctttgaaaaagatcggttcccgggcatcgccgcccgagaagaattggctcgggagacgggcctgccagagagccgcatccagatttggttccagaaccgccgtgcgcggcatccagggcaggggggccgcgcccctgcccaggccggaggactatgttcagctgcgcccggcggaggacatccagcaccgtcatgggtcgcttttgcccacacaggggcctggggtactggactgccggcaccccatgtaccttgcgctcctggagcgttacctcagggggcattcgtttcacaggccgccagggccgcccctgccttgcaaccatcacaggcagcacccgcagaaggggtgagtcaacccgcacccgcccgcggagacttcgcctacgcagccccagccccgcctgatggagctctgtcgcatccccaggctccccggtggcccccccaccccgggaaatctcgagaggaccgcgacccacaacgcgatggccttccaggaccgtgtgccgtggcccagcccggcccagcccaggcaggacctcagggacagggcgtgcttgccccgcccacatcccagggcagcccatggtggggttggggccgggggccacaggtcgcaggcgccgcctgggagccacaggctggcgctgctccccccccccagcccgctcctccagacgcatcggcctctgctagacaggggcaaatgcagggtattcccgccccaagccaggcattacaggagcctgctccctggagcgctctaccttgcggactgcttcttgacgagctattggctagtcctgagtttttgcagcaggctcagcctcttcttgagacggaagctcccggtgaacttgaggcttctgaagaggccgcctcgctggaggcaccactgtctgaagaggaataccgggctctactcgaagaattatag

SEQ ID NO: 185811 - DNA, 1326 bp, synthetic construct
  misc_feature 1..1326: note = Description of Artificial Sequence: Synthetic coding sequence
  source 1..1326: mol_type = other DNA
atgaagaccctgcccctgcacagccactgcaccgagatgcagcggttactgccaaaacttgaaatgctgactttggggtcttctttctgttctctgcagggtgaattttgtcaggcaatggattcatttactacagtcagccacgtgggcatgtgtgaggaaacagacgcatcgtttaacgtctttagccctaagtttcagttcgatagaagccactgtcagagtctgcgattccaccagaatatggagctggacttcgggcactttgacgagcgcgataagacctcaagaaatatgcggggctcccgaatgaacggcctcccaagtcccacacattcagcgcattgttcattctacagaacccggactttacaggcactgtctaatgagaagaaggctaagaaggtcaggttttaccgcaacggtgaccgttatttcaaggggattgtgtatgccgtgagctctgaccgattcagaagctttgatgccctgctggcagatttgacccgatcgcttagcgacaacatcaaccttccacagggagtacgttatatttacacaatcgacggctcaagaaaaattggaagtatggatgagctcgaagaaggcgagagttacgtgtgcagcagtgacaacttctttaaaaaggtcgaatatacaaagaacgtgaatccaaactggtctgtcaacgttaaaacgtctgccaacatgaaggctccacagtccctggctagttccaacagcgcacaagcacgagaaaacaaggatttcgtgcgccccaagctggtcaccatcatccgcagcggcgttaagccaagaaaggctgtccgggtgctgttaaataaaaagacagcccactctttcgagcaggtgctgactgatattaccgaagccatcaaactggagactggcgtggtgaagaagttgtacacgcttgatggaaaacaggttacctgtctgcacgattttttcggcgatgacgacgtcttcattgcatgcggcccagagaagttcaggtatgcccaggacgacttctccctcgacgagaatgagtgccgcgtgatgaagggaaatccatcagctacggctggccccaaggccagccccaccccacagaagaccagtgcaaagtcaccgggacctatgcgaagatctaaatcgcctgcagacagcgcgaacggcacttccagcagccagttgtctacaccaaaatccaaacaatcacctatctctacccccactagcccaggctcacttcgcaagcataaggacctgtacctgcccctcagcctcgacgattcagactccctgggggactccatgtag

SEQ ID NO: 185812 - DNA, 1098 bp, synthetic construct
  misc_feature 1..1098: note = Description of Artificial Sequence: Synthetic coding sequence
  source 1..1098: mol_type = other DNA
atggagctggacttcggccacttcgacgagcgggacaagaccagccggaacatgcgtggatctagaatgaatgggctgcccagcccaactcatagcgcccactgtagcttctaccgcacccggaccctccaggcgttgagcaacgaaaaaaaagccaagaaagtgcggttctaccgcaacggcgaccggtatttcaagggtattgtctatgcggtgtcctccgacagattcagatcatttgatgcgttgctcgctgatttgactcgttcactcagcgacaacattaatttgccacagggcgtgcgttatatatacaccatcgatgggagccggaagataggctccatggatgaactggaggaaggggagagctatgtctgctcttcagataacttctttaagaaagtcgaatacaccaaaaacgtgaaccctaactggagcgtgaacgtgaaaacgagtgcaaatatgaaggccccacagagcttagcatcttccaactctgcgcaggcacgtgagaataaggactttgtcagacctaaactcgtcacaatcatccggtccggcgttaagccgcggaaggctgtgagagtactgttgaataaaaaaactgctcattcctttgaacaggtactgacagacatcaccgaggctattaaactcgagacaggagtcgtgaaaaagctttacacccttgatggcaaacaagtaacatgcctgcatgacttctttggggatgatgacgtcttcattgcctgcgggccagaaaaatttcggtatgctcaggacgacttcagcctggacgagaatgaatgcagagtcatgaagggcaatccttcagccaccgccggccccaaagcttccccaacaccacaaaagacatcagccaagtctcccggccctatgcgtcgctcgaagagtcccgcagactctgggaatgaccaggatgccaatggtaccagctcatcccagctgagtacacctaaaagtaagcaatcccccatttcaacccccacatcccctggctcgctccgcaaacataaggacctctacctccctctgtcccttgacgactccgacagcctgggtgactcgatgtag

SEQ ID NO: 185813 - DNA, 1098 bp, synthetic construct
  misc_feature 1..1098: note = Description of Artificial Sequence: Synthetic coding sequence
  source 1..1098: mol_type = other DNA
atggagctggacttcggccacttcgacgagcgggacaagaccagccggaatatgagaggcagtcgcatgaatgggctaccctcgcccacccattccgcccactgtagtttctaccggacacgaacccttcaggccctgagcaatgagaagaaggccaagaaagtacgattctatcggaacggtgatcgatacttcaaaggtattgtctacgccgtgtcttcagaccggttccgaagttttgacgccctgctcgccgacttaaccaggagtcttagtgataatatcaatctgccccaaggtgtcagatacatttataccatagacgggtcccgcaaaataggcagtatggacgaactagaagaaggggagtcctacgtttgtagctctgacaactttttcaaaaaagtcgaatataccaagaatgtgaaccccaattggagcgtcaacgtgaaaacgagcgcaaatatgaaggctccccaaagtctggcttcttccaactccgcacaggcgcgggagaacaaggatttcgtgaggcctaagctggtgacgattatcagatccggggtgaagcctagaaaagccgtccgcgtgttgctgaacaagaagacagcccacagcttcgagcaggtcttgaccgacatcaccgaagcaatcaaattagaaactggcgtagtaaagaaattgtacaccctcgatggaaaacaggttacatgcctgcacgatttttttggcgatgacgatgtgtttatagcctgtggccccgaaaaatttcgctatgcccaagacgatttcagtcttgacgagaacgagtgtcgtgttatgaagggcaatccctcggccactgcagggccgaaagcatcccccactccacagaaaacgtcagcaaaatcaccagggccgatgcggagatcaaagagtcctgctgattccggtaacgaccaggacgccaatggtaccagcagcagccagctatccacccccaaaagcaaacagagccccataagcacaccaacctctccagggagtcttcgtaagcacaaggatctctatcttcccctttctctggatgattcagattctcttggcgattctatgtag

SEQ ID NO: 185814 - DNA, 1317 bp, synthetic construct
  misc_feature 1..1317: note = Description of Artificial Sequence: Synthetic coding sequence
  source 1..1317: mol_type = other DNA
tgatgcaccgagatgcagcggctgctgcccaagctggagatgctgaccctgggtagctctttctgtagtctacagggggagttttgccaggccatggacagcttcaccaccgtgtctcacgtagggatgtgtgaggaaaccgacgcatccttcaacgtgttttctcccaagttccagttcgataggtcacactgccagagtcttagatttcaccagaacatggaactggatttcgggcatttcgatgagagggacaagactagccgtaatatgagggggtctaggatgaatgggctgccgtcgccgactcactccgcgcactgttctttttataggacccggaccttgcaggcactgtcaaacgagaaaaaagctaagaaagtccgtttctatcgcaatggcgatcgctacttcaagggaatagtgtatgctgtttctagcgatcgttttcgcagctttgacgcactgctcgctgacctgactcggtcactgagtgataacataaatttgccccagggagtgaggtacatttacacgattgacgggagcagaaaaattggatccatggatgagctggaagagggcgagtcctacgtgtgctcctcagataatttctttaaaaaagtagagtataccaagaacgttaatcccaattggagtgtgaatgttaagacctccgcgaatatgaaagccccacagtcactagccagttctaatagtgctcaggctagagagaacaaggacttcgttaggcctaagcttgttactattattcgcagcggcgttaagcccaggaaggcagtgcgggtactactgaacaagaaaacagcacactctttcgaacaggttctgaccgatatcactgaggccattaaattagaaacaggggtcgtgaaaaagttgtataccttagatgggaagcaagtgacatgtcttcatgactttttcggagacgacgatgtcttcatagcctgcggtcctgagaagttcagatacgctcaggatgactttagcttagatgagaacgagtgtcgtgtgatgaagggaaacccttctgccacggctggacctaaggcctcgcctaccccacaaaaaacctctgcaaagtctcccggaccaatgcgccggtccaagtctcctgctgactccggcaacgatcaggacgctaatggtacaagcagttcccaactctctacacccaagtcaaagcagtctcccatatccacccctacgagcccgggtagcctgcggaaacacaaagacctgtacctgcccctatcgctggatgatagcgacagcttaggagattctatgtag

SEQ ID NO: 185815 - DNA, 1083 bp, synthetic construct
  misc_feature 1..1083: note = Description of Artificial Sequence: Synthetic coding sequence
  source 1..1083: mol_type = other DNA
atggagctggacttcggccacttcgacgagcgggacaagaccagcagaaatatgcggggcagccgtatgaacggtctgccctctcccactcacagcgcacactgctcgttctacagaactcggacactgcaggcattgtctaatgaaaagaaagcaaagaaagtgcggttttaccggaacggagacagatacttcaagggcatagtgtatgccgtctctagtgaccgcttcagatccttcgatgccctgctagctgatctcacccgttcactctccgataatattaatttgccccagggtgtgagatatatttataccatagatgggtcgcgaaagatcggctcaatggatgagctggaggaaggagagtcctacgtgtgtagctccgataactttttcaaaaaagtggagtacaccaaaaatgtcaatccaaactggtctgtcaacgtgaagaccagcgccaatatgaaagcaccacagagcctggcctctagtaactccgcgcaggccagagaaaacaaagatttcgtgcgcccgaaattggtgaccattattaggagcggcgtgaaaccaaggaaagccgttcgggtgctgctcaacaagaaaaccgctcattcctttgagcaagtactgactgatattactgaggcaatcaaactggaaaccggcgtggtgaagaagctatacaccctggacggaaaacaggtcacatgtcttcacgacttcttcggggatgacgatgtgtttatcgcgtgtggccctgagaaatttcgctatgcccaagacgatttcagccttgatgaaaacgagtgtcgagtaatgaaaggaaacccaagcgccaccgccggccctaaagcatcccccaccccccagaagacttccgccaaatctcccggaccgatgcggaggagcaaaagtcccgccgactcagccaatggaacgagctccagccaattgtctacacccaaatccaagcaatcgcccatcagtacccctaccagtcccggatcactgaggaagcacaaggacctgtacttgcctctgtccctggacgacagcgattccctgggcgattctatgtag

SEQ ID NO: 185816 - DNA, 342 bp, synthetic construct
  misc_feature 1..342: note = Description of Artificial Sequence: Synthetic coding sequence
  source 1..342: mol_type = other DNA
atggagctggacttcggccacttcgacgagcgggacaagaccagcagaaacatgaggggttcacgcatgaacggtctaccctcgcccactcactcggctcattgctctttctatcgcacaagaaccttgcaagccctgtctaatgagaagaaggccaagaaggtcaggttctacagaaatggggaccggtacttcaagggcatagtttacgcagtaagctcagacagatttcgcagctttgatgcgttactagccgaccttacacggagcctgtccgacaacattaacttaccacaaggagtgagatacatctatacgatagacggatcaaggaagatctag

SEQ ID NO: 185817 - DNA, 1083 bp, synthetic construct
  misc_feature 1..1083: note = Description of Artificial Sequence: Synthetic coding sequence
  source 1..1083: mol_type = other DNA
atggagctggacttcggccacttcgacgagcgggacaagaccagccgtaacatgcgcgggagtagaatgaatgggcttcctagtcctactcatagcgcccactgttcattctatagaactagaacccttcaggcactgagtaacgaaaagaaggctaaaaaagtgagattctacaggaatggagatcgttactttaaaggaatcgtgtacgctgtatcaagtgaccggtttaggtcctttgacgcgctgctggcagacctgacaaggagcctttcagacaacatcaatctccctcagggagtgaggtacatctacaccatcgacggctcaaggaagattggatccatggacgaactggaggagggcgaatcttacgtctgcagctccgacaacttcttcaaaaaagttgaatatacaaaaaacgtcaaccccaattggtctgtaaacgtcaagacttcagccaacatgaaagccccgcaaagcttagcctcatcgaactccgctcaagccagggagaacaaagatttcgtgcggccaaagctcgttacgatcatccgttccggtgtcaagccccggaaagcagtccgggtccttctcaataaaaaaactgcccattctttcgaacaggtgctaactgatataacggaagctatcaaacttgagacgggcgtcgtgaagaagctgtacaccttagacgggaagcaggttacttgcctacacgacttctttggagatgatgatgtattcatcgcctgcggtcctgaaaagttccggtacgcccaagacgactttagtttagatgaaaacgagtgccgagtcatgaagggtaacccttccgctacagccgggccgaaggctagtccaaccccccaaaagacctcagcaaagtccccgggtccaatgagaaggagtaaatctccagccgacagcgcgaatgggacttcttcatcacaactcagcacccccaagtcaaaacaaagtcccatttcgacacctacctccccgggatccctccggaaacacaaagatttgtaccttcccttgagtcttgacgatagtgactccctcggggattctatgtag

SEQ ID NO: 185818 - DNA, 1065 bp, synthetic construct
  misc_feature 1..1065: note = Description of Artificial Sequence: Synthetic coding sequence
  source 1..1065: mol_type = other DNA
atggccaagaccggcgccgaggaccaccgggaggccctgagccagtcctcgcttagcttgttaaccgaagccatggaagtactacagcagagctctccagagggcacccttgacggtaacacagtgaatcccatctataagtacattctcaacgatctgcccagagaatttatgtcaagccaggctaaagccgtgatcaaaaccactgacgactacctgcagtcgcagttcggtcccaatcgccttgtacattctgccgctgtctcagaaggctccgggctgcaggactgttctacacaccaaaccgcttctgaccattcccacgacgagatcagcgatcttgacagctataagagcaatagcaagaacaattcttgtagtatctccgcatcaaagcggaaccggcctgttagcgcccctgttggccagctcagagtcgccgaatttagctccctcaagttccagtctgcacgcaactggcaaaaattgagccagagacacaaactgcagcctcgggtgataaaggtcacggcatataagaacggtagcagaaccgtctttgcacgggtcactgtgcctaccatcacactcttgctggaagagtgtacagaaaagctcaatctgaacatggctgccaggagggttttcctagctgatggaaaggaggccttggagccagaagatatcccgcatgaggccgacgtttatgtctccactggggaacccttcttgaatcctttcaaaaaaattaaggatcacttactgttaatcaagaaggtgacgtggactatgaatgggctgatgctgcctaccgatattaaaaggagaaaaactaagccggttctgtcaattcggatgaagaagctcaccgaaaggacatctgtcagaattttgttctttaaaaatggtatgggtcaggacggtcacgaaataaccgttggaaaggagactatgaagaaggtcctggatacctgtaccatccggatgaaccttaatctgcccgctaggtacttctacgatctgtatggtaggaaaatcgaggacatctccaaggggaaacattag

SEQ ID NO: 185819 - DNA, 690 bp, synthetic construct
  misc_feature 1..690: note = Description of Artificial Sequence: Synthetic coding sequence
  source 1..690: mol_type = other DNA
atgaagatgtggaacaactggggctggtgcggcggccggcggcggggttgtacgaagatcctcagcacaaaaaagggcatccagatgtcgattaagaacaaacaccttattgtcatcccagctttcagccacacgatgagtcagctggactttgacttccactgtgtcttcgtgagcatcgacgaaggaatattcaaagcaggcgccgagcgctctgagacccgaggcgccgctgaggtccaggaagatgaagacacccaggtggaggttcctgttgaccagagacccgctgagatagttgacgaagaagaagacggagaaaaggccaacaaagacgccgagcagaaggaggacttttcaggaatgaacggcgaccttgaggaagaaggcggtagagaagccactgatgcccccgaacaagttgaagagattctggaccacagtgaacagcaggcccgcccagctcgcgtgaatggcggaacagatgaggagaacggagaggagctgcaacaagtgaacaatgaactacagctggtcctggacaaggagaggaagagccagggcgccggcagcggtcaagacgaggctgacgtggacccgcaaagaccacctagacctgaggtcaagataacctctccagaagagaatgagaacaatcaacagaataaggactacgccgcagttgcctag

SEQ ID NO: 185820 - DNA, 1431 bp, synthetic construct
  misc_feature 1..1431: note = Description of Artificial Sequence: Synthetic coding sequence
  source 1..1431: mol_type = other DNA
atgagcggcagcagcgcccggagcagccacctgagccagcccgtggtcaagtctgttctggtctatcgcaacggagaccccttctatgccggccgccgcgttgtgatccatgagaagaaggtgtcgagttttgaggtattcttaaaggaagtaaccggaggggtccaggctccattcggcgccgtgcgcaacatttacaccccccgaaccggtcaccgtatccggaaactcgaccaaattcagtctgggggaaattacgtcgccggcggccaggaggcctttaagaaactgaattacctggacataggcgagataaagaaaaggcccatggaagttgtaaatacagaggtgaaacccgtcatacattcaagaatcaacgttagtgcgcgcttcaggaagcccttgcaagagccgtgcacgatttttcttattgcaaatggggacctcattaatcctgcttcacgtctccttatcccccgaaaaacactcaaccagtgggatcacgtgctgcagatggtgaccgagaagatcacgctgaggagcggcgctgtccacagattgtataccctagagggcaaactggtagaatcaggtgcggagcttgagaacggtcagttttatgtcgcagtggggcgggacaaatttaaaaagttaccatattcagagctgctctttgacaaatctactatgaggaggcccttcggccagaaagcctcttcgcttccccctatagtggggagccgcaaaagcaaaggaagcggaaacgaccgacactccaaatcaacggtcgggtctagcgataacagcagtccacagccactgaaaagaaagggaaagaaagaggatgtgaacagtgaaaaactcaccaaattgaagcagaacgtgaagcttaagaatagccaggaaacaattccaaacagtgacgaggggatttttaaagccggtgccgagcggagtgagacaagaggagccgccgaggtgcaagaggacgaggatacgcaagtggaagtgccggtggaccagagaccagccgaaatcgtagatgaagaggaagacggggagaaagcaaacaaagatgccgagcagaaagaagatttcagcgggatgaatggagatctggaggaggagggaggtagggaggcaactgacgcgcccgaacaggtcgaagagattctggatcactcagagcagcaggcgaggcctgctcgagtcaacggaggcaccgacgaggagaatggtgaagaactccagcaggtgaataatgagctgcagctggtcctcgataaagagaggaagtcccagggcgccggttctggccaagatgaagctgacgttgacccccagcgcccacctagaccagaagttaagattaccagccctgaggaaaatgagaacaaccagcaaaataaggattacgcagccgtcgcttag

SEQ ID NO: 185821 - DNA, 267 bp, synthetic construct
  misc_feature 1..267: note = Description of Artificial Sequence: Synthetic coding sequence
  source 1..267: mol_type = other DNA
tgagtggtgatccacgagaagaaggtgagcagcttcgaggtgttcctcaaggaagtaacaggtggagtgcaggcaccatttggcgcagtccgaaatatttacacgcccaggacagggcatcgtattcggaagctggaccagattcaaagcggcggcaattatgtggctggcggtcaggaggctttcaaaaaactcaattatctggatataggagagattaaaaagcggcccatggaggttgttaacacagagcttcatgtgctctag

SEQ ID NO: 185822 - DNA, 363 bp, synthetic construct
  misc_feature 1..363: note = Description of Artificial Sequence: Synthetic coding sequence
  source 1..363: mol_type = other DNA
atgagcggcagcagcgcccggagcagccacctgagccagcccgtggtgaagtcggtcttggtttacaggaacggggaccctttctacgccggacgacgcgtggtgattcatgagaaaaaagttagttcctttgaggtattccttaaggaggtgaccggaggagtacaggccccgtttggcgctgtgcgtaatatctacactccaaggactggccacaggatccgaaaacttgatcaaatccagagcgggggcaactacgttgccgggggacaggaggcctttaagaaactgaactatctcgatattggcgaaattaagaaacgccccatggaagttgttaataccgagctccatgtgctgtag

SEQ ID NO: 185823 - DNA, 1947 bp, synthetic construct
  misc_feature 1..1947: note = Description of Artificial Sequence: Synthetic coding sequence
  source 1..1947: mol_type = other DNA
atgaagaagcccatctgcaagaccaccgagccctacgcccccgtgaggctcagggttctccagaatggcgaaaaaaataaaaatcggagtgtgaccattttagggcccgatatttcacccggccggaagactcaatgcaccgagatcctcaatttaccctctgccgctaggaggctgtacaatgagaaagggaaggaaatttttgctctgaaagacctgcaacgggatgaactggtttatgtctcctgtggtgaactgtggattaatcctgacttaagcatagcacagcagaagaaacaaatattcttgagaaacctcgagagcgatatcgccaagattcagatcttttgttcaacacataagatcgaggccctcgtgctggaagttcaatctgacattgtgagtggcagtaagctggctgtgcacaagcccgttgctatctttggagaagaaaagcaagttaccgagccagaggagaaacagatgcaggaggatcctctcactaccgaaaacgcttcttccgaaatcttagattctcatgtaagggcccatctgagaatgaaggcatgccatacccttcctcgttatgcgtggcaggagacttcccacgatttcgacgaggacgattccctgcctaagaaaacagaaaagggccttttcgagaatgttgagccccagaagaaacattcatgtagccccaagcacagtaaactgcacaagcattgtcatcagcagtttgagtaccgggatggtcagatcatctcacacgccgccccgcagctggtgttgggcgtgcagggccccaatctgagatcaggaatggaggttgtgctcgtggaaaagaagtccgatgggagccaccaaaggtggatccatcaggaagacagtcgcacctttcatttggtatctaaccccgatttagtcctcgccgtgtccatgaccaaaacccgcaatgaagtgtgcggttaccccgtaatagttcagaagtataagccgtacaataatggcgccgcgaatcagaagtggcactacatgaaaaatattaaggcactggtggcctttcattctacagccttagacaaggagatcacctcagctaactacgccggggtgtgtacgagttctgttattaaggaggagaacattgatcagccggggtattgttacttgtccccagatggtaagcgaaagaccatgctgtgcctggcctgcggccagtctatgagaaccgagaaaggactgaagcagctgctgcctggggtgccgtttttatgtattagtgggaccaaaacccagaaaccctttctccaggggcccttcaaggtcatttccgtggcggaagtcgatctatcatgcgacaaagccgaaaaaaccttgagctattaccaggcccgtctgctcagcttaagaatgaaaacgtgtacccaggctgcttcacactcaggcatggctgctacccatcagaaagctgttaagatcatagcctacaaaaacggggatggttaccggaatggcaagctcatcgtcgcaggcaccttcccgatgctactaaccgaatgcactgaacagcttggcctagctagagctgccagcaaggtctatactaaagatggcacaccaatatttaccctcagggatttggtattatgggccctggatgaatcattcctccagcgtgattccgagaagcagaaacaggatgctgctccggtcggcaaagagcaaataatcgtggaaaagaacccacgcatgaaagtgaaaaaccgcctctttgccaagtcagtaaccagcgacagcctggacggtatagacaagtccctactgactcttattttgcgaaaccctatcgccatctgggtctcatgtggagagcctttcttgccacctaacgagtctaggaaaatccgggagacggaactggccaagaaaggtcagaattttggctag

SEQ ID NO: 185824 - DNA, 1365 bp, synthetic construct
  misc_feature 1..1365: note = Description of Artificial Sequence: Synthetic coding sequence
  source 1..1365: mol_type = other DNA
atgaagaacatcaaggccctggtggccttccacagcaccgccctggataaggagatcacgagtgctaattacgcaggcgtgtgtacaagcagcgtgatcaaagaggagaatatagatcagcccggctactgctatctgagtcccgacggaaagaggaagactatgctgtgcctcgcctgtggccaatcaatgcgaaccgaaaaaggcttaaaacaactcctgcctggggtgcctttcctctgtatcagtgggacaaagacacagaaacccttcctccagggacctttcaaagtcatctctgttgcagaggtggatctgagctgtgacaaagcagagaaaacgttgtcttactaccaagcccgcctacttagcctgcgtatgaagacttgcacccaggccgcatctcactctggtatggcggcgactcaccagaaggctgtaaagattattgcgtataagaatggggacggctataggaacggaaagctcatagtggccggcacattcccaatgctcctcaccgagtgtactgagcaactgggcttggcaagggccgcaagtaaggtgtacaccaaggatgggacgcctatctttaccttacgcgaccttgtcctctgggcgctcgacgaaagtttcctccagagggacagcgagaagcagaagcaagatgcagcccccgtgggcaaggagcagattatagtagaatctatggaagaaaacccccgcatgaaagtaaagaatcgcctgtttgctaagtctgtgacatctgatagccttgacggcatagataaaagcttgcttacattgatcctgcggaaccccatagcaatttgggtctcctgtggagaacctttcctgccacccaacgccctacaaaaggccgagaagctagagaagcagaactggctgaagaaagatagaatcctcgccgacctggacacgatgcggcacaagatgagacagttaaaggggagacgcgtcgctgcttgtcaacctgccactatggtaccaaccaagtcccccgtgcagcctgtagtcgtggaaggcggatggacggaacagacccagcaagaaatcaagctgatggaacttattcgacacaccgaagcccacctgtccgagatacaggagatggagtcaaaaatcaactttcctattgccaccaagcgcatcgcagtgaagccttccaacctgtataagcagccaaacaccaagagagtttggatctatctcaatggcggaagacccgaggatggcacttacgcctggggaaagacaatcagcgaggtgagcctcctttatcttaagacctggattttcatctggagtagaaaggtgttcttttatttcctgatcaccgcgtag

SEQ ID NO: 185825 - DNA, 2190 bp, synthetic construct
  misc_feature 1..2190: note = Description of Artificial Sequence: Synthetic coding sequence
  source 1..2190: mol_type = other DNA
atgagcttcggccgggacatggagctggagcacttcgacgagcgggataaggctcagcgatatagtcgggggagcagggtaaatggactcccctctccgacccattcagcgcattgtagtttttacagaactcggacactacagaccctcagcagcgagaagaaggcgaagaaggtgcggttctaccgcaacggggaccggtatttcaaaggaatcgtttacgctattagtcccgaccgattcaggtccttcgaggctctcttggcagaccttacccgtaccttgagtgataatgtgaatttgccccagggagtccgaaccatctacacaatagatgggttgaagaaaatctccagcttagaccaactcgtggaaggagaatcttacgtctgtgggagtatagaaccattcaagaagctggaatataccaagaatgttaaccccaactggtctgttaatgtgaagactacaagcgctagtcgggctgtcagttcgctcgcgacggccaagggaagcccctctgaggtgagggagaacaaagattttataaggcctaaactcgtaaccataatccgctcgggagttaagcctagaaaggccgtgcggatcctattaaacaagaagaccgcccattccttcgagcaggtgttaacagatattacagatgctattaaactcgacagtggggtagtgaagaggctgtacacactggatggcaaacaggtaatgtgcctgcaagacttctttggcgacgatgatatctttattgcctgcgggccagagaagtttcgttaccaggatgactttttgctggatgaaagtgagtgtagagtggtcaaaagtacatcctacaccaaaatcgcctcatcgtctaggcggtctaccaccaaaagccccgggccctcccggaggagcaaaagccctgcatctacttcctctgtcaacggaacgcctggctcacaattgtccaccccccggtcagggaagagccccagtccaagtcctacgtctcccggtagcctgcggaaacagcggtcaagccagcacggaggttccagtaccagtctggcaagcactaaggtgtgttcctccatggacgaaaacgacgggcccggcgaggaagtgagcgaagaagggtttcaaatccccgccactattaccgaacgatataaggtcggcaggacgattggtgatggtaattttgccgttgtcaaggaatgcgtggaacgtagtactgcgcgcgagtatgcgctcaagattatcaagaagtctaaatgcaggggtaaagagcatatgatccaaaacgaggtgtctatactgaggcgagtgaagcacccaaatatagtactgttgattgaggagatggacgtacccacagagctgtaccttgtgatggagctcgtgaaaggaggagaccttttcgacgccattacttccaccaataaatataccgagagggatgcatcaggcatgctctacaacctggccagtgcaataaagtaccttcactccctaaacatcgttcacagagatattaaacccgaaaatctgctagtgtacgagcatcaggatggcagcaaatctctgaagttaggtgacttcggtcttgccacaatcgtcgacggccctctctacacagtgtgtggaacacccacatatgttgcgccagagatcatcgccgagaccggctatggcctcaaagtcgatatttgggccgcaggtgtgataacctacattttgctctgtggattcccccctttccgagggagtggggacgatcaagaagtgctcttcgaccagattctgatggggcaagtggactttccttccccgtactgggataacgtctctgacagtgcaaaggagttgatcaccatgatgctactcgtggatgtcgaccagcgcttctctgccgtgcaagtccttgagcatccttgggtgaacgacgatggcctgcctgagaatgagcaccagcttagcgtggctggaaaaatcaagaaacactttaacacagggcccaagccaaatagcaccgcagctggtgttagcgtgatagcacttgatcacggtttcactatcaagcgaagtggtagcctggattattaccaacagcccggcatgtattggatacggccacccctactgataagaagaggccgtttttccgatgaggacgctacgcgcatgtag

SEQ ID NO: 185826 - DNA, 2223 bp, synthetic construct
  misc_feature 1..2223: note = Description of Artificial Sequence: Synthetic coding sequence
  source 1..2223: mol_type = other DNA
atgagcttcggccgggacatggagctggagcacttcgacgagcgggacaaagcccaaaggtattccagaggcagcagggttaacggcctaccctcccccactcactcggcccactgttcgttctaccgaactcggacattacagacgctctccagtgaaaagaaggccaaaaaagtgcgtttctatagaaatggcgataggtactttaaaggcattgtgtatgcgatctcccctgacagatttcgttcctttgaagccttgttagccgatttaacacgcacgctgagcgataacgtgaacttacctcaaggcgtaaggactatctacaccatcgacgggctgaaaaagatcagctccctcgaccaattggtcgagggagagagctacgtgtgcggaagtatcgagcctttcaaaaagctggagtatactaagaacgtgaatcccaattggagcgtgaacgtaaagacgacctccgcatctagagcggtatcttctcttgcaaccgctaaaggatctccctccgaggtgcgagaaaacaaagactttataaggcccaaattggtgacaatcatccggtccggggttaaacccagaaaggccgtgagaatcctactgaataagaagactgcccactcattcgagcaggttttgactgatataactgacgcaataaaattggattctggagtggtcaagcgcttatatacgctggatggaaagcaggtcatgtgccttcaggatttttttggtgatgacgacattttcattgcttgtggcccagaaaagtttaggtaccaagacgactttctgttggatgaatcagaatgcagagtggttaagagcacctcatataccaagattgcaagttctagtcgtcgctctacaaccaaaagtccaggaccttccagaaggagcaaatcccccgctagcacatccagcgtgaacggcacacccggcagccagctttcgacgcccagaagtggcaaatccccaagcccctcgccaacaagccccgggagcctcaggaaacagcgatcttcccagcatggcggctccagcaccagtcttgcctcgacaaaagtgtgttccagcatggacgagaacgacgggcctggcgaggaggtttcagaagagggttttcagatcccggctacgataaccgaacgctacaaagtagggaggactattggcgatggcaattttgctgtggtgaaagaatgtgttgagagatctactgctcgagagtacgcacttaaaatcattaaaaaaagtaagtgcagagggaaggaacacatgatacaaaatgaagtcagcattcttagaagggtaaaacaccccaatatagttctgctgatcgaggaaatggacgtgcccactgagctgtacctcgtgatggaattagtcaagggcggggatctgtttgacgctatcaccagcaccaacaaatacactgagagagatgcctctggtatgctctataatctggcctccgctatcaaatatttgcacagccttaacatagtgcaccgggacattaaacctgaaaatctgcttgtttatgaacatcaggatgggagtaagagcctaaaactaggcgactttgggctggcgaccatagttgatggcccattatacacagtctgcgggacccccacatacgtcgcgccagagattatagcagaaactggctatggactgaaggtggacatctgggccgccggcgtcatcacttatatcctcctgtgtggctttccacctttccgcgggtctggcgatgatcaggaagtcctgtttgatcagatcctcatggggcaggtagatttccccagcccctattgggacaacgtgagcgatagcgctaaagagctcattaccatgatgcttctggtagatgtggatcaaaggttcagtgctgtccaggtactcgagcacccctgggtcaacgacgatgggctgcctgagaatgagcatcaactatccgtcgccggcaaaatcaagaagcatttcaacacaggacccaagcccaattcaactgctgctggagtatcggtgatagcaaccacggcgctggataaagagaggcaggtgtttcgtcgaagaagaaaccaggacgtgagaagtagatacaaggcgcagcctgcgcccccagagttaaattccgaatccgaagattatagcccctcttcaagcgagaccgtgcgcagcccaaactcacccttctag

SEQ ID NO: 185827 - DNA, 1092 bp, synthetic construct
  misc_feature 1..1092: note = Description of Artificial Sequence: Synthetic coding sequence
  source 1..1092: mol_type = other DNA
atgagcttcggccgggacatggagctggagcacttcgacgagcgggataaggcgcagcgctatagcagaggttccagggtcaacggactcccctctccaactcacagcgcgcactgtagcttttataggactcggacgcttcagaccttgtcctctgaaaagaaggcaaagaaggtccgtttttacaggaacggggaccgttactttaaagggattgtgtacgccatctcccccgaccgtttccggtctttcgaggccctcctagccgaccttactagaacgctcagcgataatgtcaatctgcctcagggcgtgagaacaatctacactatcgatgggctcaaaaaaattagttctttggatcagctagttgagggcgaaagttacgtgtgcggctcaatcgagccgttcaaaaaacttgagtatactaaaaacgtaaaccccaattggtccgtgaacgttaagaccacgagcgcctctcgagctgtgagcagcttggcgaccgcgaaggggagcccatccgaggttagagaaaataaggacttcattaggccgaagctggtcacgatcatacggtctggagtaaagcctcggaaggctgttagaatactgttgaataagaagaccgcccacagcttcgaacaggtcttaacagacatcaccgatgcaataaagctggattccggtgtggtcaagcggctctacacccttgacgggaaacaggtgatgtgtctgcaggatttctttggggatgatgatatttttattgcttgcgggcctgagaagttccggtatcaagatgactttctgctggatgagtctgagtgcagagttgtaaagtctactagctataccaagatcgctagctcctctaggagaagcacgactaagagtcccggaccatctcgcaggtccaagtcaccagcctccacctccagcgtcaacgggacaccagggtcccagctgtcaactccacgaagcggaaaatccccctccccaagcccaacctcgcccggaagcctgcgtaagcagagggatctctatcggcccctgtcaagtgacgatctcgactcagtgggcgatagcgtttag

SEQ ID NO: 185828 - DNA, 1302 bp, synthetic construct
  misc_feature 1..1302: note = Description of Artificial Sequence: Synthetic coding sequence
  source 1..1302: mol_type = other DNA
atgctggagctgatcgaggtgaacggcacccccggcagccagctgagtactcctagatctgggaagtcgccaagtccctcccctacctctcccggttccctgcggaaacagcggagctctcagcatggcggttcttccacatctctggcctccactaaggtctgttctagtatggacgaaaacgatgggcccggagaagaggtgtccgaagaaggttttcaaataccggccacaattacagagcgttacaaggtggggaggacaattggtgatggaaattttgccgttgtcaaggagtgtgtggaacgatccacagcccgggagtacgccctcaaaatcattaaaaaaagcaagtgtcgggggaaagagcatatgatacaaaacgaggtttcaattttgaggcgggttaagcaccccaacattgtcctgctcattgaggaaatggatgttccaacagaactttatctggtgatggagcttgtgaagggcggggatttgttcgacgccatcacgagcaccaataaatacactgagcgggatgctagcggtatgctgtataacttggcatccgccattaaatacctgcacagccttaatatagtccatcgtgacattaagcccgaaaaccttctcgtgtacgaacaccaagacgggagtaaatcattgaaactgggcgactttggcctggccactatcgtggatggcccactgtacactgtctgcggaactcccacctacgtcgcccctgagataatcgccgagaccggctatggcctgaaagtcgatatttgggcagccggtgtaattacatatatcctgctttgcggcttcccaccgtttagaggatctggagacgatcaagaggtgctgttcgaccagatattgatgggccaggtggacttccccagcccctattgggacaacgtgagtgactcagcaaaggaacttatcactatgatgctacttgtcgacgtggatcagcggttttccgcagttcaggttctcgagcatccatgggttaacgatgacggactccccgaaaatgagcatcaacttagtgtcgctggcaagattaaaaaacactttaatactggtcccaagcctaattctacggcagcgggtgtgagtgttatcgccaccactgccctggataaagagagacaagtttttaggagaaggcgaaatcaggatgtgcgaagcagatacaaggcacagccagcacccccagagttgaattccgaaagtgaggattattcaccatcttcctctgagactgtgcgctcacctaattcacccttctag

SEQ ID NO: 185829 - DNA, 1266 bp, synthetic construct
  misc_feature 1..1266: note = Description of Artificial Sequence: Synthetic coding sequence
  source 1..1266: mol_type = other DNA
ctgagcctgatcaagttcaacggcacccccggcagccagctgagcacgcctcggagtggcaagtctccttctccaagccccactagccccggtagcctcagaaagcagcgctcttctcaacatggcggcagttcaacaagcctggcatctaccaaggtttgcagttctatggacgaaaacgatggccctggggaagaggtgtccgaagagggcttccaaatccccgctacaatcaccgagaggtacaaggttgggaggactatcggcgacggcaactttgccgtggtgaaggagtgcgttgagcgctcgaccgcccgggagtacgctctcaagattataaaaaaatcaaagtgcaggggcaaagagcacatgatccaaaatgaagtttccatcctacgacgggtgaaacatcccaatatagtgcttcttatcgaggagatggacgtgccgaccgagctctacctggtgatggaactggtgaaaggtggtgacctctttgacgcaatcaccagcaccaacaaatataccgagagagatgcatctgggatgctgtataacctggcgagcgcgataaagtacctccattcacttaatatcgtgcaccgcgacatcaaacctgagaacctacttgtctatgaacatcaagacgggagcaagtcgctcaaactgggtgacttcggcctcgcgactatagtggacggaccactgtatacagtatgtggtacccccacttacgtcgctcctgagataatcgcagaaacaggctatgggctcaaggtcgatatttgggccgctggtgttataacctatatactcctgtgcgggttccctcccttccggggctctggagacgatcaggaggtgctgtttgatcagattctgatggggcaggtagattttccttccccgtactgggataacgtgagcgactcagctaaagagctgattactatgatgcttctagttgatgttgatcagcggttcagcgcagtacaggttctggagcacccttgggttaatgatgatggactccccgagaacgagcaccagctctccgtggccggaaagatcaaaaaacattttaatacaggtcccaagcctaactccacggccgcgggagtatccgtcatcgccttggatcacgggttcactatcaagaggagcgggagtctggactattaccaacagccagggatgtattggatccgccctccgctgctgattcgaaggggacgattttcggatgaagacgcaactagaatgtag

SEQ ID NO: 185830 - DNA, 1860 bp, synthetic construct
  misc_feature 1..1860: note = Description of Artificial Sequence: Synthetic coding sequence
  source 1..1860: mol_type = other DNA
atgagcttcggccgggacatggagctggagcacttcgacgagcgggacaaagctcagagatactctaggggtagtcgggtaaatggactgccaagcccaactcattccgctcattgcagcttctacagaactcgaacactccagacattgtcctcggaaaagaaagccaaaaaagtgagattttatcgcaatggggacagatattttaaaggcatcgtttatgcaattagtcccgaccgtttcaggtcattcgaggccttgctcgctgacctgacaaggaccctgtctgacaacgtgaatttacctcagggcgtgcggacaatttacacaatcgatggcttgaagaagatcagttcacttgaccagctcgtggaaggagaatcatacgtgtgcgggtccattgagccttttaagaaacttgaatacacaaagaacgtcaaccccaattggagtgtcaacgtgaaaactacttctgcttcaagagctgtgagcagcttggctacagcgaaggggagtccctccgaggtgcgagagaataaagacttcatacggcccaaactggtgactatcattaggagcggcgtgaagccacggaaggcagtgagaatcctgcttaacaaaaagacagcccattccttcgagcaggtgcttacagatatcacagacgcaattaagttggattccggagtggttaagcgcctctatacattagacgggaagcaggtgatgtgtctgcaggactttttcggtgacgatgacatattcatagcatgcgggcctgagaagttcagataccaggacgacttcttactggacgagtccgaatgtcgcgtcgtgaaatctacatcatataccaaaatcgcctcctcaagccgacgctcaacaaccaagtcaccaggccctagtcgacgctccaaaagcccagctagcacaagctctgttaacggtacacctggttcgcaactttctaccccgcgtagtgggaagagtccctccccctcacctaccagtcctggttcgctcagaaaacagcgtagctcccagcatggcggatcttcaacttcgcttgcttcaaccaaggtgtgtagcagtatggacgagaacgatgggcctggtgaagaagtctcagaggagggttttcagattcctgccactatcacagagcgatataaggtgggccgcaccatcggcgatggaaatttcgctgtcgttaaagagtgtgtcgagaggtccacggctagagagtacgctctgaagatcatcaagaaatccaagtgccggggtaaagagcatatgattcaaaacgaggtcagtattcttagaagggtgaaacatcctaatatcgtgttactgatcgaggagatggacgtgcctacagagctgtacttagtgatggagctggtcaagggaggcgacttgtttgacgctataactagtacaaacaagtatctccattctcttaacattgtgcatagagacataaaaccagagaacctgttggtatacgagcaccaggatggatcgaaatcgctcaaactcggcgattttggactagcaactattgtggacggcccactttacacggtgtgcgggacacctacgtatgtggctcccgaaatcattgcggagactggatatggccttaaggtcgacatatgggcagctggagtgattacctatattctcctgtgtgggttccctcccttccggggcagtggggatgaccaggaagtcctctttgaccagatactgatgggtcaggtggattttcccagtccatattgggacaacgtcagcgatagcgccaaggaactcattacaatgatggcctctcagaaaatgaatattagctgtcaatag

SEQ ID NO: 185831 - DNA, 2301 bp, synthetic construct
  misc_feature 1..2301: note = Description of Artificial Sequence: Synthetic coding sequence
  source 1..2301: mol_type = other DNA
atggccagcacccggagcatcgagctggagcacttcgaggagcgggataaacggcccagaccgggctcccggcgcggtgcacctagctcatccggaggaagcagttcaagcgggccaaaggggaacgggttgatcccttctcccgctcattcggcacattgcagtttctaccggactagaacacttcaggctctatcttctgagaagaaggcgaagaaagcacgattctaccgtaacggagatcgctatttcaagggattggtgttcgcaataagttctgacagattccgcagcttcgatgctctgctgatcgagctgaccaggtccctgtcggataacgtgaatctcccacagggagtgcgtaccatctacacgatcgatggctctcgcaaagtaacaagtttggatgagctgttggaaggcgagagctatgtctgcgcctctaatgagccctttcggaaggtagattacactaaaaatatcaatccgaactggtccgtgaacatcaaagggggtacatcccgcgcactggccgcagcctcatcagtaaagagcgaagttaaagagagcaaggattttataaagcctaaactggtgactgttattaggtctggagttaaacctcggaaggcagtgcgcatcttgttaaacaaaaaaaccgcccacagcttcgagcaggtattaactgacattaccgaagctataaagttggactccggtgtggtcaagcgtttatgtactctcgacggtaagcaggttacctgcttgcaagacttctttggagacgacgacgtctttattgcatgtggtccggaaaaattcaggtacgcgcaagatgactttgtgcttgaccactctgagtgtcgtgttctgaaatcgagctactctagaagtagcgctgtgaaatacagcggatcaaaatctccaggaccatcacgtcgttctaaaagtccggcttccgtcaacggaacacctagcagccaactcagcaccccaaagtctacaaaaagctcttcaagttccccaacatcccctggaagctttaggggtctgaagcagattagcgctcatggaagaagtagttccaacgtgaacggcgggcctgagcttgacagatgtatcagccctgaaggcgtaaacgggaatcgctgctcagagtcatcgactctgctggagaagtataagattgggaaggtgattggggacggcaatttcgctgtggtgaaagagtgtatcgataggagcaccggcaaggagttcgcactgaaaatcattgataaggctaagtgctgcggtaaggagcacctgattgaaaacgaggtgagcatccttagaagagtgaaacatccaaatatcattatgctggtggaagagatggagacggctactgagttatttttggtaatggaactggtgaagggcggcgacctgtttgatgcgatcactagcagcacgaaatatacggagagagatgggtctgctatggtttacaacctcgcgaacgccctgcggtatcttcacgggctcagcatcgtgcaccgagatattaaacccgagaatctgttagtctgcgagtaccctgacggcaccaagagcttaaaactgggagactttggcctggctacagttgtcgagggcccactatacacagtgtgcggtacacccacttatgtggcaccagagatcatcgcggaaacaggatacggcctgaaagtcgatatctgggccgcaggcgttatcacctacatcctgctctgtggatttccccccttccggagcgagaataacctgcaggaagaccttttcgatcagatccttgcgggcaagctagagttccccgccccatactgggacaacattaccgactctgccaaggagcttatttcccagatgcttcaggtgaatgttgaagctaggtgtaccgcaggacaaattttgtcccacccctgggttagtgacgacgcgtctcaggaaaataacatgcaggcagaggtaaccgggaagctaaagcagcactttaataatgcgttgccaaagcaaaactccacaacaaccggcgtctctgtgatcatgaacacagccctggacaaggagggacagatcttctgcagcaaacactgtcaagacagtggtcggccaggaatggaaccaataagtccagtaccaccatccgttgaagagatccccgtccccggggaagctgtccctgctcccactcctcctgagtctcccacaccccacccacccccagccgcccccggaggggagcgcgcaggcacgtggcggcgccacagagattag

SEQ ID NO: 185832 - DNA, 2352 bp, synthetic construct
  misc_feature 1..2352: note = Description of Artificial Sequence: Synthetic coding sequence
  source 1..2352: mol_type = other DNA
atggccagcacccggagcatcgagctggagcacttcgaggagcgggataaacgccctcgtcctggaagcaggaggggagccccctcctcaagtggtggatcttcttcctctgggcccaagggcaatggcttaataccaagtcctgcacatagcgcccactgcagtttctatcgcactcgaactctgcaggcactgagttctgagaagaaggcaaagaaggcaaggttctacaggaatggcgatagatactttaaaggtctggtgtttgcaatctcatctgatagatttcggtccttcgacgctctgctcatcgagctgacacgatccctttccgacaacgtcaacctgcctcagggcgttagaaccatttacactattgatggcagtcgtaaagtaacttctttggacgaactgctggagggagaaagctatgtctgtgcttccaatgaacccttcaggaaggtggattacaccaagaatataaatccgaactggtcagttaacatcaagggaggaacctctagggcgctggcagccgcctcaagtgttaagtccgaagtcaaggaatcaaaagattttattaagccaaaactcgtgacggtgattcgtagcggagtaaaaccacggaaagcagttcgtatactgctcaataaaaagaccgcacattcatttgagcaggtcctgacagacattacggaagctataaagttggactctggtgtggtgaagcgcctctgcacactcgatggtaaacaggttacttgcctgcaggacttttttggagatgatgacgtttttatcgcttgtgggcccgagaagttccggtatgcccaggatgatttcgtgctcgaccactctgagtgtcgagtgttaaaaagctcttatagcaggtcatccgcagttaaatacagcgggagtaaatccccaggaccgtcaaggcgtagcaagagccctgctagcgtgaagagaggggggcactacagttctgcctactctacagccaagtctcctgtgaatgggacaccttcgtcgcagctgtcaacgcctaaatccacaaaatcctcatcaagctccccaacgagcccgggatcttttcgaggcctgaaacagatttccgcccacggaagaagcagcagcaatgtgaacggaggtcccgagctcgacagatgtattagccctgagggcgtcaacggtaacagatgttccgaaagctcgacactgctcgagaaatataaaatcggcaaggtcattggcgacggaaatttcgctgttgtcaaagagtgcattgataggtccactggtaaagagttcgctctcaagatcatcgataaggctaaatgctgcggtaaagagcatttgatcgagaacgaagtgtctatcctaaggcgcgtgaagcatcctaacattatcatgctcgtggaagagatggagactgcaacggaattgttcctggtgatggagctggtgaaagggggggatctgttcgacgctattactagctcaaccaaatatactgagcgagacgggtctgctatggtgtacaatctggcaaatgcactgagatacctgcacggcctgtctattgtgcatcgagacattaaacccgaaaatttgctggtctgtgaataccctgacggtaccaagtccctcaaacttggggattttggcctcgccacagttgtcgagggacctttatataccgtgtgcggaacccccacatatgtggcacccgagattattgccgagaccggctatggattgaaagtcgatatctgggctgctggtgtgatcacctatatcttgctgtgcggattccctcccttcaggagcgaaaacaacctccaggaggacttgtttgaccaaatccttgccggtaaactggaattccccgctccttactgggacaatattaccgactccgcgaaggagctgatctcacagatgctgcaggtcaatgtcgaggcccgctgtacagccggacaaattttgtcgcacccctgggtgtccgatgacgcatcccaggagaataatatgcaggccgaggtcaccggcaagttgaaacagcactttaacaatgccctgcctaagcagaatagcaccacaacaggagtctcggtaattatgaataccgccctggataaagaaggccaaattttttgttctaaacactgccaagactcgggacgccccggaatggaaccgatcagccccgtgccaccatctgttgaggagattccagttccgggcgaggccgtccccgcccctaccccacctgaaagccctactccccacccaccaccggccgccccgggaggggaacgcgcagggacttggcgacgccaccgggattag

SEQ ID NO: 185833 - DNA, 2298 bp, synthetic construct
  misc_feature 1..2298: note = Description of Artificial Sequence: Synthetic coding sequence
  source 1..2298: mol_type = other DNA
atggccagcacccggagcatcgagctggagcacttcgaggagcgggataaacgacctagacctggaagcagacggggcgcgccatcatcaagcggaggctcctcaagctctggcccgaagggcaatgggctcattccatcacccgcccactctgcacactgttctttctatcgtactcggacacttcaggccctatcttcggagaagaaagctaagaaagccagattctataggaacggagatcggtatttcaaaggactggtcttcgccataagctccgatcgctttcggtccttcgacgctcttcttattgagctgacaaggtccctctccgacaacgttaaccttccacagggcgtccgtactatatataccatagacggcagccgaaaagtgacctccctggacgagctcttggaaggagagtcatatgtgtgcgctagtaacgagccctttcgaaaggtggactacacgaagaacatcaacccgaactggagcgtcaatattaagggcggaacatcacgagcattggctgcagcctcttccgtaaaaagcgaagtgaaggaatccaaagactttattaagccgaagctggtgacagttattcgctcaggtgtgaaaccccgtaaggccgtgaggattcttttgaacaagaaaacagctcatagttttgagcaagttctgaccgatatcactgaggcaataaagctcgactctggtgtcgtgaagagactttgcaccctagatggtaagcaggttacgtgcctgcaagatttcttcggcgatgatgatgtgttcatagcgtgtggccctgagaagttcaggtatgctcaagacgactttgtgctcgaccactccgaatgtagagtgttaaagagttcatatagccgatcttcagccgtgaagtatagcgggtccaaatcccctggtccttcccgcaggtccaagtcccctgccagcgtcaatggcacacctagttcacagctatccacaccgaaatccactaaaagcagtagtagttcccctacgtcccccgggtcattccgagggcttaagatcagcgctcacgggcggagctcgtctaatgtcaacgggggccctgaactggaccggtgcataagtccagagggggtgaacggcaatcggtgcagtgagagtagcacacttctggaaaagtacaaaatcggcaaagttatcggggatgggaatttcgcagttgtgaaggagtgcattgatcggtccacaggcaaggaattcgccctgaaaatcatcgataaagcaaagtgctgtggaaaagaacatctgatcgagaatgaagtttccatcctgaggcgcgtgaagcaccctaatatcattatgcttgttgaggaaatggaaaccgcaacggaactgttcctggtgatggaactggtgaaaggcggggacttattcgacgcgattaccagctctacaaaatatactgaacgcgatgggagtgccatggtatacaatctggcgaacgctctgcgctatctgcacggcctgtcaatcgttcacagggacatcaaaccagaaaacctccttgtttgcgaataccctgacggtactaagagcctgaagctcggagacttcggactggccacagtcgtcgaaggaccactttacaccgtctgcgggactcccacctatgtagcccctgagattattgcggaaactgggtacggcctcaaggtcgacatctgggctgccggggtgattacctatatcctgctgtgtggtttccccccttttagatctgaaaacaatctgcaagaggacctcttcgatcagattctggcaggaaaacttgaatttccggctccatattgggataacattactgacagcgccaaggaactaatcagtcagatgcttcaggtcaatgtggaagctcgatgcactgcaggacagatcttgtcacacccctgggtctctgacgatgcaagtcaggaaaacaacatgcaggcagaagtaaccggaaagcttaaacagcacttcaacaacgctctgccaaaacagaacagcaccacaaccggagtttcagtgattatgaacactgccctggacaaggagggccagatcttttgcagcaaacattgccaagactcaggtcggccgggcatggaacccatcagccccgttcctcctagtgtagaggaaattcccgttcctggggaagctgtgcccgcacccactccaccggagagcccaacaccccatcctcctcccgcagcgcctggaggcgagagagccgggacttggcgccgccatagggactag

SEQ ID NO: 185834 - DNA, 1947 bp, synthetic construct
  misc_feature 1..1947: note = Description of Artificial Sequence: Synthetic coding sequence
  source 1..1947: mol_type = other DNA
atgggcaaggagcccctgaccctgaagagcatccaggtggccgtggaagagctgtatccaaacaaggcacgagctctcacccttgcacaacacagcagagccccctcaccacgcctgagatccagattgttctccaaggccctgaaaggagaccatcgctgcggagagacagaaacacccaagtcctgtagcgaggttgctggctgcaaagcagccatgcgtcaccaggggaagatccccgaagaactatcgctcgacgatcgagcacgtacccagaaaaagtgggggcgcggtaagtgggagcctgagccttcctcgaagccacccagagaggccacattggaagaacgacacgcgagaggcgagaagcacctgggcgtcgagatcgagaaaacatcgggcgagatcattcgatgcgaaaagtgtaaacgggaacgcgaacttcagcaaagccttgaaagagaaagacttagtctgggcacatcggaattagatatgggaaagggcccgatgtatgacgtggaaaagctggtgagaaccagaagctgcaggcgcagtccagaggccaaccccgcgtctggcgaggaagggtggaaaggagactctcatcgttcttctccgaggaacccaactcaggagctccggaggccatcaaaatcaatggataagaaagaggacaggggtcccgaggaccaggaaagtcatgcacaaggtgccgcaaaggcaaaaaaagatctggtcgaagtcctaccagttacagaggaaggacttagggaggtgaagaaggacacacgaccgatgagccggtctaaacacggagggtggttgctgcgtgaacatcaggcggggttcgaaaaattacgacggactaggggcgaagagaaggaggccgagaaggaaaaaaaaccttgcatgtcaggaggtcggaggatgacactgagggacgaccagccagccaagttggaaaaggagcccaaaacccgacccgaagaaaacaaacctgaacggccgtccggccgaaaaccacggcctatggggatcattgccgcaaatgtcgaaaagcattatgagaccggacgagtgatcggcgatggaaattttgctgtagtgaaggagtgcagacatcgggagacccggcaggcatatgcaatgaagatcatcgataaaagtaggcttaagggtaaagaggatatggtggatagcgaaatattaattattcagagcctgagtcaccctaatattgtgaaactgcacgaggtgtatgagacagacatggagatatatctgattttagagtacgtccaaggaggtgatcttttcgacgccattatcgaaagtgtcaaattcccagagccggacgctgctctcatgatcatggacctatgtaaggccctggtgcacatgcacgataaaagcatagtgcacagggaccttaagccagaaaacctgctggtgcagcgaaacgaagacaaatcaaccacactgaagctcgctgactttggccttgctaaacacgtagtgaggcccattttcactgtttgcggaacacctacatacgtagcacccgagattctgtccgaaaaaggatacggccttgaggttgacatgtgggctgcaggcgttattctttacatcctgctgtgcggctttcccccttttaggtccccagagcgcgaccaagatgaattgtttaacattatccaactgggccacttcgaattcctacctccatattgggataacatcagcgacgctgccaaagacctcgtctctcgcctgctcgtagtagacccgaagaagcggtataccgcacatcaggttttacagcacccatggattgagacagctggcaaaacaaatactgttaaacgtcaaaaacaggtctctccctcctctgaggggcactttcgctctcaacacaaacgggttgtggagcaagtgtcatag

SEQ ID NO: 185835 - DNA, 1122 bp, synthetic construct
  misc_feature 1..1122: note = Description of Artificial Sequence: Synthetic coding sequence
  source 1..1122: mol_type = other DNA
atgcccaacgacgaggccttcagcaagcccagcacccccagcgaggcacctcatgcacccggagtgcccccccagggtagagccggaggcttcgggaaggcctccggagccctggtgggagctgcaagcggctcctcagccgggggatcgagtcgaggtggcgggagcggctccggcgcctcggatctcggggctggaagcaagaagagcccgcgcctcccaaaatgtgcaaggtgcagaaaccacgggtacgcctcaccattgaaaggacacaagcgtttctgcatgtggcgtgattgccagtgcaagaaatgtaatttgatcgccgaacggcagcgcgtgatggccgctcaagtggcactacgccgccagcaggcccaggaagaggagctcggcatctcacatcccatccctctgcccagcgccgcagagctgctggttaagcgcgaaaataatgggtctaacccttgcttaatgaccgagtgctcaggcacttcccagcctcctccggcatccgtgccgacaactgcggctagcgaaggtcggatggtgattcaggacattccagccgtcaccagtcgtggccacgtcgagaacactcccgacttggtctccgatagcacctactacagtagtttttaccagccttctctcttcccatattacaacaacctctataattgccctcagtacagtatggcccttgccgctgacagcgcaagcggcgaggtgggtaatccactaggggggtctccggtgaagaatagcttgcgaggtcttcccgggccgtacgtgcccgggcagactgggaatcagtggcagatgaagaatatggagaatagacacgccatgagctcccagtataggatgcattcatattatccacctcccagctacctcggccagtctgtgccccaatttttcacgtttgaagatgcgcctagctaccccgaggcacgggcctcagtcttctctcctccatccagtcaggactcaggcctggtgagcctgtcttccagcagccccatttccaataaatcaaccaaagcggtgttagaatgcgagcctgcctccgagccaagcagctttacggtcacaccagtcatcgaggaagacgagtag

SEQ ID NO: 185836 - DNA, 525 bp, synthetic construct
  misc_feature 1..525: note = Description of Artificial Sequence: Synthetic coding sequence
  source 1..525: mol_type = other DNA
atgcccaacgacgaggccttcagcaagcccagcacccccagcgaggcaccacatgcccctggagtgccaccacagggacgagctggcggctttggcaaggcatcaggcgctctggtgggagctgctagtggttcatctgcgggaggaagctcacgtgggggtggctctggttccggtgcctctgatttaggtgcgggctccaaaaagagcccccggctgccaaagtgcgcacggtgtcgcaatcacgggtacgcctcacctttgaaaggtcacaagcgattctgcatgtggcgggattgccaatgtaaaaaatgtaacctgatcgcagaacggcaacgggtcatggctgcccaggtgggcgcaggggtgagagaacccggatttagtttatccttctttttcttttttttttttagatggtctctggcacgcctgcccagattgcagtgctcaggtgccatcttagcccactgcaattccgcgtccagggtacaggctatactcctgccccagccccccaaatag

SEQ ID NO: 185837 - DNA, 681 bp, synthetic construct
  misc_feature 1..681: note = Description of Artificial Sequence: Synthetic coding sequence
  source 1..681: mol_type = other DNA
atggccgacccccaggccggcagcgccgccggcgactgggagatcgatgtagaatctctcgaactcgaggaagatgtgtgtggcgctcccagatccaccccccccggcccaagtcctccgcctgccgacggggactgcgaggatgacgaggacgacgacggagtggacgaagatgcagaggaggagggggacggcgaggaagctggggcttcaccaggaatgcctggccagccagagcagcgcggagggccccaaccccgaccccccttagccccgcaggcatctcccgctggcaccggacctagggagaggtgtacccctgccggcggtggcgccgagccaaggaagctgtccagaaccccgaagtgcgcccgttgccgtaaccatggggtggtgtcatgcttaaaggggcataagagattctgtcggtggagggactgccagtgcgctaactgcctgttagttgtggagcgacaaagagtcatggctgcccaggtcgccttgaggagacaacaagcaacagaggataaaaaggggctgagtggtaagcagaacaatttcgagaggaaagccgtttaccaacggcaggtgcgagcaccttcactgctggcgaaaagcatcctggaggtgttgttaggcctattttactcctattacgtgtatattatgaaccacttgtag

SEQ ID NO: 185838 - DNA, 1686 bp, synthetic construct
  misc_feature 1..1686: note = Description of Artificial Sequence: Synthetic coding sequence
  source 1..1686: mol_type = other DNA
atggccgacccccaggccggcagcgccgccggcgactgggagatcgatgtggaatccttggaactagaggaggatgtgtgtggtgcccctcgttccacaccacccgggcccagcccccctcccgccgatggcgattgtgaagatgacgaagacgacgacggagtggacgaggatgcagaggaagaaggtgatggggaggaggcaggagcaagtccaggcatgcctggccagcccgagcaaagaggcggtccccagccccgccccccccttgctccccaagctagccccgcagggacaggaccacgagaacgatgcacccccgctggggggggcgcagagccccgtaagcttagtaggactccgaagtgcgcccggtgcaggaatcacggcgtggtttcatgccttaagggacacaagaggttctgccgctggcgggactgccagtgtgctaattgcctgttggtagtggaacgtcagcgcgtcatggcagcccaggtggccttgcggcggcaacaggccaccgaagataaaaagggtctcagcggaaagcaaaacaatttcgagcgcaaagctgtataccagcgtcaagtcagagctccatctctcttagccaaatccatcctggagggataccgccctattcctgcagaaacctacgtcggaggaactttccccttgcccccgcccgtgtctgacagaatgagaaagcggagagcattcgccgacaaggaactggaaaacatcatgctggagcgggaatataaggaaagggagatgctcgagaccagtcaggccgccgccctttttcttcctaatagaatggtgcccggacccgattataatagctacaaatctgcttactcacccagccccgtggagcctccctccaaagacttctgtaactttctccctacatgcctggaccttactatgcagtactctggttctggcaacatggaactgatctcgtccaacgtgagtgtagccaccacatatcgacaatatcctttgagctctaggttccttgtgtggcccaagtgtggccctatttccgacacccttctttatcagcagtgcctcctcaacgccaccactagcgtgcaagcgcttaagcccggagctagttgggacttgaagggtgccagagttcaggatggtctgtctgcggagcaagacatgatgccttctaagctggagggctctctggtcctgccacatacccctgaaatccagaccactaggtccgacttacaagggcaccaggctgtgccagagcggtctgccttttccccacctagacgaaacttctctccaatcgtcgatacggattccctcgcagcgcagggccatgtgcttaccaaaattagcaaggagaacacgaggcaccccctccctttgagacataacccatttcacagtttatttcagcagaccctcaccgataagtccggccccgagctgaagacaccatttgtaaaagaagctttcgaggagactcctaagaagcatcgggaatgtcttgtgaaggataaccagaagtacacatttaccatcgaccgctgtgcgaaggacctgtttgtggcgaagcaggtgggcacaaaactgtctgttaacgaacctctctcattttccgttgagagcatactgaaaaggccttcctcagcaattacaagagtttcccaatag

SEQ ID NO: 185839 - DNA, 1686 bp, synthetic construct
  misc_feature 1..1686: note = Description of Artificial Sequence: Synthetic coding sequence
  source 1..1686: mol_type = other DNA
atggccgacccccaggccggcagcgccgccggcgactgggagatcgatgtcgagagtctggagttggaagaggatgtctgcggagccccccgatcaacgccaccaggcccctccccccctcctgctgacggagattgtgaggacgatgaggacgacgatggagtggacgaagacgcggaggaggaaggcgatggcgaagaagctggagcctcaccgggcatgccaggccaacccgagcagagagggggtccacagccccgcccgcctctggctcctcaagcgagccccgccgggacagggcccagggagagatgcacaccggctggagggggagcagagcctaggaagctgtctcgaactccaaagtgtgcgcggtgtaggaatcatggggtcgtaagttgcctgaagggccacaaacgtttttgcagatggcgcgactgtcagtgtgccaactgtctgctggtggtcgaacgacagcgggtcatggctgcccaggtcgccctgcggagacagcaagccacggaggacaaaaaaggcctgagcgggaaacagaacaattttgagcgaaaagcagtctaccaaagacaggtgcgggcccccagcctgctcgcaaagagcattctggaaggttatcggcctataccggcggagacgtatgtgggcggaaccttcccactgccaccaccagtttctgaccggatgcgcaagcgccgggcattcgcggataaagaattggagaatattatgctggaaagggagtacaaagaacgggaaatgctggagacttcccaggccgcggccctgttcttgcccaatcgaatggtgccgggacccgattacaacagctacaaatctgcttattccccttcgcccgtcgaacctccatctaaggatttctgcaattttttgcctacctgtctcgacctgactatgcaatattcagggtccgggaacatggagctgatctcgagcaacgtatcagtggctactacatatcgccagtatccgctctcatcccggtttttggtgtggcctaaatgcggaccaattagcgatacgctactataccagcaatgtcttctgaacgccacgacctccgtccaggctctgaagcccggcgccagctgggatttgaagggcgcccgcgtccaagacggcctgtccgccgaacaagatatgatgccatccaagctggaaggaagcctggtcttacctcacacgcctgaaattcaaacaacacgcagcgacctgcagggtcaccaggccgttcccgagcgtagcgcattttctccaccgcgccgtaatttcagccccattgtcgacaccgatagcctagcagcccaaggccatgtcctcacaaagatatcgaaagagaacactcggcaccccctccctctgcgccacaaccctttccacagtctgttccagcagaccctgacagacaaaagcggccctgagcttaaaacccctttcgtgaaggaggcctttgaagagactcctaaaaagcaccgcgaatgcttagtaaaagacaatcagaagtatacatttaccattgatagatgtgctaaagacttattcgtagccaaacaagtggggacaaaactctcagtgaacgagcctctaagcttctctgtggaatcaatcctgaaacgaccgtcatcagccattacgcgagtcagccagtag

SEQ ID NO: 185840 - DNA, 1686 bp, synthetic construct
  misc_feature 1..1686: note = Description of Artificial Sequence: Synthetic coding sequence
  source 1..1686: mol_type = other DNA
atggccgacccccaggccggcagcgccgccggcgactgggagatcgatgtcgaatccttggagctggaggaggacgtatgtggagccccccgaagcacgccccccggcccaagtccccccccggccgatggggactgcgaggatgatgaagatgatgatggggtcgatgaggatgccgaagaggagggcgatggagaggaggccggtgcctcccccgggatgcctggacagccagaacagcggggcggcccgcagccccggcctcctcttgcgccccaggcaagccccgccggcacagggccaagggaaagatgtacaccagccgggggcggtgctgagccccggaaactaagtcggacccctaaatgtgcacggtgcaggaaccacggtgtggtgagttgtttgaaaggtcataagcggttttgccgctggcgggattgccagtgtgctaattgtttattagtggtggagcggcagcgagtgatggccgcccaggtggccttacgtagacagcaagctactgaagacaaaaaagggttgtcggggaaacagaacaacttcgagaggaaagcggtgtatcagaggcaggtcagggctccatctttactggccaagtcgattttggagggctatcgccccatcccggccgagacatacgtagggggcacattcccgctcccacctcccgtgtccgaccggatgagaaaaaggcgcgcctttgctgataaggagttggagaatattatgctggaaagggagtacaaggagagagagatgctggaaacaagccaggccgccgcattatttctgcccaaccggatggtccctggccctgactataacagctataagtcagcctattctccctcaccagtggagccgccatccaaagatttctgcaactttctccctacatgtcttgacttaacaatgcagtactctgggtccggaaatatggagttgatctccagcaatgtgagcgtggctactacttaccggcagtaccctctgtcgagtcggttcttggtgtggccaaaatgtggcccaatatccgacacgttgttataccagcagtgcctcctgaatgcgacgaccagcgtccaagctcttaaaccaggtgcctcctgggacctgaagggagcccgggtccaagacggactgtccgctgagcaggacatgatgccttcaaagctggaaggcagcctcgtcctcccccacacgcctgaaattcaaacgactcgttcggacctgcagggccatcaggctgtgccagagcggtccgcgtttagccctcctaggaggaatttctctccaatcgtcgatacagacagcctggccgcccaggggcacgtgttgaccaagatctcaaaagaaaacacaagacatcccttgccactgcggcataaccccttccactccctcttccagcagaccctcactgacaagagtggacccgagcttaagacgccttttgtgaaggaggccttcgaagagaccccaaagaaacatcgggagtgtctggtaaaggataaccagaagtatacatttacaatagacagatgcgcaaaagacctgtttgtggccaaacaagtgggaaccaaactgagcgtgaatgaaccattatcattttctgtggagtccattctgaagagaccatcttccgcaataaccagggtgtcccagtag

SEQ ID NO: 185841 - DNA, 681 bp, synthetic construct
  misc_feature 1..681: note = Description of Artificial Sequence: Synthetic coding sequence
  source 1..681: mol_type = other DNA
atggccgacccccaggccggcagcgccgccggcgactgggagatcgacgtggaatctctggaattggaggaagatgtgtgtggagccccacggtcaacaccaccaggccccagccccccacccgctgatggggattgcgaggacgacgaagacgatgacggcgttgatgaggatgcagaagaggaaggggatggcgaggaagctggggcctctcccgggatgcccgggcagcctgaacagagaggaggaccacagccccgtccgccgctggctccacaggcctctcctgccggaacaggaccacgagagcggtgcacccccgcaggcggcggagccgaacctaggaaattgagtagaactcccaaatgcgctagatgccgtaatcacggcgtggtgtcctgcctgaagggccacaagcggttctgtagatggagggactgtcagtgcgccaactgcctcctcgtggtggaacgccagagagtaatggccgcgcaggtggcattacgaagacaacaggctaccgaagacaaaaaagggctgtctgggaaacagaacaatttcgaacgcaaggcagtatatcaaagacaagtgcgggcccccagcctcctagctaagtccatcttggaggtgctgctcgggctattctactcatactacgtttatattatgaaccacctctag

SEQ ID NO: 185842 - DNA, 681 bp, synthetic construct
  misc_feature 1..681: note = Description of Artificial Sequence: Synthetic coding sequence
  source 1..681: mol_type = other DNA
atggccgacccccaggccggcagcgccgccggcgactgggagatcgacgtggagtcgcttgagctggaagaggacgtttgtggggctccacgtagcaccccacctgggccttccccaccacccgctgacggagattgcgaggacgatgaggacgacgacggcgttgatgaagatgccgaagaagagggtgacggagaagaagccggggcgtcaccaggcatgcccggacagccagagcagcggggaggaccccagcctcgaccacctctggctccccaggcgtctccggcgggcacagggccgagagagcggtgtacaccagctggcggaggtgctgagcctagaaagctgtctcggaccccaaaatgtgcccgctgtcgcaatcacggagtggtcagttgtcttaagggacataagaggttctgcagatggagagactgccaatgtgcaaattgtcttctcgtggtggagcggcagagagtcatggctgcccaggtggccctcaggagacagcaggccacagaggacaagaagggcctgtctggaaagcagaacaatttcgagaggaaagcagtgtatcagaggcaggtgcgggcaccctcactgctggccaaaagcatactggaggtcttacttggactgttttatagttactacgtgtatattatgaaccacctgtag

SEQ ID NO: 185843 - DNA, 6039 bp, synthetic construct
  misc_feature 1..6039: note = Description of Artificial Sequence: Synthetic coding sequence
  source 1..6039: mol_type = other DNA
atgtggatcctggccctgagcctgttccagagcttcgccaacgtgttctccgaggatctgcattcaagcctgtactttgtgaatgcttccctccaggaggttgtctttgcttctacgaccggaaccctggtgccctgtcctgccgccggcatcccccccgtgactcttcgttggtacctcgccaccggagaagagatctatgacgtgccagggattaggcatgtgcaccctaacggcacactgcagatatttccattccctccaagtagcttcagcactttaatccacgacaatacatactactgtaccgctgaaaatcccagcggcaagataaggagccaggatgttcatataaaagcagtgctccgcgagccttataccgttcgtgtggaagaccaaaagaccatgaggggtaatgtcgccgtgttcaaatgcattatcccatcttcggtggaagcatatattaccgttgttagctgggagaaagatactgtcagcttagtatccggaagccggttccttatcacatccactggggccctgtacatcaaggacgtccagaatgaagatggattgtataattacaggtgcatcaccagacatcgatataccggcgagacgcggcaatccaactcagcccgcctttttgtgagcgatcccgcgaactccgcaccaagcatccttgatgggttcgatcacagaaaggccatggcaggacagagagtggagctgccttgcaaagcgctcggccatcctgagccagattataggtggctcaaggataacatgcccttggagctctctggtcgcttccagaaaacggtgactgggctgctgatcgagaatatccgaccctccgacagtggaagttatgtgtgtgaggttagtaatcgctacggcacagccaaagtaattgggagactgtacgtgaaacaacctttaaaagcgacaattagtccacggaaagtgaagtcatctgtagggtcacaggtctccctaagctgcagtgtcactgggaccgaagaccaggagctttcttggtatcgtaatggcgagattctgaaccctggcaaaaatgtcaggatcaccgggataaatcacgaaaatctcatcatggatcacatggttaagagcgatggaggagcataccagtgcttcgtacggaaggataagctgagtgcgcaagattacgttcaagtagtgctagaagatggcactccaaaaattatctctgccttttccgaaaaagtagtctcccccgcagaaccagtttctctgatgtgcaatgtaaaagggacccccctgccaactatcacctggacactggacgatgaccccattttgaaagggggcagtcataggatctcccaaatgatcacaagcgagggaaacgttgtttcatacctcaacatttcgagctcccaggttcgtgatggcggagtgtacaggtgcactgccaacaacagtgccggggtcgtcctctaccaggccaggatcaacgtcaggggtccagctagcattaggccaatgaagaacattaccgccattgctggccgggatacatacattcattgccgtgtgatcgggtatccctactattctatcaaatggtataaaaacagcaatctattgccgttcaatcatagacaggttgcctttgagaacaacggtaccttaaagcttagcgacgtgcagaaggaagttgacgagggagaatacacatgcaacgtcctcgtgcaacctcaactgtccacgagtcagagtgtgcacgtcactgtcaaggttcccccatttatccagccctttgagtttcctagattcagcatcggacaaagggtgtttatcccgtgtgtagttgtgtccggtgatcttcccatcaccatcacatggcagaaggatgggagaccaatcccaggcagcttgggtgtgacgattgacaacatagacttcaccagcagcctccgtatctccaatctctctcttatgcacaatggcaattatacttgtatcgcacgcaacgaagccgccgcagttgaacatcagtcccaactgattgtgagagtccctccaaaatttgtggtgcagccacgggatcaagatggtatctacggtaaagcggtgatactgaactgttccgcagaaggctaccccgtccccactatcgtgtggaaattcagcaaaggggctggcgtgccccaattccagcctatcgcactgaatggccgcatccaggtcctctccaatgggagcctgctgataaagcatgtggttgaagaggattcaggctattacctgtgcaaagtgtctaacgacgtcggtgctgacgtgtctaaatcaatgtacctgacagtcaaaattcctgccatgatcacatcttatccaaatacgaccctcgctacacagggtcaaaaaaaggaaatgtcctgtaccgcgcatggggaaaagcctattatcgtccgatgggaaaaagaagacagaatcattaacccagaaatggccagatacctggttagtaccaaggaagtgggcgaggaggtgatatcgactcttcagatactccccacggtccgcgaagactctggcttcttctcatgtcacgcaatcaatagttacggcgaagaccggggcataatacagctcacggttcaggagcccccagatccacctgagattgagatcaaggacgtcaaagcacgcactattactctgcgttggacgatggggtttgacggaaatagccctatcaccggctatgacattgaatgcaaaaataaatcagacagttgggactctgctcagcgcacgaaggacgtgtcccctcagttaaacagcgcgaccattatagatatacaccctagttctacttactctatcagaatgtacgccaagaacagaattgggaaaagcgaaccctccaatgagctgactataaccgctgatgaggcggctcctgacggtcctcctcaggaggtgcacttagagccgatttcttcacagagcatccgcgttacttggaaggctcctaagaagcacctccagaatggaataatccgcgggtaccagatcgggtatagggaatacagcacaggaggaaacttccagttcaatatcatttcggtggacacgagcggcgacagtgaggtttataccctggacaacttaaataaattcacacagtacggcctggtggttcaggcgtgtaaccgcgctgggaccggaccctccagtcaggaaattattacaacaacactggaggacgttccctcctaccccccagagaacgtccaggccattgctacatcgcccgaatccattagtatcagctggagcacgctctccaaggaggcactcaatggcatcctgcagggcttccgtgtgatttattgggctaacctgatggatggggagctgggggaaattaaaaacattactactactcagccatccctggagcttgatgggttggagaagtacacgaattatagcattcaagtgctcgcgttcacacgtgctggagacggcgttcgaagcgagcaaattttcacccgaacgaaggaagatgttccagggcctccagcaggcgtcaaagccgccgccgcatcagcttcaatggtttttgtgtcctggttgcctcctctgaagttaaacggtataatccggaaatacaccgtgttctgctcccatccctacccgacagtgatcagcgagtttgaggcttctcctgattcttttagctacagaattccaaatctgtcacgcaacaggcagtacagtgtctgggttgtagctgtaaccagtgctggaaggggcaactcatccgagatcattactgtggaaccccttgccaaagcgccagcacgcatcctgactttcagtggcactgtgactacaccctggatgaaagacattgttctcccctgcaaagctgttggtgatccaagtcccgccgtgaagtggatgaaggactctaacggaaccccatcactcgtaacgatcgatggtcgaaggagcatcttctccaatggaagctttatcattagaaccgtaaaggccgaagactcagggtactattcctgcatagccaacaataattggggatcggatgagattattcttaacctacaagtccaggtgccacctgaccaacctaggctgacggttagcaagaccacctcaagcagtattacgcttagctggctacctggcgacaatggaggttcgtctattaggggatacatcttacaatactcagaagataactctgaacagtggggcagctttcctatatcgccttccgaacgcagttatcgccttgagaatctgaagtgcggaacttggtataagtttactctcaccgcccagaacggcgtggggccagggcgcatcagcgagattattgaggccaagaccctcggaaaagagccccaattcagtaaagagcaagagctgttcgcctctatcaatacgaccagagtcagactgaatttgatcggctggaatgacggcggctgtcctatcacctcatttaccctagaatatcgtcctttcggaaccaccgtctggaccactgcccaacgcacaagcctcagcaaatcttacatcttatacgacctccaagaggcaacctggtacgaactgcagatgagagtgtgcaactcggccggatgtgcagaaaaacaagccaacttcgctacactcaattatgatggctctacaattcctcctctgattaagtctgtcgtccaaaatgaggaagggttgacaactaacgagggcttgaaaatgctggtgacaatctcatgtatactggtgggtgtgctgttactgttcgttctactgcttgttgtccggcgacgacgcagagaacagagactgaaacggttgcgagatgcgaagtctctagctgagatgctgatgagcaaaaacacaagaacgagcgacactctgagcaaacaacaacagaccttgcgtatgcatatagacatcccccgggcccagctgctcatcgaggagcgagataccatggaaacaatagatgatcgctccacagttctgttaaccgatgcggactttggggaggctgctaaacagaagtcgctaaccgtaacccacactgtgcactaccagtccgtgtctcaagccaccgggccgctggttgatgtgtcagacgctcggccaggaaccaatcccacgacgcgtcggaatgccaaggcaggtcctacagcgcgcaataggtacgcttcccaatggaccctgaatcgacctcaccccaccatctcagcccacactctcacaacagactggcgactgcctacacccagggccgcgggcagtgtggataaggaatccgacagttattctgttagtccctcccaggacacagatcgggccagatctagtatggtctcaaccgagtccgcgagcagcacctacgaagagctggcccgggcatatgaacacgcaaagatggaggagcaacttcgccatgccaaatttacaatcaccgagtgcttcatcagtgacacctcttcggagcagctgaccgcaggaaccaatgagtatacagacagtttaacaagctcaacccctagcgaatctggaatctgtagattcacagcatccccacctaagccgcaggatggtggccgggttatgaatatggccgtcccaaaagcacaccggcccggagacctgattcatttgcccccttatctgagaatggacttcctacttaatagaggcggcccgggcacaagtcgagatctctcactgggccaagcttgcttggagccccagaaatccagaacactgaagcggccaactgtgctggagcctattcccatggaggcagcttcgtctgctagcagcaccagggaaggacaaagctggcaacccggggccgttgctacactgccccaaagggagggagctgaactcggccaggccgctaaaatgagttcctctcaagagtcccttctagattctaggggtcatctcaagggtaacaacccatacgcaaagtcctatactctcgtttag

SEQ ID NO: 185844 - DNA, 6342 bp, synthetic construct
  misc_feature 1..6342: note = Description of Artificial Sequence: Synthetic coding sequence
  source 1..6342: mol_type = other DNA
atgaccggcgccggcgagccccggcgggaggagccccccccccagcctagtgcaggtctaaggagtcgcgagtcaggtgcaccctctgctggcggttgggaaagagctgaacggggcagaggcgccgccgcccggcctgctacaggaccgccacctagaaggataggtcctctgtatggcatgtggctggtcaccttccttctgctgcttgattccctccataaagcgagacccgaagacgtcgggacttcgctatattttgtcaatgacagtcttcagcaggtcacattctcctcttccgtgggggtggtggtcccctgtccggccgcgggatccccttctgccgcgttgcggtggtacctggctactggagacgacatatacgacgtaccccatatccgccatgtgcatgcaaatggcactctccaactgtaccccttttcaccatccgcatttaattcattcattcatgataacgactatttctgcacagccgagaacgctgccgggaagatcaggtctccaaatatccgcgtaaaagctgtgttcagagagccctacactgtgagggtggaggaccaacggtcaatgagaggaaacgtcgctgtgtttaaatgcttgatcccctctagcgtccaggaatacgtgagtgtggtgtcctgggagaaagatacagtgtcaataatccctgagcataggttttttatcacataccacgggggcctttatatctccgatgtgcaaaaagaagacgctctgtcgacctataggtgtataacaaaacacaagtatagtggcgaaacacgccagtccaacggcgctcgccttagtgttacagacccagcagaatctatccccacgattctggacggattccattcacaagaagtgtgggctgggcacaccgtggagcttccctgtaccgctagcggataccctatcccagccattcggtggctgaaggatggaagaccactgcctgccgatagcagatggactaaacggattacggggctcacaatttcggatcttaggaccgaagacagtggtacctacatctgcgaagtgacaaatacatttggttctgcagaagccaccgggattctaatggttatcgaccccctgcacgtaacactgacaccaaaaaaactcaaaactggcattgggagcaccgttattttgtcttgcgcactgaccgggtcaccagagtttacaatccgctggtacagaaatacggaactcgttctccccgacgaggcaatttccatccggggattaagtaacgaaaccctgctcattaccagcgcccagaaaagccactctggtgcttatcagtgtttcgctaccaggaaggcacagacagcccaggatttcgcaattattgccctcgaggatggaacccctcgcattgtctcatctttctcagagaaggtggtcaaccccggcgagcagttctcgcttatgtgcgctgctaagggtgccccaccacctacagtgacctgggcactggatgacgagccaatcgttcgagacggctcacacaggaccaatcaatacacgatgagcgacggcacaactatttcccacatgaacgtgactggtccccaaatccgagatggaggagtgtaccgatgtaccgctcggaacctggtaggaagcgccgagtaccaggcaagaatcaatgtgcgcggtccccccagcatccgagccatgcggaacattactgccgtggccggccgagatactctcattaattgccgcgtcataggatacccctattactccataaagtggtacaaggatgcactgctgttgccagataaccatcgccaggtggtcttcgagaacggtacacttaaactgacagacgtccagaagggcatggatgagggcgagtacctctgctctgtgctgatccagcctcagctatcaatctctcagtccgtgcatgtggccgtgaaggtccctcctctcatccagccatttgagttcccacccgccagtataggacagctcctgtacatcccctgcgtggtgagctctggcgatatgcccatacgcatcacctggcgcaaagacggccaggtcatcatttctggatccggcgttaccattgaaagcaaagagtttatgagctccttgcagatatcaagcgtgtccctgaagcacaacggcaattatacctgtattgcgagcaatgctgcagcgaccgtgtctagggaaaggcagctgattgtccgagttccacccaggtttgtcgtacagccaaacaatcaggacggtatatacgggaaggccggcgtgctgaactgctcggtggatggctaccccccccctaaagtgatgtggaagcacgctaaaggatctggtaacccccagcagtaccaccccgtgccccttaccggacgaattcagatcctaccgaatagctcccttctgattcggcacgtgctcgaggaggatatcggctattatctgtgccaggctagcaatggtgttggtacggacataagcaaatctatgttcctcacggtcaagatacccgccatgattaccagccatcccaacaccactatcgccatcaaggggcatgccaaggagctgaattgcactgcacgcggggagcggccaatcattatcaggtgggaaaaaggcgacaccgtgatcgatcccgatagagtaatgcggtacgcgatcgccaccaaggacaatggcgacgaggtcgtgagcaccctgaagcttaagcctgcagaccggggggattccgtgttcttctcctgtcacgctatcaattcctacggtgaagatcgcgggcttattcagctcactgtccaggagccccctgacccccccgagctcgagatccgcgaagtcaaggctaggtcaatgaatctgcggtggacacagcgattcgacggaaacagcattataaccgggtttgacatcgagtataaaaacaagagcgacagctgggactttaagcaaagtacacgaaacatctctcccacgataaaccaggcaaacatagtcgacctgcaccctgcctcggtttactccatccggatgtactcattcaacaaaattggacgcagcgagccatccaaggagctgacaatcagcaccgaggaggcagcccctgacggaccccctatggacgtgacattgcagcctgtcacgagccaatccatacaagtgacttggaaggcccctaagaaggaacttcagaatggtgtgattcgaggttaccaaatcggctacagagaaaattctcctggaagcaacgggcaatacagtatagtggaaatgaaagcaacaggcgactccgaagtatatacgctggataacttgaagaaattcgcacagtatggagtcgtagtccaggcttttaacagggccgggaccgggcccagcagcagtgaaatcaatgctacaactcttgaagatgtgcctagccaaccacctgagaacgtgcgtgcgttatctattacttcagacgtggctgttatctcgtggagtgaacctcctcgcagcactctgaacggagtactcaagggctaccgggtgattttttggagcctgtacgtggacggcgagtggggcgaaatgcaaaatattacaactacccgggaaagggtcgagctgcgtgggatggagaaattcacaaattattctgtacaggtgcttgcgtatactcaggctggggacggtgttagaagctccgtactgtatatccaaacaaaagaagatgtgcctgggccccccgcgggcattaaagccgtgcctagctcagcatcttctgtcgtggttagttggctgcccccaaccaaacccaacggagtgattagaaaatacacgattttctgttcctcacccggttcggggcagccagctccatctgagtacgagacctctcctgaacagcttttctatcgcatcgcgcaccttaacagagggcagcagtatctgttgtgggtagcggcagtgacgagtgcaggtcgtggaaactcgagcgagaaggtcactatcgagcccgctggtaaagcccccgccaaaatcatctcatttggcgggaccgtgaccaccccttggatgaaggatgtcaggctgccttgtaatagtgtgggagatcccgcaccagccgtgaaatggaccaaggacagtgaagattcagcgataccagtaagtatggatggacacaggttgattcacaccaatggaacgctgctgctccgagctgtgaaggctgaggacagcggctactatacttgtaccgccaccaacaccggagggttcgatactatcatagtgaatctccttgttcaggtcccccccgatcagcctaggttgactgtgagtaagacttccgcatcttcaataacgctgacgtggatccctggtgacaacgggggcagttctatcagagggttcgtactgcagtactccgttgacaattcagaagagtggaaagatgtgttcatatcctcatccgagcggtcattcaaattggactcactgaaatgtggaacgtggtacaaagtgaagctcgctgccaaaaactctgtcggcagcgggcgcatcagtgagatcatcgaggcaaagactcacggtcgagagcctagttttagtaaggaccagcacctgtttacccatattaactccacacatgcacgattgaacctccagggttggaataacgggggatgcccaatcactgccattgtgctggagtatagacctaagggcacatgggcttggcaaggactgagagcaaatagcagcggcgaagtgtttctcacagaactgagggaggccacttggtatgagctgcggatgagagcctgtaacagcgccggctgtggcaatgagactgcccagttcgctaccctggattatgatggctcgaccatccctcccataaagtccgcccagggggaaggcgatgatgtgaagaagctattcaccattggatgccctgtcattctggccacacttggggtggccctgctatttatcgtccggaaaaaaaggaaggaaaagaggttaaaacgcttacgcgacgcaaaatcactggcagaaatgttgattagcaaaaacaaccggtcctttgataccccggtcaaaggcccaccccagggaccgagacttcacatcgacatccctagggtgcaactgcttatcgaggacaaagagggtattaaacagttgggagatgataaggccacaatccccgtcacagatgctgagttctctcaggctgtgaaccctcagtcattttgcactggagtaagtctgcatcaccccactctcatacagtccaccgggcccttaatcgatatgtccgacattaggcctggaactaatcctgttagtcgcaaaaatgttaaaagcgctcattctacccgcaaccgctactcctctcagtggaccctaacaaaatgtcaggcttcaactccagcccgcacactgacatcggattggcgcaccgttggcagccagcacggcgtaaccgtgactgaatccgatagctatagcgcaagcctgagccaggatacagacaagggcagaaacagtatggtttcaacagagtccgcgagtagcacctacgaagagctggccagggcttatgagcatgctaaattggaagaacaactacagcatgctaaattcgagatcaccgagtgcttcatttctgattcgtcttctgaccagatgactacaggcacaaatgaaaacgccgatagtatgaccagtatgtctactccttccgagcccgggatctgtcgttttaccgcgtctcctccaaagccccaggatgcagaccgtgggaagaacgtggccgtcccaatcccccatagggctaataaaagcgattactgcaatttgcctctctatgccaaatctgaagccttcttccggaaggccgatggccgagagccctgtcctgtcgtcccacctagggaggcaagcattcgcaacctggcgaggacttaccatacacaggcgagacatctgacccttgaccctgctagtaaatcactcggacttcctcatccaggtgcacccgcagccgcgtcaaccgcgactctgccccagcggacattggcaatgccagcaccaccagccggcactgcaccgcctgcaccggggcccacccccgccgaaccacctaccgcaccatcggcagccccccctgcacccagcaccgaaccccccagggcaggtggtccacacaccaaaatgggcggatctcgagatagtctcctggaaatgagcacaagcggcgtgggacgttcacaaaagcaaggcgccggcgcatatagtaaatcctatactctggtgtag

SEQ ID NO: 185845 - DNA, 5463 bp, synthetic construct
  misc_feature 1..5463: note = Description of Artificial Sequence: Synthetic coding sequence
  source 1..5463: mol_type = other DNA
atgctgccctactgggccggccacaccgtggagctgccctgcaccgccagtgggtatcctattcctgccattaggtggctcaaggatggacgcccgctaccagcagattctcgatggacgaagcggatcacagggctcactatcagtgacctccgcactgaagacagcggaacatacatttgtgaagtgacaaacactttcggatcagctgaagcaacagggatactgatggtgattgacccattgcatgtgactctgaccccaaagaaattaaaaacaggtataggcagtaccgtcatcctcagctgtgcactgacgggatcacccgagtttaccattaggtggtatagaaatactgaactcgtgttgcccgacgaggcaatttccattagaggtctgagcaatgagacactgctcataacatccgctcagaaatctcatagcggagcataccagtgctttgccacccgtaaggcgcagaccgcccaagacttcgccatcatcgccttggaggatggtaccccacggatcgttagctcgttttcagagaaagtcgtgaaccctggggagcagttttccctgatgtgtgccgccaagggcgctcccccaccaactgtgacttgggccctcgacgatgagcccattgttcgtgacggaagccaccgcaccaaccaatacacaatgtctgacggcaccacaattagccatatgaatgtgacgggaccacagatacgcgacggaggcgtctaccgatgtacagcgcgtaacttagtgggtagtgcagaatatcaggcccggatcaatgttcgagggcccccctctatccgcgccatgcgtaacataacagcagtggccggccgggatacgcttatcaattgccgcgtgattggatacccctactacagtatcaaatggtacaaagacgcattacttcttcccgacaatcacagacaagtggtttttgaaaatggaactctgaaactgacagacgtccagaagggaatggatgagggggagtatctgtgctccgtgttgattcagcctcaacttagtataagccagagtgtccacgttgccgtaaaagtgcccccactgatccaaccattcgaattcccccccgcaagtattggacaactcctctacattccttgcgtggtgtctagcggtgacatgcccataagaatcacatggcggaaagacgggcaggtcattatctccggctctggagtaactattgagagcaaagagttcatgagctcactgcagatcagttccgtgagcttaaaacacaatggcaactacacatgtatcgcctccaacgccgcagctactgtgagtagggagaggcaactgattgtgagggttcctccgcgcttcgtggtgcagcccaataaccaggacggcatctatggaaaggccggtgtcctgaactgttcggttgatgggtatcccccgccgaaggttatgtggaagcacgctaaaggctccggaaatccacagcaataccatccggtgccgctcaccgggaggatccagatcttgccgaactcttcccttctgattaggcacgtgctggaggaagatatcggctactatctgtgccaggcctctaacggcgttggcactgacatcagtaaatccatgttcctaaccgtcaagattcccgctatgatcacctcacaccccaacaccacaatagccatcaagggacacgctaaggagctgaattgcaccgctcgcggagagcggcccattataatccgttgggaaaagggcgacacagtgatcgacccggatcgcgttatgagatacgcaatcgcgacaaaggataacggcgacgaggtcgtgtccacactgaagctgaagccagccgatagaggggatagtgttttcttttcatgccacgccataaactcttacggcgaggatcgagggctgatccagctcactgtgcaagaaccaccagatcctcccgagttggagattagagaggtgaaagcccggagcatgaacctgagatggacacaacgctttgacggcaactccattataacaggatttgatatcgagtataaaaacaaaagcgacagttgggactttaaacagtcgacccgcaacatctctccgactatcaatcaggccaacatcgtagaccttcaccccgcctcagtctactccattcggatgtactccttcaataagatcggaagaagcgagccctcgaaggagttaacaatctctactgaggaggcggccccagacgggcctcccatggacgttacccttcagccggttacatctcagtccatacaagtgacttggaaggcaccaaagaaagaactgcaaaacggagtcataagagggtaccaaataggctatcgggaaaattctccaggtagtaacggccagtattccattgttgaaatgaaggccacaggcgattccgaggtctacacactggacaatctgaagaaattcgctcagtacggcgtggtggtccaggcttttaacagagctggtacagggccttctagttccgaaatcaacgctaccacactggaagatgtaccaagccagcccccagaaaatgtgcgggccctatctattacttccgatgtggcagtgatatcctggtccgagcctccgaggtccacattgaacggtgtgctgaaaggctaccgggtgatcttctggagtctatatgtggacggcgaatggggagaaatgcagaatattacaaccaccagagaaagagtcgaactgcgtggaatggagaagtttacaaactactccgtccaggtgctggcctacacccaggctggtgacggagtgagaagcagcgtcctctatatccagaccaaggaagacgtgccgggacctccagctggaatcaaggcagtgccttcatctgcgagcagcgttgtggtgagctggctcccaccgactaaacccaacggggttataagaaagtatacaattttctgttccagccctgggtccggacaacctgcccctagcgagtatgagacctccccagagcagttgttctatagaattgctcacctgaaccgggggcagcaatatttattgtgggtcgcagcggtgacgagcgccgggagaggcaatagcagtgagaaggtcaccattgagcccgcaggcaaagccccagctaagataatatcgttcggaggaactgtgaccacgccttggatgaaggacgtgcggctgccttgtaactcggtcggcgacccagcgcctgccgtgaagtggacaaaagactctgaagattcggccatcccagtaagcatggacggccaccggttaatccacactaatggaacactcctattaagggccgtgaaagccgaagattcaggatactatacctgcacggccaccaatacaggtgggtttgacacaattatcgttaacttgcttgtgcaggtgcctccggatcagcccagactgacagtgagtaaaaccagtgcgtcaagcatcaccctcacttggattcccggggataacggcggttcctctatccgcggttttgtgctgcaatacagcgtggacaactccgaggagtggaaggacgtctttatctcatccagcgaacggtcctttaaactggattccttaaaatgcgggacctggtacaaggtaaagttggctgccaaaaatagtgttgggtcgggccgcatctcagaaatcattgaggctaaaactcacgggcgcgaacccagcttcagcaaagaccaacatctctttacccacatcaattccacacacgcccgcctcaacctccagggctggaacaacggcggatgccccattaccgctattgtcctggaataccgacccaagggcacatgggcttggcagggacttagagctaactcctccggcgaagtctttctgacagagctgagagaggctacctggtacgaactccgaatgagggcctgcaacagcgcggggtgcgggaacgagacggcccagttcgctacactggactacgatgggtcaactatcccccctatcaaaagcgctcagggcgaaggggacgacgtgaagaagctctttactatcggctgcccagtgatcctggcaaccctcggagtcgcactgctgtttatagtaaggaagaaacggaaggaaaagagactaaaacggcttcgggatgccaagtcactggccgagatgctgatttctaagaacaaccgcagcttcgacactccagtgaaagggcctccgcagggacctcgactccacatcgacatacccagggtccaactgttgattgaggataaagaggggatcaagcagttaggggacgacaaggcgacaattcctgtcacagatgccgaatttagccaagcagtgaacccgcaaagcttttgcacaggggtgagcctacaccatccaactctgattcagagtaccggccctcttattgacatgagcgacatccgacctgggaccaatccggtatctagaaagaatgtgaaaagcgcacattcaacgagaaatcggtactctagccaatggaccctgaccaaatgtcaggcttccactcctgcccgtactctaacttctgattggcgcactgtaggaagccagcatggtgttactgtcaccgagtcggactcctactcagcttcgttaagccaagatacagacaaggggcgtaactcgatggtctctaccgagtcagcgtcgagcacctatgaagagcttgcacgggcctatgagcatgccaaactggaggagcagctccaacacgccaagtttgaaataacagagtgcttcataagtgacagttctagtgatcagatgacaacaggcacaaacgaaaacgcggatagcatgaccagtatgtcgacacccagcgaacccggaatttgtagatttaccgcttccccgccaaaaccccaggatgccgataggggcaagaacgtcgcggtgcctataccacaccgcgctaacaaatccgactactgcaacctgcccctgtatgcgaagtccgaagccttcttccgaaaagcagatggccgcgagccgtgtcctgttgtacccccccgggaggcctcaatccgtaacttggccaggacataccacacccaagctcgccatcttaccctagatcccgcctccaagagcctcgggcttccacatccaggggcccccgccgctgcttcgaccgcaaccctgcctcagcgcactctcgccatgcctgctcctcctgccggcaccgccccacccgcacccggtcccacacctgctgaaccaccgacagccccctctgctgcgccgccagcaccgtcaactgaacctcctagagccggggggcctcacaccaagatgggcgggagtcgggattccctcctggagatgtccacctcaggggtggggcggtcccaaaagcagggagccggcgcatactctaagtcctatacactggtctag

SEQ ID NO: 185846 - DNA, 762 bp, synthetic construct
  misc_feature 1..762: note = Description of Artificial Sequence: Synthetic coding sequence
  source 1..762: mol_type = other DNA
atggagggcaccgtgaacctgcagctgagcgccaagagcgtgggcgtgtttgaagcattttataacagtgtgaagccgatccagatcattaactccaccatcgagatggtgaagcctggcaagttcccaagcggtaagaccgagatccctttcgaattccctctacacctgaagggtaacaaggtcctgtatgagacctaccacggcgttttcgtgaatatccagtatacgctgagatgcgacatgaagcgcagcctgctcgccaaggaccttaccaaaacatgtgaatttattgtgcactcggctcctcagaaggggaaattcaccccatcccctgtggacttcacgattaccccagagaccttacagaacgtaaaggagcgggcactattgccaaagtttctgctgaggacctcccagctcaataaattgtgtcaccatgcggcgaccaatggtagagccggagggggcgaactgggttccaggcaccagaagcgcggcgcggcagccggcgctagaggggacgtgagggtttgccggtatgccagggacgctacagaaatccagaatatacagattgctgatggggacgtctgccggggcttgtctgtccctatctatatggtcttccccagattgttcacctgcccgacattggaaaccacgaactttaaagtggagttcgaggtgaatattgttgtgctcctccacccagatcatctcataactgagaattttccgctcaagctgtgcaggatttag

SEQ ID NO: 185847 - DNA, 894 bp, synthetic construct
  misc_feature 1..894: note = Description of Artificial Sequence: Synthetic coding sequence
  source 1..894: mol_type = other DNA
atgggcaccgccctggacatcaagatcaagcgggccaacaaggtgtaccacgcaggggaagtcctgagcggtgtggtcgtaattagcagcaaggactccgtacagcaccagggcgtctcactgacgatggaaggaactgttaatctgcagctgagtgctaaatcagttggggtcttcgaggctttttataattcggtcaagccaatccagattatcaattcaacaatcgagatggtgaagccagggaaatttccaagcggcaagactgagattcccttcgaattcccgttacacttgaaaggcaataaagtgctctacgagacttatcacggggtatttgtcaatatccagtataccctaaggtgcgatatgaagcgcagcctgctggctaaagacctgactaagacttgtgaattcatcgtccacagtgccccccagaagggcaaattcaccccctcaccagttgactttaccattactccagagacactgcagaatgttaaggaacgagctttactaccgaaatttcttttgaggggtcaccttaactctacaaactgcgtcatcacgcagcccctgacaggagagcttgtcgtcgaaagctcagaggccgccatcaggagcgtggagctgcagctggtccgggtcgaaacctgcgggtgcgcagaaggctacgcaagagacgctacagagattcagaatatccagatagcagacggagatgtatgtaggggcctgagtgtccctatttacatggttttcccccgcctttttacgtgccctacactggagacaacgaacttcaaggtggagtttgaagtaaatattgtcgtgttattgcaccccgaccacctaattacggagaactttccgctcaaactgtgtagaatttag

SEQ ID NO: 185848 - DNA, 519 bp, synthetic construct
  misc_feature 1..519: note = Description of Artificial Sequence: Synthetic coding sequence
  source 1..519: mol_type = other DNA
atgggcaccgccctggacatcaagatcaagcgggccaacaaggtgtaccacgcaggtccccagaaggggaagtttacaccctctcccgtggatttcacgatcacccctgagaccctacaaaacgttaaggagagagccctccttccaaagtttttgttgaggggccatctgaatagtactaattgcgtgattacccagccactaaccggagagctggttgttgagtcttccgaggctgccattcgctcagtggagctccaactggtgcgcgtggagacctgcggatgtgccgagggctatgctcgggacgccaccgagatccagaatatccagatcgcagacggagatgtatgccggggactgtccgtccctatctacatggtgtttccccgcctcttcacctgccccactttggagacaactaactttaaggtggaatttgaagtgaacattgttgtgctgctccatcctgatcatctgatcactgaaaactttcctcttaaactgtgtagaatctag

SEQ ID NO: 185849 - DNA, 813 bp, synthetic construct
  misc_feature 1..813: note = Description of Artificial Sequence: Synthetic coding sequence
  source 1..813: mol_type = other DNA
atgggcaccgccctggacatcaagatcaagcgggccaacaaggtgtatcacgccggggaggttctctctggtgtagtggttatctcctccaaggacagcgtgcagcatcagggcgtgtctctgacaatggagggcactgtaaaccttcagttgagtgccaagtcagtgggcgtctttgaggccttttacaattctgttaagccaattcagatcataaatagcactattgagatggtgaagcccgggaagttcccaagcgggaagactgagataccatttgaattcccattgcacctaaagggaaacaaagtcctgtacgaaacgtatcatggcgtgttcgtaaatatccagcctcagaagggcaagttcaccccctcccccgtggatttcaccattactcctgaaacattgcaaaatgtgaaggagagggcccttctgccaaagtttttactcagggggcacctgaactcaaccaactgtgtgataacacagcccttaactggcgagcttgtggtggaatcaagcgaggccgccatcagaagcgtggagctccagttagtacgcgtcgaaacatgtgggtgcgccgagggctatgcccgagacgccaccgagatccagaatatacagatcgccgacggggatgtatgccgtgggctgagcgtcccaatttacatggtgtttcctagactgtttacatgccctacgctggaaactacaaattttaaggtggagttcgaggtgaatattgtagtgctcttgcatcccgaccatctcattacagagaacttccctcttaagctgtgccggatctag

SEQ ID NO: 185850 - DNA, 663 bp, synthetic construct
  misc_feature 1..663: note = Description of Artificial Sequence: Synthetic coding sequence
  source 1..663: mol_type = other DNA
atgggcaccgccctggacatcaagatcaagcgggccaacaaggtgtatcatgcaggtgaggtgctctccggagtggtggtgatatcatccaaggacagcgtgcaacaccagggagtgagtctgacaatggaggggaccgttaacctgcagctctctgctaaaagcgtcggggtgttcgaggccttttacaacagcgttaaacctcagaagggtaagttcacaccttctccagttgattttacgatcacccccgagacactgcagaatgtcaaggagagggccctcctccctaaattcctgttgcggggacatctgaattctaccaactgcgtgatcactcagccattaactggagaactggtggtagaaagtagcgaagccgccattagaagcgttgaattgcagttggtgcgcgtcgagacttgtggctgtgccgaggggtacgcgcgcgatgccaccgaaattcagaatatccagatcgcagacggggacgtgtgtagaggcctcagcgtgcccatctatatggtcttcccccgactgtttacatgccccacactggagaccaccaacttcaaggtggaatttgaggtcaatatcgtcgtgttattacaccctgatcacctcattaccgaaaactttccattaaaactttgcaggatttag

SEQ ID NO: 185851 - DNA, 357 bp, synthetic construct
  misc_feature 1..357: note = Description of Artificial Sequence: Synthetic coding sequence
  source 1..357: mol_type = other DNA
atgagcctgatcatcctgacccgggacgacgagccccggatcttcacccccgactccgatgctgcttcccctgcattgcattctacatcccctctaccagatcctgccagtgcctcgcccctacatcgcgaggagaagatcctcccaaaggtatgtaacatcgtctcctgtctgagcttcagcctgcccgcttcaccaactgacagcggactggccagtcccacaatcattaccagggaaggccagcagttctgggccaaatgcctgatctggaagtatcaactatacttacatggcctgcacaaaaagagcgatggaagaagagacaaacagatctctgcctcccctagcacctag

SEQ ID NO: 185852 - DNA, 573 bp, synthetic construct
  misc_feature 1..573: note = Description of Artificial Sequence: Synthetic coding sequence
  source 1..573: mol_type = other DNA
atggagcccgaggccgccgccggcgcccggaaggcccggggccgggggtgtcattgtccaggtgacgccccatggcgtccaccacctcccagaggacccgagtcaccagcaccctggcgtccctggatacagacaccaggcgacgctgaactaacgcgaaccggcaggcctttggaaccacgggccgaccaacacactttcggcagcaagggggccttcggattccagcaccctgtgagggtgtacctgccaatgtctaaacgccaggagtaccttcgttcctctggggagcaggtcttggcttcttttcctgtccaggccacgatcgatttctacgatgatgaatcaaccgagagcgctagcgaagcagaggagccagaggaagggccaccacctctccacctgctaccccaggaggtaggcggtagacaggaaaacggcccaggaggaaaaggcagggaccaggggataaaccagggtcagcggagcagcggcggcggagatcattggggcgaggggcccctgccccaaggagtgtccagtaggggggggaagtgctcatcatcaaagtag

SEQ ID NO: 185853 - DNA, 294 bp, synthetic construct
  misc_feature 1..294: note = Description of Artificial Sequence: Synthetic coding sequence
  source 1..294: mol_type = other DNA
atgaaggagcccggccccaacttcgtgaccgtgcggaagggcctgcattctttcaagatggcctttgtcaagcaccttctcctcttcctgtctccaaggctggagtgttcagggtctataacagatcattgcagcttacatctccccgtgcaggagatcttaatgtcccagcctcctgaacagctcggcctgcagactaacctgggtaatcaggagtcctccggaatgatgaagctatttatgccccggcccaaagttctagcccagtatgagagcattcaattcatgccctag

SEQ ID NO: 185854 - DNA, 276 bp, synthetic construct
  misc_feature 1..276: note = Description of Artificial Sequence: Synthetic coding sequence
  source 1..276: mol_type = other DNA
atgaaggagcccggccccaacttcgtgaccgtgcggaagggcctgcatagtttcaaaatggcctttgtgaaacatctactcctcgaatgtagtggctccatcacagaccattgctcactacacttaccagtgcaggagattctgatgtcacagccaccagagcagttgggactgcaaaccaaccttggtaaccaggaaagcagtggcatgatgaagttgttcatgccccgtccgaaagttctggcacagtatgagtcaatccagtttatgccctag

SEQ ID NO: 185855 - DNA, 531 bp, synthetic construct
  misc_feature 1..531: note = Description of Artificial Sequence: Synthetic coding sequence
  source 1..531: mol_type = other DNA
atggccagcagcagcggcaacgacgacgacctgaccatcccccgggccgcaattaacaaaatgataaaggaaactcttcccaacgtgcgggtcgccaacgacgccagagaactcgtagttaactgctgcacagaattcatccacttaataagcagcgaggccaacgagatctgcaacaagagcgagaagaagactattagcccagagcatgtgattcaagcattggaaagtctaggatttggaagttacatttctgaagttaaagaggtactccaagagtgcaagaccgtcgctctgaagcgcaggaaagcttcatcccgtctagaaaacttgggaatacccgaggaagaactattgaggcagcagcaagagctatttgccaaggccagacagcagcaggcggagcttgcccaacaagagtggctccagatgcaacaggccgctcagcaggcccagctagcggccgcaagcgctagcgcctccaaccaagccggctccagtcaggatgaggaggacgatgatgatatttag

SEQ ID NO: 185856 - DNA, 531 bp, synthetic construct
  misc_feature 1..531: note = Description of Artificial Sequence: Synthetic coding sequence
  source 1..531: mol_type = other DNA
atggccagcagcagcggcaacgacgacgacctgaccatcccccgggctgcaataaacaagatgatcaaggagactctccctaacgtccgggtggccaatgatgcccgcgagctggtggtcaattgctgtaccgaatttatccacctcatttcgagcgaggccaatgaaatctgtaacaagtccgagaagaaaactattagtccagaacatgttatccaggccttggagagtctaggctttggttcttacatctcagaagtgaaggaagtcctgcaggagtgcaaaactgtggccctgaagcggaggaaggcgagcagccgtctggagaacctcggcattccagaggaggagctgttacgtcagcagcaggaacttttcgccaaagcccgccagcaacaggcagagctggcacagcaagaatggttacaaatgcaacaagccgcccagcaagcgcagctcgccgcagccagcgcaagtgctagtaaccaggccggttcttctcaagacgaggaggacgacgatgacatctag

SEQ ID NO: 185857 - DNA, 1470 bp, synthetic construct
  misc_feature 1..1470: note = Description of Artificial Sequence: Synthetic coding sequence
  source 1..1470: mol_type = other DNA
atggagagcatgttcagcagccccgccgaggccgccctgcagcgggagaccggcgtgcctgggctcctcacacccttgccagatctcgacggagtctacgagctcgaacgggtcgcagggttcgtcagggacctgggctgcgaacgtgtagcactacagtttcctgatcagttactgggggacgccgtagccgtcgccgcgcgattggaagaaaccaccgggtccaagatgttcatcctcggggatacagcctatggatcctgctgcgtggatgtattgggtgccgagcaggctggtgcacaggcactgatccacttcggaccagcgtgccttagccctccagccagacctcttccagtggccttcgtgttgcgtcagcggagcgtcgctctcgagctgtgcgtgaaagcctttgaggcccagaatcctgatcctaaggcacccgtcgttctcctgagcgagccggcttgcgcacatgctctcgaggcactggctaccctgctgagacccaggtatctggacctcctggtgagctccccagctttcccacaaccagtgggatctctctctccagagccaatgcctctggagaggttcggcagaagatttccactcgcacccgggcggaggctcgaggaatacggggccttttacgtggggggctctaaggcaagtccggatcctgaccttgaccccgacctctcccgcttactgttgggctgggctccgggtcaacctttttcgagctgttgtcccgacaccggcaagacgcaggatgaaggggcaagagctggacgactgcgcgccaggagacgctatttggttgaacgggcccgagatgctagggtggttggcctgctggctggcacattaggcgtcgcacagcacagagaggccctggcccatctgcgaaacctgacgcaggccgctgggaaaagaagttacgtcttggcgctgggacgccctactccagctaagctggccaatttccccgaggtagacgtgtttgtgctcttggcatgcccactgggggctctcgcaccacagctctctggaagctttttccagccgatcctggccccctgtgagctcgaagcagcctgtaatcctgcctggcccccaccaggcttggctccacatctcacgcattacgcagaccttcttccagggagcccctttcatgtcgcgttgcctccacctgaatctgagctttgggaaactcctgacgtaagtctcatcactggcgatcttaggccccctccagcttggaagtcgtcaaacgatcacggatctttggccctgaccccgaggccccagttggaattagctgagagtagcccggctgctagctttctgagtagccggtcatggcagggattagagccaagactcggtcagacacccgtgaccgaggccgtgtcggggcggaggggtattgccattgcctatgaggatgaaggctcaggttag

SEQ ID NO: 185858 - DNA, 786 bp, synthetic construct
  misc_feature 1..786: note = Description of Artificial Sequence: Synthetic coding sequence
  source 1..786: mol_type = other DNA
atggagagcatgttcagcagccccgccgaggccgccctgcagcgggaaacaggagttcctggtctgttaacccctctgccggatcttgatggagtgtacgagcttgaaagggtcgccggctttgttagagacctgggttgcgaacgcgtggcgctgcaatttcctgaccagctgctcggcgacgccgttgctgttgctgcccggctggaggaaaccaccggatcaaagatgtttattttgggcgacactgcttatggatcctgctgcgtggatgtgttaggggcagagcaggccggagcccaagcacttatacacttcggacccgcttgtctgtctcctcctgctcggcctctgccagtggctttcgtcttgaggcaaagaagtgttgcacttgagctctgcgtgaaggcattcgaagcgcagaatcctgaccccaaggctccagtcgtgctactgtcagagccggcctgcgcccatgctctgggcagccctttccacgttgccctgccccctcccgagagtgaactgtgggaaacaccagacgtttcattaataaccggggacctgcgaccaccaccagcctggaagtcaagtaacgatcacggaagcttagccttgaccccccggccccagctcgagctagccgaaagcagcccggcagcaagctttctcagcagtcgcagttggcagggcctggagcctagacttggccagacaccagttaccgaagcagtttcagggcgccggggaatcgcaattgcttacgaggacgaaggctccgggtag

SEQ ID NO: 185859 - DNA, 1065 bp, synthetic construct
  misc_feature 1..1065: note = Description of Artificial Sequence: Synthetic coding sequence
  source 1..1065: mol_type = other DNA
atgctgtggctgtggctgcacgactggcggcggcggcagggccagcgatgcagcttttgggttacgcaacccactgcggaagcactcgccaccctgctaaggcccagatacctggacctgttagtctctagtcccgccttcccgcagccggttggatcgctcagccctgagccaatgcccctggagagatttggaaggcgatttcccctggcccccggtcgacgactggaagagtacggagctttttatgttgggggaagtaaggcctcccctgatccagatctggatccagatctatccagactgctactggggtgggcccctggtcaacccttcagcagctgttgtccagacaccggcaaaacacaggatgagggagctcgggcgggcagactgcgcgctaggaggcggtatcttgtggagcgtgctagagacgctcgggtcgtgggacttcttgcaggaacactgggggttgcccagcacagggaagcactggcccacttacggaacctgacccaagctgcaggcaagcggtcctacgtgctggcactcggacgccctactccagcaaagctcgccaacttccccgaggtcgacgtgttcgtgctgctagcctgtcctttaggcgccctcgcaccacaattaagcggctccttttttcaacccatcttggccccttgtgaactggaagcagcctgcaacccggcctggccccctcctggcctggccccacacctgacccactacgccgatcttcttccaggctcgcccttccacgttgctcttccccctccagagagtgaattatgggagaccccagatgtgtcgctcattacgggcgatctccgacctccacctgcatggaaatccagcaacgaccatggcagcctggcactcacgcctcgcccgcaactcgaactagccgagagctcacccgcagccagttttctgtctagtagatcctggcaagggttggaaccccggctcgggcagacccccgtgactgaagcagtctctggccgccgaggtattgcaattgcatacgaagacgaggggagtggctag

SEQ ID NO: 185860 - DNA, 174 bp, synthetic construct
  misc_feature 1..174: note = Description of Artificial Sequence: Synthetic coding sequence
  source 1..174: mol_type = other DNA
atggccgtgttccacgacgaggtggagatcgaggacttccagtacgacgaagactcagagacgtatttctacccctgcccatgcggagacaatttctcaatcaccaaggaccagttcgtgtgcggtgagaccgttccagctccttctgcaaacaaagaattggttaaatgctag

SEQ ID NO: 185861 - DNA, 249 bp, synthetic construct
  misc_feature 1..249: note = Description of Artificial Sequence: Synthetic coding sequence
  source 1..249: mol_type = other DNA
atggccgtgttccacgacgaggtggagatcgaggacttccagtacgacgaggactctgagacttacttttacccctgcccttgtggcgacaacttcagcatcacaaaagaggatctcgaaaacggggaagatgttgccacttgcccctcttgctccctcattataaaggtgatttacgataaagaccagtttgtgtgcggggaaaccgtccctgctccaagcgcaaacaaggagctggtgaagtgctag

SEQ ID NO: 185862 - DNA, 855 bp, synthetic construct
  misc_feature 1..855: note = Description of Artificial Sequence: Synthetic coding sequence
  source 1..855: mol_type = other DNA
atgctgtacctgatcggcctgggcctgggcgacgccaaggacatcacagtcaaaggattggaagtcgtacgccggtgctcccgggtctacttggaagcttacacttctgttttaaccgttggcaaggaggccttggaggagttttacgggagaaaactggtcgtggcagatcgtgaggaggttgagcaggaggccgacaacattctgaaggatgccgatattagtgatgtcgcctttcttgttgtgggcgaccctttcggtgcaacaacgcactcagacctggtactgcgggcaacaaaattagggataccttatagagttattcacaatgcaagcattatgaatgcagtggggtgttgtggcctgcagctgtacaaattcggtgaaaccgtgtcaatagtcttttggactgatacctggaggcctgaatctttctttgacaaggtgaagaagaacaggcagaacgggatgcacactctgtgtctcctggacatcaaagtgaaggaacagtccctcgagaatcttattaagggccggaagatatacgaacctcctcgctacatgtcggttaaccaggccgcccagcagcttctggaaatagttcaaaatcagcgaattagaggggaagagcccgtgactgaagagactctgtgtgtcgggttggcccgcgtcggcgcagacgaccagaagatagccgcagggactctgcgacagatgtgcactgtggatctgggagagcccctgcacagcctcatcattactggcgggagtatccatcccatggagatggagatgctgagtttgttttcgattccggagaattcaagtgaatcccaaagcattaacggtctgtag

SEQ ID NO: 185863 - DNA, 858 bp, synthetic construct
  misc_feature 1..858: note = Description of Artificial Sequence: Synthetic coding sequence
  source 1..858: mol_type = other DNA
atgctgtacctgatcggcctgggcctgggcgacgccaaggacatcacagtgaagggattagaggtcgttcggaggtgctctagagtgtaccttgaggcttatacttccgtattaaccgtgggaaaggaggctctggaagagttctacgggcggaagcttgttgtcgcagacagggaagaagttgagcaggaagccgacaacatcctgaaagacgccgacatctccgatgtggccttcttggtggtgggggatccatttggcgccacaacgcactcagaccttgttctgcgggccaccaaactgggtattccatacagggtcatccacaacgccagcatcatgaatgccgtgggctgctgcgggctacaactgtacaaatttggtgagacggtaagcatcgtcttttggaccgatacctggcggccagagagctttttcgataaggttaaaaaaaataggcagaacggcatgcatacgctgtgtcttctggatatcaaagtcaaggagcaatctctcgaaaatctcataaaggggaggaaaatctacgaaccccctcggtacatgagcgtcaaccaggctgcacagcagctcctggaaatagttcagaaccagcggatcaggggagaggaacccgcagtgaccgaagagaccctctgtgtcggcctggccagagtcggtgccgacgatcagaagatcgccgccggcacgctccgacagatgtgtacggtggacctcggcgagcccctgcactctttaatcataaccggtggttcaatacatccaatggaaatggagatgttgagccttttttcgattcctgaaaattcctccgagtctcaaagcatcaatggtttgtag

SEQ ID NO: 185864 - DNA, 705 bp, synthetic construct
  misc_feature 1..705: note = Description of Artificial Sequence: Synthetic coding sequence
  source 1..705: mol_type = other DNA
atgctgtacctgatcggcctgggcctgggcgacgccaaggacatcacggtcaaaggtctcgaggtggttcgccggtgttcccgggtatatctggaagcatacaccagcgtgctaacagtggggaaagaagctcttgaggagttctatggcagaaagctggtagtggccgatcgggaggaagtggagcaggaagccgacaacatcctaaaagacgctgatatatccgacgtggcgtttctcgtagtaggcgatcctaccgatacatggcggcctgaatcgtttttcgacaaggtgaagaagaacagacagaatggaatgcataccctctgtttgctcgacattaaggtgaaagaacagagcctggaaaatctcattaagggacgcaaaatctacgagccaccccggtatatgtcagttaatcaggcagcccaacagcttctggaaatcgtgcagaatcagaggatcaggggggaggaaccagccgtcactgaagagacactgtgcgtgggcctggcgagagtcggagctgatgaccagaaaatcgcggctggtacgctgcgtcagatgtgcacagtggacctcggcgagccgctccatagcctcatcatcaccggagggtctattcatcctatggagatggaaatgctgtcccttttttcaatccccgagaactcttcggaatctcaatctatcaacggactttag

SEQ ID NO: 185865 - DNA, 141 bp, synthetic construct
  misc_feature 1..141: note = Description of Artificial Sequence: Synthetic coding sequence
  source 1..141: mol_type = other DNA
atgtgcaccgtggacctgggcgagcccctgcacagcctgatcatcactggcggtagcatccatcccatggagatggagatgctcagtttattctccattcctgagaacagctccgagagccagtccatcaacggactgtag

SEQ ID NO: 185866 - DNA, 855 bp, synthetic construct
  misc_feature 1..855: note = Description of Artificial Sequence: Synthetic coding sequence
  source 1..855: mol_type = other DNA
atgctgtacctgatcggcctgggcctgggcgacgccaaggacatcaccgtgaagggtcttgaggttgtcagaaggtgctcgagagtgtacctggaggcatataccagcgtgcttaccgtaggcaaggaggccttggaggagttctatgggcggaagcttgtggtggcagaccgggaagaggttgaacaggaagcagataatatccttaaagatgcagacatatcagacgtggcctttcttgtggtcggcgacccgtttggcgctaccacacattctgacctggtgcttagggcgaccaaacttgggatcccttaccgggtgattcacaatgcgagcataatgaacgccgtgggctgctgtggactgcagtatatctcccttgaacgtcagttccttctgttttttgggcaaacgctgggccccgagtcgtttttcgataaagtgaagaagaacaggcagaacgggatgcatacactgtgcctgctcgacatcaaagttaaagagcaatcccttgagaatctgattaaagggcggaaaatctatgagccccccagatacatgagcgtgaatcaggcggcccagcagctgctcgagatcgtgcaaaatcagaggattagaggcgaggaacctgctgtcactgaggagactctgtgcgtgggcctcgcccgcgttggggccgacgatcagaagatcgctgcaggaaccctgcgccagatgtgtaccgtggatctgggggaaccccttcacagccttataatcaccgggggttcaatccatcccatggagatggaaatgctcagtctattctcgatccctgagaatagctcggagtcccagagcattaatggactgtag

SEQ ID NO: 185867 - DNA, 858 bp, synthetic construct
  misc_feature 1..858: note = Description of Artificial Sequence: Synthetic coding sequence
  source 1..858: mol_type = other DNA
atgctgtacctgatcggcctgggcctgggcgacgccaaggacatcaccgtgaagggcctggaggtggtcagacgctgtagcagagtctacttggaggcctatacatcggttctgacggtcgggaaggaggctcttgaggaattctatgggcggaagctcgttgtggccgacagagaggaggtggagcaggaagcagataatattttaaaggacgctgacatttctgatgtcgccttcctcgtcgtcggcgacccctttggagccaccacccattcagacctggtactgcgagccaccaagctcggcataccttacagagtcatacataacgcatcaatcatgaatgcagtcggttgctgcggactacagctctacaaattcggggaaacagtctctatcgtgttctggaccgacacatggcggcccgaaagcttcttcgataaagtgaagaaaaataggcagaatggcatgcacaccctctgtttgttggatataaaggtaaaggaacagtccttggaaaatctcatcaagggacggaagatttatgagcccccccggtacatgtccgtgaaccaggctgctcagcagttgttggagatcgttcaaaatcagcgcatccgaggcgaggagccagcagtgactgaagaaactctctgcgtgggccttgccagagtgggcgcggatgatcagaaaattgccgcggggaccttaaggcagatgtgcactgtggatctcggggagcctctgcatagtctcattataacgggggggagcatccatcctatggagatggagatgctgtccttgttttcaatacccgaaaacagttctgagtctcagagcatcaatggcctgtag

SEQ ID NO: 185868 - DNA, 2028 bp, synthetic construct
  misc_feature 1..2028: note = Description of Artificial Sequence: Synthetic coding sequence
  source 1..2028: mol_type = other DNA
atggagggccggcccccccccgagggccggccccccccccggccccgtaccggtcgggcgcctcgaggaagaagacgcgccgtctttgctgctgttcttcattggagtcatattacccacctgttcgaaaatgaccggcacttctctcatctttctaccttagagcgagagatggccttccgtacagagatggggctctactattcttattttaaaaccatcgttgaggcaccgagttttctgaatggcgtgtggatgattatgaatgacaaacttacagagtatcctctggtgattaacaccctgaaacggttcaacctgtacccagaagtcatccttgcctcctggtaccgaatctatacaaaaattatggatctcataggtattcaaactaagatatgctggactgtcacccgcggcgagggcctgtccccgatcgaaagctgtgaggggctcggagatcccgcatgcttttacgtggccgtcattttcattcttaacggcctgatgatggctttgtttttcatctacggcacctacctgtcaggatcccggcttggtggcctagtgaccgtgctgtgttttttcttcaatcatggagagtgcactagagttatgtggacacccccacttcgggagtcattcagctacccctttctggtcttgcaaatgcttctggtaacgcacatcctaagggccactaagttatatcgtgggagcctgatcgccctctgcatctctaacgtgttcttcatgcttccttggcagtttgcacagtttgtcctgctgacccaaatcgcatccctgtttgctgtgtatgtagttggatacattgatatttgcaaactccggaaaataatctacatccacatgattagtctagctctgtgcttcgtgctgatgtttggtaattccatgcttctgacaagctattacgcaagctcgctggttatcatttggggaatcttagccatgaaacctcactttctcaaaattaacgtgtccgaactgtccctgtgggtaatacagggctgcttctggctgttcgggacagttatcctgaagtacctcaccagtaaaatttttggaatcgctgatgatgcacatatcggcaatctcctgacatctaaattcttctcttacaaggattttgacacccttctgtacacatgcgcagctgagttcgacttcatggaaaaagaaactcctctccgttatacaaagacactcctgctgccagtcgttctagtcgtgttcgtggcaatcgtgcgcaaaattatatcagacatgtggggcgtgttggctaagcagcagacacatgtgagaaaacaccagtttgaccacggcgagctggtctaccacgctctgcaactattggcctacaccgcattgggtattctgattatgagattgaagctgttccttacaccccatatgtgcgttatggcatcgctgatttgtagtcgacagctttttggctggctgttctgcaaagtgcaccccggagcaattgtctttgctattctggccgccatgtcgatccagggctctgctaacttgcagacccagtggaacatagtgggcgaattttcaaatctgccacaggaggagctgattgagtggattaaatacagcaccaaaccagatgcagtcttcgccggcgcgatgcctacaatggcatctgttaagctctctgccctgcgacccatcgtgaaccatccacattatgaggacgctggactgcgcgccagaactaaaatcgtgtattccatgtattctaggaaggccgcggaggaggtcaaaagagaactgattaagctgaaggtgaactattacatcctcgaggagtcatggtgtgtgcggcgctctaagcccggatgcagcatgccagaaatttgggatgtggaagaccccgccaacgccggaaaaaccccattatgtaacctcctggtgaaggacagtaaaccccactttacaactgtctttcaaaatagcgtgtataaagtgcttgaagtggttaaagagtag

SEQ ID NO: 185869 - DNA, 258 bp, synthetic construct
  misc_feature 1..258: note = Description of Artificial Sequence: Synthetic coding sequence
  source 1..258: mol_type = other DNA
atgtacagccggaaggccgccgaggaggtgaagcgggagctgatcaaactgaaagtcaactactacatcctggaggaaagttggtgcgtccggaggtctaagcccgggtgctctatgcccgagatctgggacgtcgaggatccagcaaacgcaggcaagaccccgctgtgcaaccttctggtcaaggactccaagcctcactttaccaccgtatttcagaattcagtgtacaaagtgctggaggtcgtcaaggaatag

SEQ ID NO: 185870 - DNA, 2277 bp, synthetic construct
  misc_feature 1..2277: note = Description of Artificial Sequence: Synthetic coding sequence
  source 1..2277: mol_type = other DNA
atgcggaagcagggcgtgagcagcaagcggctgcagagcagcggccgcagccaaagtaagggtaggaggggtgcctcgctggctcgagaacccgaagtggaagaggaaatggagaagagtgctctcggagggggaaaacttccccgcggctcgtggcgctcttctcctggcaggatccaatcccttaaggagaggaagggtctcgagcttgaggtcgtggctaagactttcctactcgggcccttccaattcgtcaggaatagcttggcacagcttagagaaaaagtccaggagcttcaggctagaaggttttcctcccgtaccacactcggaattgccgtattcgtcgcaattctgcactggctgcatttggttacgctgttcgagaacgaccggcacttcagccatctttcctccctggaaagagaaatgacctttcgcaccgagatgggcctgtactacagttattttaagaccattatcgaagcacccagcttcctcgaaggtctctggatgatcatgaacgatagactgacagaataccccctgatcattaacgccattaagagattccacctttatcccgaggtgatcatcgcgagttggtattgcactttcatgggtatcatgaatttattcggtctcgaaacgaaaacatgctggaatgtgaccagaatcgaaccactgaacgaggtgcagagttgcgagggcctcggtgaccctgcatgcttctacgtaggagtaatatttatactgaatgggcttatgatgggccttttctttatgtatggagcatatctgtcaggcactcaattgggcgggcttatcaccgtgctttgttttttcttcaaccacggggaggccacaagggtgatgtggacccctcctctgcgggagtcgtttagctacccttttttggtactgcagatgtgtattctaacgcttatcttaagaaccagcagtaacgatagacgccctttcattgccctttgcctttcgaatgttgcctttatgctaccttggcagtttgcacagttcattctgtttacacaaatcgcatccctctttcctatgtatgtcgtagggtacatcgagccttctaagtttcagaaaattatctacatgaacatgatatccgtgaccctgagttttatcctaatgttcgggaatagcatgtatttgtcgagttattacagctcctcactgctgatgacctgggctattatcctgaaacgaaacgaaatccagaagctgggcgtgtccaagctgaacttttggctcattcaaggctcagcttggtggtgtggaacgattattttgaagttcctaacatctaagatcttgggagtttccgaccacatacgcctgagcgacctgatcgctgcgcgtatactgcgttatacagactttgacaccctaatctacacctgcgcaccagagttcgacttcatggagaaagccacgccattgcgatacactaaaacgctcctgctgcctgtcgtaatggtgattacatgttttatcttcaagaaaactgtccgcgatatcagttacgtgttggccaccaacatatatctgcgcaagcaactgctggagcatagcgagctagcttttcacaccctgcagctgctcgtcttcacagcccttgcaattctgattatgcggttgaaaatgttcctgaccccccacatgtgcgtgatggcgtcactgatttgttccagacagctgttcggctggctatttcgacgggtcagattcgagaaagtgatcttcggaatcttgacggtgatgtccattcagggctatgctaacctgagaaaccagtggtcaattatcggtgagttcaataacctcccacaggaggagctcctccagtggattaagtacagcacaacctcagacgccgtcttcgcaggcgccatgcctacaatggcaagcatcaagctgtccacactgcacccaatcgtgaaccaccctcactatgaagacgctgatctccgagcaaggaccaagattgtatacagcacctatagtcgcaagagcgccaaggaggtcagggataaactcttagaactgcatgtcaattactatgtactcgaggaggcctggtgtgtcgttaggacaaagccaggctgtagcatgctcgaaatctgggacgtagaggacccttccaacgccgcaaacccaccactctgttccgtcctgctggaagacgctaggccatactttaccaccgtgttccagaactccgtctatcgggtgctcaaggtgaactag

SEQ ID NO: 185871 - DNA, 618 bp, synthetic construct
  misc_feature 1..618: note = Description of Artificial Sequence: Synthetic coding sequence
  source 1..618: mol_type = other DNA
atgcggctgaagatgttcctgaccccccacatgtgcgtgatggcctctctcatctgtagcaggcagctatttggctggctgttccgccgagtacgtttcgagaaagtcatctttggtatactaacagtgatgtcaatacaaggctatgcgaaccttaggaatcagtggagcatcataggcgaattcaataacctcccccaggaggaactgctgcagtggatcaagtatagcaccacatccgacgccgtctttgccggggccatgcctacaatggcctccattaaactgtccacattgcaccccatagtaaaccacccgcattatgaggatgctgaccttcgtgcccgaaccaaaatcgtgtacagtacctacagccgcaaatcagctaaggaagtgagggacaagctcttagagctgcatgtgaactattatgtcttagaggaggcatggtgtgttgtcagaacgaaacccggttgtagcatgctggagatttgggacgttgaggacccatctaacgccgcaaatcctcccttatgttccgttctcctcgaagatgcgagaccctacttcactacggtctttcagaactcagtgtaccgagtcctgaaggtgaactag

SEQ ID NO: 185872 - DNA, 273 bp, synthetic construct
  misc_feature 1..273: note = Description of Artificial Sequence: Synthetic coding sequence
  source 1..273: mol_type = other DNA
atgcggaagcagggcgtgagcagcaagcggctgcagagcagcggccggagccagtcaaagggcaggagaggagccagtcttgctcgcgaaccggaggtcgaagaggaaatggagaaaagtgcgcttggagggggcaaactccctcggggatcatggcgctctagccccgggaggatccagtcacttaaggagaggaaaggattagaactggaggttgtggctaagaccttcctgctgggaccttttcagtttgtgcggaattcacttgcttag

SEQ ID NO: 185873 - DNA, 1629 bp, synthetic construct
  misc_feature 1..1629: note = Description of Artificial Sequence: Synthetic coding sequence
  source 1..1629: mol_type = other DNA
atgatgagcatccggcagcggcgggagatccgggccaccgaggtgagtgaagatttccccgcccaggaggaaaacgtgaaactggaaaacaagttgccttccgggtgtacatctcgaaggctgtggaagattttaagcctgaccattggagggaccatcgctttgtgtattgggctccttacaagtgtgtacctggcaactctccacgagaatgatctgtggttttccaatataaaagaagtggaaagagaaatctccttcaggacggagtgcggcttgtattattcttactacaagcagatgttgcaagcaccgacactcgtacagggattccacggcctgatatacgacaacaaaacagagagcatgaagactatcaacctgctgcaacgtatgaatatttaccaagaggtatttctgtcaatcctgtaccgagtcctcccaattcaaaaatatctcgaacccgtttatttctacatctacactttatttggccttcaagccatttatgtcactgccttgtatattaccagttggctgttgtccgggacttggctatctggactcctggctgctttttggtacgtcactaatagaatagatactactagagtggaatttacgatccctctcagggaaaattgggcacttcctttcttcgcgattcagatcgccgcgatcacttacttcctgaggccgaatctccaacccctgtctgaacgtctgacactcctggccattttcatatcaaccttcctgttctcactgacttggcagtttaatcagtttatgatgctcatgcaggctctggttctgttcacccttgattcacttgatatgctcccagctgttaaagcaacatggctttatggaatccaaatcacttctctcctgctggtctgcatcctgcagtttttcaactcaatgattctgggttccttactgatctcatttaacttgagcgtgttcatcgccagaaagctccagaagaatctcaaaactgggagttttctcaatcgactgggaaagttacttctgcacctcttcatggtcttgtgcctgacattgtttcttaataatatcataaaaaaaatactgaaccttaaatctgatgagcatatcttcaagttccttaaggcgaaattcggcttaggcgcaacccgcgacttcgatgccaacttgtacttgtgcgaagaggccttcggcttattaccatttaacacatttggacgactcagtgataccctgcttttctatgcctatatatttgtcctcagcatcacagtgattgtcgccttcgtcgtggcttttcacaacctcagcgacagtacgaatcaacagtccgtggggaaaatggagaaaggtacagttgaccttaaacccgaaactgcttataacctgattcacaccattctgttcggttttctggccctgtctaccatgagaatgaagtacctgtggacatctcacatgtgtgtgtttgcctcctttggcctttgctctccagaaatttgggagcttttactgaagtccgtccacctttacaatcccaaacgcatctgcattatgagatactcagtgcctattttaattctgctgtatctatgctataagaaccaaaagtcctag

SEQ ID NO: 185874 - DNA, 2151 bp, synthetic construct
  misc_feature 1..2151: note = Description of Artificial Sequence: Synthetic coding sequence
  source 1..2151: mol_type = other DNA
atgatgagcatccggcagcggcgggagatccgggccaccgaggtgtccgaggacttcccagcccaggaagagaatgttaagttggagaataagttgccctcgggctgcacttcacgccggctttggaagatcctttcgcttactatcggcggaaccatagctctctgcattgggctcctgacgtcagtttatctagctacactgcatgagaatgatctgtggttctctaacattaaagaggtcgagagagaaatctctttcaggactgagtgcgggctgtattattcctactacaagcagatgctgcaggcgcctactcttgtacaggggtttcacggcctaatctatgacaacaaaacagagtccatgaagaccattaacctgctgcagcgcatgaatatctatcaggaagtcttcctctccatcctttatcgggtgctgcccatccaaaagtatcttgaacctgtgtacttctacatttacacactgttcgggctgcaggccatctacgtgacagcgctttacattacgtcctggcttttgagcgggacctggctttctggattactggctgctttttggtacgtaactaacaggatcgacaccacccgggtcgaattcacaataccattaagggagaactgggcgctccccttttttgccatccagattgccgctattacgtactttttgcgcccaaatcttcagcctttatcggagcgattaacacttttggccatatttatctctacattcctgttttctctcacatggcagttcaatcagtttatgatgctgatgcaggcccttgtgctgttcacgctggactccctggacatgttgcccgcagttaaagccacatggctgtacggtatccagatcacatccttgctgctggtgtgcatcttgcagttcttcaacagtatgatcctggggtctcttctcattagcttcaacttgtcagtcttcatcgcacggaagctacaaaaaaacctgaagacaggaagttttctcaaccggctggggaaactacttcttcatctgttcatggttctgtgtctgactctcttcctgaataatatcatcaagaagatacttaacctgaaatccgacgaacacatcttcaaattcctgaaagccaaattcggactgggagccacccgagatttcgacgccaacttatacctatgcgaggaggccttcggactgttacctttcaatacttttggacgactctcagacacattgcttttctatgcctatatattcgtcctctctataactgttatcgtggcattcgtagtagcattccataacttatctgatagcaccaatcaacagtccgtcggcaaaatggaaaaaggcaccgtcgatttaaagcccgagaccgcctataacctgattcatacaatactctttggattcttagccttgagtactatgaggatgaagtacttgtggacctctcatatgtgtgtattcgcctcatttggcctttgcagtcccgagatctgggaacttctactaaagtcagttcatctatacaaccccaaaaggatttgcattatgcgatatagcgtgcccatactgatcctgctatacctgtgttataaattctggcctggcatgatggacgaactgagcgagttaagggagttctatgacccagataccgtggaactgatgaattggattaactctaataccccaagaaaagcagtgttcgctggatccatgcagttgctggctggcgttaagctgtgcaccgggaggacactcacaaatcaccctcattacgaggatagctccctgagggaacgcacacgtgccgtctatcagatctacgcgaagagagcaccggaggaagtgcatgcccttctcagatccttcggaacagattatgttattctggaggacagcatttgctatgaaagacgtcacaggaggggctgtcgcctgcgcgatctcctggacatcgcgaacggacacatgatggatggtccaggggaaaatgatcccgacctcaaacctgcggatcatcctcgcttttgcgaggaaataaagaggaatctgcctccgtacgtggcatacttcacgcgcgtcttccagaataagacttttcacgtgtataaattatctagaaacaagtag

SEQ ID NO: 185875 - DNA, 342 bp, synthetic construct
  misc_feature 1..342: note = Description of Artificial Sequence: Synthetic coding sequence
  source 1..342: mol_type = other DNA
atgatgagcatccggcagcggcgggagatccgggccaccgaggtgtccgaggactttcctgctcaggaggagaacgttaaattggagaacaagctacctagtggatgtacatcaaggcgcctgtggaagattctgagtttgaccatcggtgggacccttccatttgcgctggacttcctacatctatccactctgcctaggtacatgaaaatgatctacgggttcctgattttgaggaagtggagcgagaagagccactctgagcagagcgtggcttgcattactccaacgaccagtcgttgctgccggctgcaaccatcctgtaaagttttcatggcctag

SEQ ID NO: 185876 - DNA, 2151 bp, synthetic construct
  misc_feature 1..2151: note = Description of Artificial Sequence: Synthetic coding sequence
  source 1..2151: mol_type = other DNA
atgatgagcatccggcagcggcgggagatccgggccaccgaggtgtcggaagacttccccgcgcaggaggagaatgtaaagctggagaacaagcttccatccggctgcacctccaggagactgtggaagatcttaagtcttactattggtggcactatcgccctctgcataggtttgctgacctcagtatacttagctaccctgcacgaaaacgatttgtggttttcgaacatcaaggaagtggagcgggaaatttcttttcgcaccgagtgtggcctgtactactcgtactataagcagatgctgcaggctcccactctagttcaggggttccacggtctcatctacgacaacaagacagagtctatgaaaacaattaatctgctgcagagaatgaacatctaccaggaggtctttctgagcattctataccgtgtgctcccaattcaaaaatatctggagcccgtgtatttctatatttatacactttttggtctccaggccatatacgtgacagccctgtacattacttcctggctgctcagcggaacctggctgtctgggctccttgcagcattttggtatgtcacaaacagaatagacaccacgcgtgtggagttcaccattcccctccgcgaaaattgggccctccccttctttgccatccaaatcgcggcaatcacttatttcctgcggcctaacctgcaaccgctaagcgagaggcttactctgttggccatttttatttccaccttcctcttttcgctgacctggcagttcaatcagtttatgatgctcatgcaggctctggtactgtttaccctggactcactggatatgttgccggccgttaaggcaacttggctgtacggaatccaaataaccagcctgttgctcgtctgcattttacagtttttcaatagtatgatcctcgggtccctgcttattagctttaatttgagcgtcttcattgcccgcaagctacagaaaaacttaaagacagggagctttcttaatcggcttggtaaacttcttctgcatttgtttatggttttatgtcttacactatttctgaataatattatcaaaaagatcctcaacctcaaaagtgacgagcacatatttaaattcctcaaggccaaattcggtctcggggctacgagagatttcgacgcaaacctgtacctttgcgaggaagcattcggcttgctgccatttaataccttcgggcggctgagtgatactctcctcttttacgcctatatcttcgtcctaagtattacagtaatagtggcctttgtggtcgcttttcataatctgagcgacagcacaaaccagcaatccgtgggaaaaatggagaagggtacagtagatctgaagccagaaaccgcgtataacctcattcatacaatcctgttcggatttctcgccttgtccactatgaggatgaaatacctctggacaagccatatgtgcgtctttgcatcatttgggctctgttcccccgagatctgggagctgctgctcaaatctgtccacctttacaacccaaaacgcatatgtattatgagatactctgtgccaattcttatcctgctgtacctatgttacaaattctggccaggcatgatggacgagctttccgagctcagggaattctacgatcccgacactgtcgagctcatgaattggattaactctaacacaccaaggaaggcagtgttcgcgggcagcatgcagcttctggctggtgtgaaactctgtacaggtcggacgctgacgaatcacccccattacgaggattccagcctgcgtgaacgtacccgggctgtatatcaaatatatgcaaagagagcccccgaggaggtgcatgcattattgaggtcatttggaacagactacgtgattctggaggacagtatatgctacgagcgtcgacaccggaggggctgtcggctgagggatctgctggatattgcaaacgggcacatgatggatggacctggcgagaacgacccggacctcaaaccagctgatcatccaagattttgcgaagaaataaagcggaatctgcccccctatgtcgcgtacttcacgcgtgtcttccagaacaagacttttcatgtgtacaagttgtccaggaataagtag

SEQ ID NO: 185877 - DNA, 2172 bp, synthetic construct
  misc_feature 1..2172: note = Description of Artificial Sequence: Synthetic coding sequence
  source 1..2172: mol_type = other DNA
atggccgaggaggagggcccccccgtggagctgcggcagcggaagaaaccaaagtcttcagagaataaggaatctgccaaggaggagaaaatctccgatatcccaatccctgagagggctcccaagcatgttctgtttcagaggtttgccaagatatttatagggtgtttggccgcggttacaagtggtatgatgtacgccctgtatctctcggcctaccatgaacggaagttttggttctcaaataggcaggaattggagagggaaattacatttcagggcgattctgcaatctattattcctattacaaggacatgctgaaagcccccagcttcgaacgcggcgtctatgagcttacccacaataataaaaccgtcagtctgaagacgatcaatgcggtacagcagatgtctctgtaccccgagctcattgcttccattttgtatcaggccactggatctaatgaaattatagagcccgtgtatttctatatcggtatcgtgttcgggttgcagggtatatacgtaaccgccctgttcgttacttcttggcttatgtcaggcacatggttggcaggcatgttgaccgtcgcctggttcgtgataaatagggttgataccactaggatcgagtacagcattcccctgcgagaaaactgggccttaccttactttgcctgccagatcgccgcccttaccgggtacctgaaatcaaacctgaacacgtatggcgagcggttttgctatcttcttatgtccgccagcacatatacctttatgatgatgtgggagtacagccattacctgctcttcctgcaggccatctctctctttcttctggacaccttttcagtcgagcagagcgataaagtatacgaagtttacaagatctacatcttctccctgttcttgggatatctgctgcaattcgagaaccccgccctcctggtgagtcctctgttaagtctggtcgcagccctgatgctggctaaatgtctccagttaaacgtcaagaaagggagcttcgtcgctaaaataataaaggtcatcaacttctaccttgtgtgtactctcaccattaccttgaatattataatgaaaatgttcgtgccacacaaagagaatggccatatgctcaagtttctagaggtgaagttcggactgaatatgaccaagaatttcactatgaactggctgctatgtcaggagtccttgcaggcccctagccaggatttcttcctccggctcacccagtcaagcctcctgcccttttacattctggtcctgattatctgcttcttgagtatgctacaagttatctttcgacgaatcaacgggaagtctctcaaagagacagtaaccctcgaagatggccgaattggagagcgccccgagataatatatcacgtgatccatacgattctgcttggctctctcgctatggtcattgagggattgaagtatatttggatcccctacgtctgcatgctcgccgcatttggtgtgtgcagcccagagctttggatgacgctgtttaaatggttgcgcctcaggacagtgcatccgatattgcttgcgcttattctcagcatggccgtacccaccattatcgggctgagcctctggaaggaattcttccctagactcatgacagaactgatggagctgcaggaattttatgaccctgataccgtggaactgatgacctggatcaaaaggcaagccccagttgcggccgtgtttgcggggagtcctcagctgatgggtgctatcaagctctgcacgggttggatggtgacttcactaccactctacaacgacgatgacctgctcaaaagaaatgagaatatctatcagatctacagcaagcgcagcgccgaagacatatataagattctaacgtcatataaggccaactatctgattgtggaagatgccatttgtaatgaagtgggtccaatgcgtggatgtagggtcaaggacttgctagatattgccaatgggcacatggtctgtgaggaaggagacaaactaacctactcgaagtatggcaggttctgtcatgaagtcaagattaactactcaccatacgtgaactacttcacccgcgtgtactggaaccgaagctatttcgtctacaaaatcaacaccgtgatatccttccaatcatag

SEQ ID NO: 185878 - DNA, 300 bp, synthetic construct
  misc_feature 1..300: note = Description of Artificial Sequence: Synthetic coding sequence
  source 1..300: mol_type = other DNA
atggagcccgagcagatgctggagggccagacccaggtggccgagaatccccactcagaatacgggttaaccgacaatgtggagaggatcgtggagaacgaaaagataaatgccgaaaagtcttctaaacaaaaggtcgacctccagtccctgccaacacgggcctatctcgaccagaccgtcgtccccattttattgcagggcctcgctgtgctagccaaagagagaccgcctaatccaatcgagttcctggcgtcctacctgttgaaaaacaaggcccagttcgaggaccgcaattag

SEQ ID NO: 185879 - DNA, 300 bp, synthetic construct
  misc_feature 1..300: note = Description of Artificial Sequence: Synthetic coding sequence
  source 1..300: mol_type = other DNA
atggagcccgagcagatgctggagggccagacccaggtggccgagaatcctcactcggagtacgggctgaccgacaacgttgaacggattgtggagaatgagaagatcaacgcggagaaatctagtaagcagaaggtggatttgcaatctcttccaacaagagcttacttagaccaaactgtggtcccaatactgctgcaaggtctggccgtgctggccaaagagcgacccccgaatcccatcgaattcctggcttcttatcttttgaaaaataaagcccagttcgaagaccgcaattag

SEQ ID NO: 185880 - DNA, 1956 bp, synthetic construct
  misc_feature 1..1956: note = Description of Artificial Sequence: Synthetic coding sequence
  source 1..1956: mol_type = other DNA
atggccggccacccctggcacggcaccgccgccctggccagcagccaggcctggcgcgacggcagagaacgccaggcactggtgtcctgtcgggccctttatacctacgaggacggctctgacgatctcaaactggctgcctctggggaagggggtctccaggagctcagcggccatttcgaaaatcagaaggtgatgtacggattttgttctgtgaaagacagccaggcagctcttccaaagtatgtgctcataaattgggttggcgaggacgttcctgacgcacgtaagtgtgcttgcgcctcacacgtagccaaagtggctgaattctttcaaggcgtggatgtgatcgtcaatgcttcctccgtggaggacatcgatgccggtgccattggccagagacttagcaacggcttggctagactgtcctctcctgttctccaccggctgcggctgagagaggacgaaaatgcagagccagtagggactacataccagaaaacggatgctgcggtggaaatgaagcgcattaatagggagcagttttgggaacaggccaaaaaggaggaagagctcagaaaggaggaggaacggaaaaaagccttggacgagcgtctgaggtttgagcaagaaagaatggagcaggaaagacaggaacaagaggagagggaaagacgctatagggaaagagaacagcagatcgaggaacatcgccggaaacaacagactcttgaggctgaggaggctaagaggcgtttgaaggaacagtcgatcttcggcgatcatagagacgaagaagaagagactcacatgaagaaaagcgaaagtgaggtggaagaagctgctgctataatcgcgcaacgcccagacaacccacgcgagtttttcaaacaacaggaacgcgtggccagtgcctccgctggatcatgcgacgtcccatccccattcaaccaccggcctgggtcacatttggatagccaccgaagaatggcccctacaccaatccccaccaggagcccatccgactctagcacagcttccacgccggtcgccgagcagatcgaacgggccctagacgaagtcaccagttcccagccaccacccctgccaccaccgcccccccctgctcaggagacccaggaaccatcacccatacttgactcagaagaaactcgggcggccgccccgcaagcttgggcagggcccatggaagaaccgcctcaggcccaggcacccccccgggggccaggctcccctgccgaagatctaatgttcatggaatcagcggagcaggcagtgctggccgcccccgttgagccggctactgccgacgcgaccgaaatccacgacgctgccgacaccatcgaaactgacacggccactgcagacaccaccgttgcaaataatgtgcctccagcggctacgtccctgatcgatttgtggccagggaatggggagggcgccagcacactccagggcgagccccgggcacccacacctcctagtggcaccgaagtaacactcgctgaggtgcctttactagatgaggttgccccagagcccctccttcctgccggggagggatgcgccaccctgctgaacttcgacgagctgccagagccccccgccaccttctgtgatccggaggaagtggagggggagtcactggccgctccccaaacacccacactcccctcggcactagaggaactggagcaggaacaggaacctgagccccaccttctcacgaacggggaaactacacagaaggaagggacccaggccagcgaggggtatttcagccagtcccaggaggaggagtttgcccaatccgaagaactgtgcgccaaggccccccctcccgtcttctataataaaccacctgagatcgatataacatgctgggatgccgaccccgttccagaggaagaagaaggctttgaggggggggattag

SEQ ID NO: 185881 - DNA, 1950 bp, synthetic construct
  misc_feature 1..1950: note = Description of Artificial Sequence: Synthetic coding sequence
  source 1..1950: mol_type = other DNA
atggccggcgtgagcttcagcggccaccggctggagctgctggccgcatacgaggaagtcatccgagaggaaagtgctgccgattgggccctgtatacctatgaggatggcagcgatgatctgaaacttgccgccagcggcgagggaggtttgcaagaactttctggacactttgagaaccagaaggtgatgtacggattttgctcagtaaaggactcccaggctgccctgccgaagtatgtcctgattaattgggttggggaagacgtgcccgacgcacgaaaatgtgcttgcgcatcgcacgtcgctaaggtcgcagaatttttccagggtgtagacgtgatcgtgaacgcgtctagcgtggaggacatcgacgcgggggcgatcggacagcgactgtcaaacggcctggcacgccttagcagccctgtgcttcatagactccgacttcgggaggacgagaacgccgagccggtgggcactacctaccagaagacagacgcagccgtcgagatgaaaagaatcaaccgggagcagttttgggagcaggcgaagaaagaggaagagctacgaaaagaggaggagagaaaaaaggccctggacgagagattgcggttcgagcaagaaaggatggagcaggagcggcaggagcaagaggagcgggaaagaaggtacagggagcgtgagcaacaaattgaggaacaccgtcggaaacagcagacgctggaggccgaggaagctaagcgtaggctgaaggagcagagcatcttcggcgatcacagggacgaggaagaagagacacacatgaaaaagtccgagagcgaagtggaggaagcagctgcaatcatcgctcagcgacccgataacccgcgcgagttctttaagcagcaagaacgcgtggcatccgcatcagcgggtagttgtgatgttcctagcccgttcaaccaccgtccaggctctcacctagatagccatcgtcggatggcccctacaccgattccaaccagaagccccagcgacagcagtaccgcaagcacaccagtggctgagcagatagaacgggccttggacgaagttacttcaagtcagcctcctcctctccctcctccacctcccccggcccaggaaacacaggagccctcgcctatcctggattcagaagagacacgagccgctgctccgcaggcatgggccggcccaatggaagaaccgcctcaggcacaggcaccccctcgtgggcccggcagccccgcagaagatctaatgtttatggagtcagccgagcaggcagtgctagcagcccctgtggaacctgcaacagcagatgccacagaaatacacgatgccgcagatacgatcgagacagacactgctaccgccgacacaacagtggctaataacgtgcctccagctgcaaccagcctcatcgacctttggccaggtaacggcgaaggagcatccacattgcagggcgaaccaagggctcccacccccccttccggaacagaagtcacccttgccgaggtgcctctcctggacgaagtcgcgcctgaaccattgctgcctgcgggagagggatgtgctacactccttaattttgatgaactgcccgaacctccagccaccttctgcgatcccgaagaggtcgaaggggaatcactggcggctccgcagaccccaaccctcccctccgccctagaggaacttgaacaagagcaggagccagaaccccacctcctcacaaatggcgagaccacgcagaaagagggcacacaggcctcagagggctacttttcccagtcccaagaagaagagttcgcccagtccgaggagctgtgtgctaaggctcccccaccagtcttctacaataaaccccccgagatagatattacctgctgggatgctgaccccgtgcctgaagaagaagaaggcttcgaaggaggggactag

SEQ ID NO: 185882 - DNA, 1146 bp, synthetic construct
  misc_feature 1..1146: note = Description of Artificial Sequence: Synthetic coding sequence
  source 1..1146: mol_type = other DNA
atgaagaagagcgagagcgaggtggaggaggccgccgccatcatcgcccagcggcctgacaatccccgggaattcttcaagcaacaggaacgagtggcatctgcaagcgccggcagctgcgatgtgccaagtccctttaaccacagaccgggcagccaccttgacagtcaccgcagaatggcccccacccccatccccaccagatctccaagtgactcttccactgcatcaacacctgtggccgaacagattgaacgagccctcgatgaagttacgtcgagccaacctcctccactgcctcccccgccccctccggcccaggagacgcaagaacccagccctatactggattccgaggagacccgcgccgccgctccccaggcttgggctgggcccatggaagagcctccacaggctcaagccccccctcgcggcccgggttctcccgccgaagacctgatgttcatggaatctgccgagcaggccgtcttggctgcccctgttgagccagcaaccgcagacgccacagaaatccatgatgccgctgacaccatcgaaacggacacagcgacagccgataccacagtggccaataacgtgcccccagccgctacatccctgatcgatctctggcccgggaatggcgaaggggccagcactcttcagggcgaaccacgggcccccacgccaccttcgggaacagaggtcaccctagcagaggtaccactcctcgatgaggtagcaccagagccactgcttcccgccggggagggatgcgcaacactgttgaattttgacgagcttcctgagccacccgccacattttgtgaccctgaagaggtagaaggggagagcctcgccgccccccagacgcccacactgccgtctgccctcgaagaattagaacaagaacaggaacccgaaccccaccttctgacaaacggcgaaacaacgcagaaggaaggcactcaagcttctgagggctatttctcccagagccaagaggaagagtttgcacagagcgaggagctctgcgcgaaggctcctcctcctgtattttataataaaccaccagagattgacatcacatgctgggacgcagatccagtgcctgaggaggaagaaggtttcgaaggaggtgactag

SEQ ID NO: 185883 - DNA, 954 bp, synthetic construct
  misc_feature 1..954: note = Description of Artificial Sequence: Synthetic coding sequence
  source 1..954: mol_type = other DNA
atggccggcgtgagcttcagcggccaccggctggagctgctggccgcgtatgaagaggtcatcagggaggagtctgcggccgattgggcactttacacatacgaggatgggtctgacgatcttaagctggcagctagcgggggcgggctgcaggagctgagcggccacttcgagaaccagaaggtcatgtatggcttctgtagcgtcaaagattcgcaggccgcactgccaaaatacgtgttgatcaactgggtgggcgaggatgtccccgatgctaggaagtgtgcttgtgccagtcacgtggccaaagttgctgagttttttcaaggagtggacgtgatcgtgaatgctagcagcgtggaagatatcgatgccggcgcgataggacagaggctcagcaacggacttgcacgcctgagctctccagtcctccatcgtctgcggcttcgtgaggacgagaatgccgaaccggttggaaccacataccagaagacggacgctgctgtcgagatgaaacggatcaatcgcgagcaattctgggagcaggcaaagaaagaagaggagttgcgcaaagaagaggagcgcaagaaagccctagacgaacgcctgcgttttgagcaggaaaggatggagcaagaacggcaggaacaagaagagagagaaagacgttacagagaaagagaacaacagatcgaagagcaccgaaggaagcagcaaactctcgaggctgaggaggctaagcgccgactgaaagagcagagcatattcggagatcacagggatgaagaagaggagacgcacatgaagaaatctgagtccgaagtggaggaggctgcggctatcatcgcacagagacctgataacccaagagagtttttcaagcagcaggaaagagtggcatctgccagcgcgggtagttgtgatgttccatccccttttaatcacagaccttag

SEQ ID NO: 185884 - DNA, 375 bp, synthetic construct
  misc_feature 1..375: note = Description of Artificial Sequence: Synthetic coding sequence
  source 1..375: mol_type = other DNA
atggccggcgtgagcttcagcggccaccggctggagctgctggccgcttatgaggaggtcatccgagaggagtctgctgcggactgggccctctacacatatgaagatggcagtgacgatctcaagctggccgcgtccggggagggtggactccaggagctgtcaggccacttcgagaaccagaaggtcatgtatggattttgctcagtcaaagatagtcaggccgcattgccaaagtatgtgttaatcaactgggtgggcgaggatgtgccagatgctcgaaaatgtgcttgtgcatcacatgtagcaaaagtcgcagagtttttccagggagttgacgtaattgtgaatgcctcttccgtcgaggacatttag

SEQ ID NO: 185885 - DNA, 3900 bp, synthetic construct
  misc_feature 1..3900: note = Description of Artificial Sequence: Synthetic coding sequence
  source 1..3900: mol_type = other DNA
caccggatgagcttccaccccggccggggctgcccccggggccggggtggccacggcgcacgcccatccgcccctagctttagaccacaaaatttgcgcctgctccacccacagcagccccctgtgcagtaccagtatgaacctccttccgcaccttccactactttttccaatagccctgcacctaacttcctccctccacggccagatttcgtcccatttcccccacctatgcctccgtccgcccaaggccccctgccaccttgtcccatacggccccctttccctaaccatcaaatgcggcacccctttcccgtccctccttgcttcccaccaatgcccccaccaatgccctgtcctaataaccccccagtgccgggagcgccccccggacagggaacgttccctttcatgatgcctcccccaagcatgcctcatcctccgccaccccccgtgatgcctcagcaggtcaactaccaataccctcccggctattctcatcataacttcccgcctccttccttcaacagctttcagaataacccatcttctttcctcccaagcgcaaacaactcctcaagcccacatttccgccatctcccgccttatccactacctaaggcaccgagcgaacgcagaagtccagagcggctgaagcattatgacgatcaccgtcaccgcgaccacagtcacggaagaggggaacggcatcgttctctggatagaagagagagaggccgctccccggataggaggagacaggatagccgatatcgctctgattatgaccgcggacgaactccaagccgccacaggagctatgaacgatctagcagatccccctcaagagaaaagaagagggcccggtgggaagaggagaaggatagatggtctgacaaccaaagttccggtaaggacaaaaactacaccagcattaaggagaaagagcctgaggagaccatgccagacaaaaatgaggaggaagaagaggagctacttaagccagtgtggatacgctgtacccacagtgaaaactattacagctccgacccgatggaccaagtcggcgattcaaccgttgtggggacttccaggctaagagacctttatgacaaattcgaggaagagcttggctctagacaggagaaggctaaggccgctcggcctccttgggagcccccgaagacaaagctggacgaagacctggagagctcttcagagagtgaatgtgaaagcgatgaggactctacatgttcatctagctcagattccgaagtctttgatgtcattgccgaaatcaagaggaaaaaggcacaccccgacaggctgcatgacgaattatggtacaacgacccgggccagatgaacgatgggcctctttgcaagtgcagcgcaaaggcacgacgaactggtattaggcatagtatctaccccggggaggaggccatcaagccatgccgaccaatgactaacaatgctgggaggctgtttcattatagaatcactgtttcccccccaactaactttctgacagacaggcctaccgtaatagagtacgatgaccacgaatacatattcgaggggttctccatgtttgcacatgcccctctgacaaacattcccttgtgtaaagttatccgctttaatatagactataccatccattttatcgaggaaatgatgcccgagaatttctgtgtgaagggacttgaactgttcagcctgttcctgttccgtgacatcttagagctctatgactggaatctcaagggccccctttttgaagactcacctccttgttgcccccggtttcactttatgcctagattcgttagattcttgcccgacggggggaaagaggtgctgagcatgcaccaaatcctgctatatttactgcgatgttccaaggctttggtgcccgaggaggagattgccaacatgctccagtgggaggaactcgaatggcaaaaatatgccgaggaatgtaagggtatgatagtaaccaacccgggtaccaaaccctcatctgtgcgaatcgaccagctggacagggaacagtttaaccccgacgttattacttttcccataatcgtgcactttgggatccgccctgcccagctgagctacgccggagaccctcagtatcagaaactgtggaaatcctatgtgaaattgcgacacctgctggctaacagccctaaggtgaagcagactgacaagcagaagttagcgcaaagagaagaggccctgcagaagatccgccagaaaaacactatgagaagggaggttacagtggagttgagctcccagggcttttggaaaaccggaataaggtccgatgtgtgtcaacacgccatgatgctccccgtactgacacaccacattagataccaccagtgcttgatgcaccttgacaaattgattggctacacctttcaggacagatgcctcctgcagttggctatgacacacccatctcaccacttgaattttggaatgaatcccgatcacgcgcgcaatagcctgagtaactgtggaattaggcaaccgaaatatggcgaccggaaggtccatcacatgcacatgcgcaagaagggaattaatacactgatcaacattatgtctagacttgggcaggacgaccctaccccctcccgcatcaaccataatgaaaggttggaatttctgggcgacgctgtggtggaattccttactagtgtccacctctactatctgttccccagccttgaagagggtgggctggctacgtacaggaccgccattgtacagaatcagcatttagcgatgttggctaaaaaactcgagctggatcggtttatgctatacgcccacggaccagacctgtgccgagaatccgatctgagacatgccatggccaactgtttcgaagccctcatcggcgccgtctatcttgaggggagtctggaggaggccaagcagctgttcggcaggctgctatttaacgatcccgacctccgggaggtgtggctcaactaccctctgcaccctctccaattacaagagccgaacacagatcgccagctaatcgaaacttctccagtgctccagaaactgacagagtttgaagaggctatcggcgtgatttttacccacgtaagattattggctagagctttcaccctacgaacggttggatttaaccatctcacactgggccacaatcagcgcatggaattccttggagactcgattatgcagctcgttgctactgagtacctgtttatccacttcccagaccatcatgagggccacctaaccctgctccggtcttcactggtgaataacagaactcaagcaaaggttgcggaggaactaggcatgcaggagtatgctatcacgaatgacaaaaccaagagacccgtggccctcaggactaagacactggccgacttgctggaaagcttcattgccgctctgtacatagacaaggacctggagtatgtccacacatttatgaatgtatgttttttcccgcgtcttaaggaatttatcctaaatcaggactggaatgaccctaaatcgcaactccagcaatgttgcctgaccctgagaaccgaggggaaggagcctgacatcccactctataagacattacagactgtgggaccatctcacgcacggacttacaccgtcgctgtatacttcaagggcgagcggataggatgtgggaaaggtccttctatacagcaggcagagatgggagctgccatggatgctctcgaaaagtacaacttcccacaaatggcacatcaaaaacggttcatcgagcggaagtacagacaggaattaaaggagatgagatgggaaagagaacatcaagaacgcgaaccagacgagaccgaggatatcaagaaatag

SEQ ID NO: 185886 - DNA, 4125 bp, synthetic construct
  misc_feature 1..4125: note = Description of Artificial Sequence: Synthetic coding sequence
  source 1..4125: mol_type = other DNA
atgatgcagggcaacacctgccaccggatgagcttccaccccggcaggggctgcccacgcggtcgtggcgggcacggggcacgtcccagtgccccttcattccgccctcagaacctccgactcctgcacccccagcagccccccgttcagtaccagtacgagccgccaagcgccccgtctacgaccttcagtaattctccggctcctaacttcttgccccccaggcccgactttgttccatttcctcctccaatgccacctagtgctcagggcccactcccaccctgcccaatacgaccacctttcccaaatcatcagatgcgccacccattccccgtccccccctgctttccccctatgcctccccctatgccgtgcccgaacaacccacccgtgcccggggcacctccaggccagggaacgttcccttttatgatgccaccaccctcaatgccgcacccaccgcccccccccgtaatgccccagcaggtgaattaccagtatcctccgggctatagtcatcacaactttcctcctccctcttttaacagcttccagaataacccatcgtcttttctgccgtctgcgaacaactcttcatcaccgcacttccgtcatctgcccccttatccacttccaaaggcaccttctgagcggagaagcccggagaggctaaagcactacgacgaccaccgccaccgggaccactctcatgggagaggcgaacgacatagaagtcttgataggcgagagcgagggagatcccctgacagacggcgccaagattccagatataggtcagattacgacagagggcgcactccctcccgtcacagaagctatgaacggtctagagaaagagaacgggagcgccacaggcaccgagataataggcggtccccctcactggaacgcagttataagaaagagtataagagaagcggaagaagttacggattatccgtcgtccctgagccagcaggttgcactcccgaattgcccggagagatcattaagaatactgactcttgggcaccccccctcgaaatagtaaatcaccgaagtccgtcccgagaaaaaaaacgggcacgatgggaggaagagaaagatcggtggagcgataaccaatctagcgggaaagataagaactatacgtcaataaaagagaaggaacctgaagagaccatgccagataaaaatgaggaggaggaagaggagctgctgaaaccagtgtggattcggtgcacacactctgaaaattactatagctcagacccaatggatcaggtgggggactctaccgtggttggaacaagccggctacgagacctatatgataagttcgaggaggaactcgggtccagacaggagaaagccaaggcggccagaccgccttgggagccacctaaaacaaaactcgatgaggacctggagtcctcatcagagtcagagtgtgagagtgacgaagatagcacatgcagctcctcttccgatagcgaggtcttcgacgtaatcgctgaaattaaaagaaaaaaagcccatcccgataggctccatgacgaactgtggtacaatgatcctggccagatgaacgacgggccactctgcaagtgcagtgccaaagctcgccggactggtatccggcactccatttaccccggggaagaggccattaagccttgtcgaccgatgacgaataatgcgggacgtctctttcactatcggataaccgttagtccgcccactaacttcctgactgatagaccaaccgttatcgaatacgacgatcacgagtatatattcgagggatttagcatgttcgctcacgcaccattgacaaacattccactctgcaaggttattaggtttaatatcgattacacgatccacttcatcgaagaaatgatgcccgaaaacttttgtgtcaagggcctggaactcttcagcctgttcctgttcagggacattctggagttgtacgactggaacctgaagggccctctgtttgaggattccccaccatgttgtccccgctttcatttcatgccccggttcgtaaggttcctaccggatggaggcaaagaagtgctctccatgcaccagattctcttgtacctccttcgttgttccaaggccctggtgccggaggaagagatcgctaacatgcttcagtgggaagagctggaatggcagaaatatgcagaggagtgcaaaggcatgatcgtgactaatccaggtacaaagccctccagtgtgcggatcgatcagctcgatcgggagcaatttaatcctgacgtgattacgttccctataatcgtccatttcggcatacgtccagcccaactgagctacgccggagatcctcagtaccagaaactgtggaaaagttacgtcaagctgcgacaccttctcgccaattccccgaaagtaaaacagaccgataagcaaaagctcgcccaacgtgaggaagctcttcaaaagatcagacagaagaacactatgcgcagggaagtgaccgttgaattgagctcacagggcttctggaaaacaggcattaggtctgacgtgtgccaacatgcaatgatgctgcccgtcttgacacatcatatccggtaccaccagtgcttaatgcatctggacaagctgattggctacacattccaagatcgctgcttacttcaactcgctatgactcacccctctcatcatctgaactttggcatgaaccctgaccatgcccgtaactcattgtcaaattgcggcatccgtcagccaaaatatggcgatcgcaaggttcaccatatgcacatgcgtaagaaggggattaataccttaataaatataatgagtcgtctcggtcaggacgaccctaccccttcacgaatcaatcacaacgagagattagaatttctgggggacgctgttgtggaattcttgactagcgtccatctatattatctattcccttctctggaggaaggtggcttggcgacatatcgcaccgccatcgtgcagaatcagcatctggcgatgctggcaaaaaagttggagctggacaggtttatgctttacgcccatggccccgacttgtgccgcgaatcagacttgagacacgctatggccaattgttttgaagctttgattggggccgtatatctggaaggcagcctggaggaggccaagcagctgtttggcaggctgctattcaatgacccggacctcagggaagtttggctgaattatcccttgcaccctctccaacttcaggaaccaaatacagataggcagctcattgaaacctctccggtcctccagaagctgactgagtttgaggaagcaatcggcgtgatttttacgcacgttagactgctggccagagcctttacccttagaaccgtgggttttaatcaccttactcttggacacaaccaacgcatggaattcctcggggattccataatgcagctagtcgccacagagtatctgttcatccattttcccgatcaccacgagggtcacctgacgctgcttcggtccagcctggtgaacaacagaacacaggccaaagtggcggaagagctgggaatgcaggaatatgctattacaaatgacaaaaccaagaggccagtggccctccggacaaagacccttgctgacctccttgagtctttcattgccgccctctacattgacaaagacttggaatatgtacatactttcatgaacgtatgcttcttcccccgcttgaaagagttcatacttaatcaagactggaacgacccaaagtcgcaacttcagcaatgctgcttgactctgcgaaccgaaggcaaggaaccagatatcccattatataaaacactgcagacggtcggacccagccacgcacgaacctatactgtggcagtctatttcaagggcgaaagaattggctgcggaaaagggcctagtatccagcaagccgaaatgggggccgctatggatgccctcgagaagtacaattttccacagatggcccaccagaagagattcatcgagcgaaagtaccgccaggagctcaaggagatgaggtgggaaagagagcaccaagagcgagagcctgacgagaccgaagatattaaaaaatag

SEQ ID NO: 185887 - DNA, 3558 bp, synthetic construct
  misc_feature 1..3558: note = Description of Artificial Sequence: Synthetic coding sequence
  source 1..3558: mol_type = other DNA
caccggatgagcttccaccccggccggggctgcccccggggccggggtgggcacggggctcgaccttcggctccttctttcaggcctcagaacctccgcttattacacccgcagcaacccccggtacagtatcagtatgagcccccctctgctccatctactacattcagtaatagccctgccccaaatttccttccaccgcgacccgactttgttccatttcccccgcctatgccaccaagtgctcaaggcccattgcccccgtgccccattaggcccccatttcctaaccaccagatgcggcacccatttcccgtccctccctgctttccgcctatgcctccaccaatgccttgtccaaacaacccacccgtacccggggccccccccggccaaggcaccttccctttcatgatgcctcctcctagtatgcctcacccacccccacccccagtgatgccccaacaggtcaattatcagtaccctcctggctatagtcatcataacttcccccccccgtcctttaattcttttcagaataacccttccagcttcttgccttccgctaacaacagtagctcaccccacttccgccacctcccgccgtacccactgcctaaagctccatctgaaagaaggtcgccagaacggctgaagcactacgacgaccatcggcatcgggaccactcgcacggaaggggcgagcggcaccgatctctggaccgcagagagaggggccggtcccccgacagacgcaggcaggatagtaggtataggtctgattatgacagaggtcgtaccccttcaaggcaccggtcatatgaaagatctagggaacgagaacgggaaaggcatagacaccgcgacaaccggcgcagcccaagcctggagcgctcttacaagaaggagtacaagcgctctggctccaggtccccttcacgcgaaaaaaagcgggccaggtgggaggaagaaaaagatagatggagcgataaccagtcctccggtaaagacaagaactacacgagcattaaagaaaaagaacccgaagaaaccatgccggataaaaacgaagaagaagaggaggaactgctcaagcccgtctggatcaggtgcacccactcagaaaattactattccagcgacccaatggaccaagtgggcgactcaactgtcgtcggaacaagccgactgcgagacctgtacgacaaatttgaggaagaactgggctcgcgccaagagaaggccaaggcagctcggcccccatgggagccgccaaaaaccaaactggatgaggacctcgaatcctcttctgagtctgagtgtgagagtgatgaggactccacatgctctagcagcagcgactccgaggtcttcgacgtcatcgctgaaattaagagaaagaaggcccaccccgatagactgcacgacgagctctggtataatgatccggggcagatgaacgacggccccttgtgtaagtgctctgctaaggcaaggcgaacagggatacggcacagtatttatcctggcgaagaggcaattaagccctgtaggcccatgacaaataacgcaggccgtctgtttcactataggatcaccgtgagcccgcccactaactttctcaccgataggccaactgtgattgaatatgacgaccacgaatacatcttcgaaggattctcaatgtttgcacacgctcccctcacaaatattcccctgtgtaaagtgatccgttttaatattgattacactatccattttatcgaagagatgatgccagagaacttttgcgtaaagggcctagaactgttttccctgtttctgtttagggatattctggaattatacgactggaacctcaaggggcctctttttgaagacagtcccccttgctgcccacggttccacttcatgcctagatttgttagatttttacccgatggcggcaaggaagtgctgagtatgcatcagatccttctctatcttcttcgctgcagcaaggctctggtaccggaggaagaaatcgccaatatgctgcagtgggaggagcttgaatggcagaaatatgctgaggaatgtaaggggatgattgtcactaaccccgggacaaagccttctagcgttcgaatagaccagctggacagggaacagtttaatcctgacgtgattactttccctatcattgtacactttggcatccggccagctcagctgtcttacgctggagatcctcagtatcaaaagttgtggaaaagctacgtgaaactcagacatcttttggctaactcccccaaggttaagcaaaccgataagcagaaactcgctcagcgcgaagaggcactgcagaagattcgacagaaaaataccatgaggagggaagtaaccgtggagcttagttctcagggcttctggaagaccgggatcagatctgatgtgtgccagcacgccatgatgttgcctgtgctgacacaccacatcaggtatcaccagtgtctgatgcacctcgacaagctgatcggctatactttccaggacaggtgtctgttacagctggccatgacacacccctcccatcaccttaacttcggtatgaatcccgaccacgcccggaattccttgagtaattgtggcattcggcagcccaagtacggagaccgcaaagtccatcacatgcacatgagaaagaagggaatcaacactctgatcaacataatgagtcggctggggcaagatgaccctacaccttccaggatcaaccataatgagagactggagtttctcggtgatgccgtggtcgagtttctgacttcagtgcacctctactatctgttcccaagtttggaggagggaggtttggccacctaccgaaccgcaatcgttcagaatcagcacctggctatgcttgctaagaaactggagctggaccggttcatgctgtatgcccatggtccagacctttgccgcgaatctgacctgcggcacgccatggccaattgttttgaagccctgatcggagccgtgtatctggaaggctcactcgaagaggccaagcaactattcggacgcctgctgttcaatgatcccgaccttagggaagtgtggctgaattacccactgcaccccctgcaattacaggaaccgaacactgacaggcagctaattgaaactagtcccgtccttcagaaactgacagagttcgaagaagcaatcggcgtaatctttacgcatgtcagactgttagccagagcctttacactccggacggtgggcttcaatcatctgaccctcggccacaaccagaggatggagttcctcggagatagtatcatgcagctcgtggccactgagtatttattcatccacttccccgaccatcacgagggccaccttacgttgcttaggtccagcctcgtgaataacaggactcaggccaaagtcgcagaggaacttggcatgcaggagtggtccatctacctgctcagcaactgtgattgctgcctcctcagaccaagcctggtctttttacagaccatgaacgaagtctgctcactgaagtag

SEQ ID NO: 185888 - DNA, 4014 bp, synthetic construct
  misc_feature 1..4014: note = Description of Artificial Sequence: Synthetic coding sequence
  source 1..4014: mol_type = other DNA
atgatgcagggcaacacctgccaccggatgagcttccaccccggccgcggatgccccagaggtcgaggggggcacggggccagaccgagtgccccaagctttagaccacagaacctgcgactgctgcatcctcagcagcccccggtacaatatcaatatgagcccccgagcgcaccaagtacgacattctcaaacagccccgccccaaatttcctgccacctaggcctgattttgtccccttcccaccccctatgcctccctccgcccagggacctcttcctccctgcccgattagacccccattcccaaatcaccaaatgcgccaccccttcccagtgccaccctgcttccctccgatgcctccgccaatgccgtgtccaaacaatccgccagtaccaggggccccaccgggacagggtacctttccattcatgatgccaccgccatcaatgccgcacccaccccccccgccggttatgccgcagcaggtgaattaccagtaccctcccggttactctcaccataacttccctccccctagcttcaactcttttcagaacaatcctagctcatttttgccctccgctaataattcttcaagtccccacttccgacacttacccccttacccactccccaaggctccttctgagagacgtagtccagagaggctgaagcactacgatgaccacaggcatcgggaccacagccatggacggggagagcgtcaccgcagtttggaccggagagagagaggacgaagcccggatagacgaaggcaagatagccggtatcggtcagactacgatagggggaggactccctccaggcacaggtcttatgagcgttctagggaaagggaacgagagcggcacaggcacagggacaaccggagatcaccatccctcgagaggtcctacaagaaggaatacaagcggagcggttcccgttcaccatctagagagaagaagcgcgctcggtgggaggaggaaaaggatcggtggagtgataatcagtcttcaggcaaagataagaattacacctcgattaaggagaaggagccggaggagacaatgcctgacaagaatgaggaagaagaggaagagctgttgaaacccgtgtggatacgctgcacgcactccgaaaactattactcctctgaccccatggaccaggtgggcgattccacagtggtgggaacttccagacttcgtgatctctatgataagttcgaagaggagcttggctcccgccaggagaaggcaaaagccgccagacccccatgggaaccaccgaagacaaagctggacgaggatctggaatcgtcctctgaaagtgagtgcgaatcagacgaggatagtacatgcagttccagttctgattctgaagtattcgacgtgatcgccgagatcaagagaaagaaggcccacccagaccgtctgcatgacgaactctggtacaatgacccgggacaaatgaacgacggccctctttgtaaatgctcagccaaggcccgacgaacggggatccgacactcaatatacccaggcgaggaggcgattaagccgtgtcgccccatgactaataacgccggtcgcttgttccactaccggatcacagtttcacctccgactaatttcctaaccgataggccaacagtgatcgaatacgacgatcacgagtacatctttgaaggcttcagcatgtttgcacacgctccgcttaccaatatcccactctgtaaggttattcggttcaacattgactacacgatccactttatagaagaaatgatgcctgagaatttttgcgttaagggtcttgagttgtttagtttgtttctctttagggacatcctagaactgtatgactggaacctgaaaggacccctgttcgaggactcccccccgtgctgtcctagattccatttcatgcctaggtttgttcggttccttcctgacggaggtaaggaagtcctctcgatgcatcagatccttctctatctgctgaggtgtagtaaggctctcgtcccagaggaggagatcgctaatatgttacaatgggaggagctggagtggcaaaaatacgccgaggagtgcaagggtatgattgtcaccaatccaggtaccaagccttcatctgtaaggatcgaccagttggatcgggagcagttcaaccctgatgttatcactttcccgatcattgtgcactttggcatccggccagctcagctgtcatatgccggcgatcctcaataccagaaattgtggaagtcctacgtgaagcttcggcacctcctcgctaacagccccaaggtgaagcagaccgacaagcagaagctggcccagagggaagaggcattgcagaaaattagacagaagaacaccatgcgaagagaggtgactgtcgaactgagttcacaggggttctggaaaacagggatacgctcggatgtgtgtcagcacgctatgatgctgcctgtgctcactcaccacatcaggtaccatcaatgccttatgcacctcgacaaattaataggatacacgttccaggacagatgcttactgcagttagctatgactcatccctctcatcaccttaacttcgggatgaacccagaccacgctcggaatagcctgtcaaattgcgggattcgacagccaaaatatggagaccgcaaggtacaccatatgcatatgcgtaagaaagggattaatactctgatcaacattatgtcccgcctgggacaggacgaccccaccccctcacggattaatcataacgagaggctggaatttttaggagatgcggtcgtcgaattcctgacctcagtgcatctgtactatttgttccccagtcttgaggagggaggtcttgcgacgtatagaacggcaattgtccagaatcagcacctggccatgcttgctaaaaaactagagctggaccgtttcatgctgtatgcacacggcccagatctctgtcgggagtccgatcttcggcacgctatggctaactgctttgaggctctgatcggagccgtatacctggaaggcagccttgaagaggcgaaacagctgttcggacggttattgtttaacgaccctgatctgagagaagtgtggctgaattaccctctccacccactgcagttacaggagccaaatacagatagacagctcatcgaaaccagtccagtgctacagaaactcaccgagtttgaggaagctatcggcgttatcttcactcatgtgagacttctagcgagggctttcaccctacgaaccgtgggatttaaccatctgaccctgggccacaatcagcggatggaattcttaggtgattcaattatgcagctcgtggcaaccgagtacctgtttattcacttcccagaccaccacgagggccacttgactcttctgcgttcttccttggtgaataataggacccaagccaaggtggccgaggaactcggtatgcaagagtatgccatcaccaacgacaaaaccaagaggccagtggcccttaggacaaagacattggctgatctcctggaaagctttatcgctgcactttatattgataaagacttggaatatgttcacactttcatgaatgtgtgtttcttcccaagactgaaagagttcatcctgaaccaggactggaacgatcccaagagtcagctccagcagtgctgccttactctgagaacagagggtaaagaacccgatatcccgctgtacaagaccctgcagacagtcgggcccagccacgccagaacctatactgtggcggtctacttcaaaggagagcggatcggctgcggcaagggccccagtattcagcaggctgaaatgggtgctgccatggatgcattggagaagtacaatttcccacagatggcccaccaaaagcgctttattgaaaggaaatataggcaagagttaaaggaaatgcggtgggaaagggagcatcaggagcgggaaccggacgaaacagaggatataaagaaatag

SEQ ID NO: 185889 - DNA, 606 bp, synthetic construct
  misc_feature 1..606: note = Description of Artificial Sequence: Synthetic coding sequence
  source 1..606: mol_type = other DNA
atgatgcagggcaacacctgccaccggatgagcttccaccccggccgaggatgcccgaggggaagaggtggtcatggtgcccggccatccgccccatccttccggcctcagaacctaagactgctccacccacagcagcccccagtccaatatcagtatgagcctccatctgcaccgtcaacaaccttctctaactcgccagcaccaaacttcttgccaccgaggcccgatttcgttccttttcccccacccatgcctccctcagcccagggacctttgcctccttgtccaatcaggcccccctttcctaaccaccaaatgagacacccgttcccagtacccccgtgcttcccaccaatgccccccccaatgccatgccccaacaatccaccagttccaggtgctcccccgggacagggtacctttcctttcatgatgcccccaccttctatgccacacccaccacccccgccagtgatgccgcagcaagtgaattatcagtaccccccgggatatagccatcacaacttccctcctccctcttttaattcattccagaacaatcctagctcatttctgccatcagcaaataatagctcctcttag

SEQ ID NO: 185890 - DNA, 4125 bp, synthetic construct
  misc_feature 1..4125: note = Description of Artificial Sequence: Synthetic coding sequence
  source 1..4125: mol_type = other DNA
atgatgcagggcaacacctgccaccggatgagcttccaccccggcagaggttgtcctcgtgggaggggagggcatggggcacggccatctgctccttcttttcggcctcaaaacctgagactgttgcatcctcagcagcctccggtgcagtaccagtacgaaccgcccagtgccccaagtacaacctttagcaactcccccgcgcctaacttcttgccaccaagacccgatttcgtgccatttccgccacctatgcctccttcggcgcaggggcctttgcccccgtgcccaattagaccacctttcccaaatcatcagatgcgccaccccttccccgtgccaccatgttttcctcccatgccaccacctatgccttgtccgaataatcccccagttcctggcgctccccccggccaaggcacctttcccttcatgatgcctcccccttcaatgcctcacccaccaccccccccggtgatgccacagcaagtgaattatcagtacccgcctggatacagccatcataatttccccccacccagcttcaactcgttccaaaataatccctcttcttttctgcctagtgctaataacagctcgtctccacatttccggcacctccctccttaccctctccctaaggcccctagtgagcggcgctccccggagcgattgaagcactatgacgatcatcggcaccgggatcacagccatggacgcggagagcgtcacagatccctggaccgcagagaacgcggaaggtctcctgaccgacgacgccaagactcacgatataggtccgactacgataggggacgcactccaagtcgccaccgctcctacgagagatcccgcgagcgagagcgggagaggcatagacatcgcgataacagacggtctccgtccctggagagaagctacaaaaaggagtataaacgctctggacgctcctacggactaagcgtcgtccccgagcccgccggttgcacccctgaattgcccggagaaatcattaagaacactgactcctgggcccctcccctggaaatcgtgaatcacaggtcaccctcccgcgagaagaaaagggctcgatgggaggaagagaaagatcgttggtcagataatcagtcttcagggaaagacaagaattatacctcgataaaggagaaagagcccgaagaaacaatgccagacaaaaacgaggaggaggaggaagaactgttgaaaccggtgtggatccgatgcactcattctgagaactattacagctctgatccgatggaccaggtaggagattcaacagtggtggggacatctagactccgggatctttacgacaagtttgaggaggaactggggtcccgccaagagaaggctaaagcggcaaggccgccctgggagccccccaagaccaagttggacgaggatttggagagcagctctgagtccgaatgtgagtcagacgaggacagcacatgtagctcctcaagtgattccgaggtcttcgacgtgatcgctgaaatcaaaaggaaaaaagcgcacccagatcgtctccacgatgagctctggtataatgacccaggccagatgaacgacggccccctttgcaagtgttcagctaaggctcgaaggacaggcattcggcattcaatctaccccggtgaggaagctatcaaaccctgtaggcctatgacaaacaatgccgggcgcctgttccattacaggattacagtatctcctcctactaacttcctcaccgatagacctacggtgatcgaatacgacgatcacgagtatatcttcgagggatttagcatgtttgcacacgctcctctgactaatattcctctctgcaaagtgatccgttttaacattgactacaccatacattttatagaagaaatgatgccagagaatttttgcgtaaagggactggaactgttcagtctattcctgttcagggacatactggaactgtacgactggaacctgaagggtccactgttcgaagactcaccaccttgttgccctaggttccatttcatgccacgattcgtgcgctttttgcccgatggcggtaaagaagtgctaagcatgcatcagatactcctgtatcttctccgctgttctaaagccctagtacccgaggaggagattgccaacatgcttcaatgggaggagctggaatggcagaagtacgccgaggaatgcaaaggtatgatcgttaccaaccctggcacgaaaccatcatccgtgcgcattgaccagctggaccgggaacagtttaaccctgacgtgattacgttccccatcatagtgcacttcggtatacgtccagctcaactgagttacgccggagaccctcagtaccagaagctgtggaaatcatacgttaagctccggcacctgctggcaaacagccccaaggttaagcagacggacaagcagaaattggcgcaaagggaggaggctctccagaaaattcggcagaaaaatacaatgcgtagggaagtaaccgtcgaattgtcaagccaaggattttggaagacgggaatcaggtccgatgtgtgccagcacgccatgatgctgcccgttttgactcaccacatcaggtatcatcagtgcttgatgcatctggataagcttattggatacacgttccaggaccgctgtctgctgcagctcgccatgacccacccttcccaccacttgaattttggtatgaatccagaccacgctaggaattcattaagcaattgtggaatcaggcaacccaagtatggcgaccggaaagtgcaccacatgcacatgagaaagaaggggatcaacaccttaatcaatattatgagcagactggggcaggatgatccaaccccttcccggattaaccacaacgaacgattggaattcctgggcgatgcagtggtggagttcctgacttccgtgcacctctattacctgtttccatcacttgaggaagggggcctggccacttaccgaaccgcgatcgttcagaaccagcatctagcaatgctagcaaagaaacttgagctggatagatttatgctgtacgcacacgggccagatctgtgtagggagagcgatctgaggcacgcgatggcaaactgtttcgaagctctgattggcgccgtttaccttgagggatcactggaggaggctaagcaactttttggtcgcttgctttttaatgacccagacctgcgggaggtctggctgaattacccacttcaccctctgcagctgcaggaacctaatactgataggcaacttatcgaaacatctccggtcctgcagaagctaaccgaattcgaggaggctatcggtgtcatttttacccacgttcgcctacttgcgcgcgcttttacgctacgaacagtcgggtttaaccacctgacattggggcataaccaacggatggaatttttaggagacagtattatgcagcttgtggccacagaatatctgtttattcactttccagatcaccacgagggccatctgactctgcttcggtcttctctggtcaataacagaacacaggccaaggtggcagaagagttgggcatgcaggagtatgctatcaccaacgataaaacaaagagaccagtggcactccggaccaagacactggccgatctgctggaatccttcatcgcggcgctgtatatcgataaagacctggagtatgtgcacaccttcatgaatgtctgctttttccccaggctgaaagagttcattctgaaccaagattggaacgaccccaaatctcagcttcagcagtgctgcctgaccttaaggactgagggaaaagaaccagacatccctctgtacaagactctgcagaccgtggggccatcccacgccagaacttataccgttgctgtgtattttaaaggggaacgaatcgggtgtggaaaaggcccgtcaattcagcaggccgaaatgggtgctgccatggatgcattagaaaagtacaactttccacagatggcacatcaaaaacgcttcatcgagaggaaataccggcaagaattgaaggaaatgagatgggagagggaacaccaggaacgggagcccgatgagacagaggatatcaaaaagtag

SEQ ID NO: 185891 - DNA, 630 bp, synthetic construct
  misc_feature 1..630: note = Description of Artificial Sequence: Synthetic coding sequence
  source 1..630: mol_type = other DNA
atgaaggccgtggtgcagcgggtgacccgggccagcgtgaccgtggggggcgaacagatttcggccattggccgaggcatttgtgtgctcctcggaatcagccttgaagacacccagaaggaactggagcacatggtccgcaagattctgaacctccgcgtattcgaggacgagtctggcaaacactggagcaagtccgttatggacaagcaatacgaaatactctgtgtatctcagttcacactgcagtgcgtgctgaagggcaataagcctgacttccacctggcaatgccgaccgagcaggctgaaggtttctataacagcttcctagaacagctcagaaagacataccggccagaacttatcaaagatggcaagtttggggcctacatgcaagtccacattcagaacgacggtccagtgacaatagaactggaaagccccgctccaggtaccgccacatccgatccaaagcaattgtccaagctggaaaagcagcagcagcgaaaagaaaagacccgggctaagggtccgagcgagagcagcaaggaaagaaatacacctcgaaaggaagatagaagtgcttcttcgggtgcagaaggcgacgtcagctcggagagagaaccgtag

SEQ ID NO: 185892 - DNA, 843 bp, synthetic construct
  misc_feature 1..843: note = Description of Artificial Sequence: Synthetic coding sequence
  source 1..843: mol_type = other DNA
atgggccgggccgagctgctggagggcaagatgagcacccaggacccctcagatctttggagcagatctgatggagaagctgagctcctccaggatctgggttggtatcatggcaacctcacaaggcacgccgctgaagccctgctgctgagcaatggctgcgacgggtcctacctgctgcgggacagcaatgaaactaccggactgtattcacttagcgtgcgggcaaaagacagcgttaaacactttcacgtggagtatactggatattcctttaagttcgggtttaacgagttttcctctctcaaagatttcgtgaagcattttgctaatcagccattgatcgggtctgaaacaggaacattgatggttcttaagcatccttacccccgcaaagtagaggagccgtctatatatgaatccgtgagggtccatactgcaatgcaaactggccgcacagaggacgacctggttcctaccgcaccatcactgggcactaaagaggggtatttgaccaaacagggaggactcgtcaagacctggaagacccggtggttcacactgcaccgcaatgagctaaaatattttaaagatcagatgagcccagagcctattcggatcttagacttgaccgagtgttcggcagttcaatttgactacagccaagagagggtcaattgcttctgtctagtcttcccctttcgaactttttacttatgtgccaaaaccggcgtcgaagcggatgagtggataaaaatcctcaggtggaagctcagtcagatccgaaagcagctgaatcagggagaggggacaatccggtctaggagctttatttttaaatag

SEQ ID NO: 185893 - DNA, 4656 bp, synthetic construct
  misc_feature 1..4656: note = Description of Artificial Sequence: Synthetic coding sequence
  source 1..4656: mol_type = other DNA
atgggcttctgcctggccctggcctggaccctgctggtgggcgcctggacccccttgggggcccaaaacccgatcagctgggaggtgcagaggttcgacggatggtacaataatctcatggagcacaggtgggggtcaaagggcagtaggctccagagattagtgccagcaagttacgccgacggagtgtaccagcccctcggagagccacatctccccaatccgcgtgacctgagcaacacgataagcagggggcccgccggcctggcttccttacggaacagaaccgttttgggagtgttcttcggctaccacgttcttagcgacctggtgtcagtggagactcctggctgccccgccgaatttctaaatatccggatcccccctggcgaccctatgttcgatccagaccagcgcggtgatgtggtgctacctttccagcggtcaaggtgggatcccgagaccggacgttctccatcaaatccccgagaccctgctaaccaggtgacgggctggttagatggctccgcgatttatggatcttctcactcgtggtctgacgcccttcggagtttttcacgaggccagctggcaagcggccctgatcccgccttcccaagggattcccagaaccctttgctgatgtgggcagccccggatccggctacaggacagaatgggccaagagggctgtatgcgttcggggccgaaaggggcaatcgtgagccttttctgcaggcactagggcttctatggttccgctatcataacctgtgggcccagcggctcgcaaggcagcacccggactgggaagacgaagagctatttcagcacgctcggaagcgggtgatagccacttatcaaaacatagcagtctacgagtggctccccagctttctgcaaaagaccctcccagaatacaccggatatcgcccttttcttgacccaagtataagtagcgagtttgtggctgcatccgaacagttcctgtctacaatggtgccaccaggcgtttacatgcgaaacgccagctgtcatttccagggagttatcaataggaattcttcagtatctcgcgccctgcgggtgtgcaactcctactggtcccgcgagcacccatctctccaatccgcggaggacgtcgacgctctgctgttaggtatggcatcccagattgctgaaagagaagaccatgtgctcgtggaggacgttagagacttctggcccggtcccctgaagttttctcgaactgatcacctggcctcttgtcttcagcgcggaagagatctcggtctgccaagctacaccaaagcacgggcggccctggggttgagcccaataacaagatggcaggatatcaatccagctcttagccgcagtaatgacacagtgctggaagcaacagctgctctatacaaccaggacctctcatggctcgagttgctccccgggggacttctggaaagccaccgggatcctggccctttgttcagcaccatcgttttagaacaatttgttcgccttcgagacggagatcgttactggtttgagaacacgcggaacgggttgtttagtaagaaagaaatcgaggaaattcgcaacacgactttacaagacgtgctggtggccgtgatcaatattgaccctagcgcccttcagcccaacgtatttgtctggcacaagggagatccttgccctcagccaagacagctgagtaccgaagggctacccgcctgtgcaccctcagtggtacgtgattacttcgaagggagtgggttcgggtttggggtcacaatagggaccctatgttgctttccgctcgttagccttttgtcagcctggattgtggcccggctgcggatgcggaattttaagcgcctgcaggggcaggaccggcagtccatcgtcagcgagaaacttgtcggtggaatggaggctctggagtggcaaggccataaggagccttgtcggccagtgttggtctatctgcagccaggacaaattcgcgtggtcgacgggcggctcacagtgctccggacaattcagctgcagcctccacagaaagtaaatttcgtgctctctagcaaccgcggaaggagaacgctgttactgaagatacctaaagagtatgatctggtacttctgttcaacctcgaggaggagcgccaagccttggtggaaaatctcaggggtgccctcaaagagtccgggctctcgattcaggagtgggagttgcgagagcaggaactcatgagggccgccgtcacccgcgagcagcgccgccacctgctggagacattcttccgacatctgttttcacaagtgcttgatatcaaccaggccgacgctggcactttacctctcgactcatcacagaaggtcagagaggcgcttacttgcgagctctccagagccgaatttgcggagagcctgggcctcaagccccaggacatgttcgtggaaagcatgttttccctggcagacaaagacggcaatggctacctatcctttcgtgagttcctggatatccttgttgtcttcatgaagggcagtcccgaggagaagagtagattgatgttcagaatgtacgacttcgacggcaacggcctcattagtaaagatgagtttatcaggatgttgcgctcatttatcgaaattagcaacaactgcctgtcaaaggcgcagttggctgaggtagtggagtcaatgtttcgagaatccggcttccaagacaaagaggaactaacatgggaggatttccactttatgctgagagatcacaatagcgagctgcggttcacacagttatgcgtgaaaggcgtggaggtccccgaggtcatcaaagacctgtgccgccgagctagttacattagtcaggacatgatctgcccctctcctagagtctcagctcgctgctctaggagcgatattgaaacagaattgaccccacagcgattacagtgcccaatggacactgatcctccccaggaaatccggcgcagatttggcaagaaagtgacttcatttcagcccctgctcttcacagaggcccatcgagagaagtttcagagaagctgtttacaccagaccgtgcagcaattcaagcggttcatcgaaaactaccgacgccacattggatgcgtggcagtgttctacgcaatcgccgggggtctgttccttgagagggcttactactacgccttcgccgcccaccacaccggaattaccgacactacccgggtgggaattatcctgagcaggggcaccgcagcctcgatctcattcatgttctcttacatcttgctcaccatgtgtcgtaatcttattacattcctcagagagacttttctcaaccgttatgtgccctttgacgcagctgtggacttccaccggttaatcgctagtactgctatagtactcaccgtacttcactctgtggggcacgtcgtgaacgtgtatctctttagtatctccccgttgtctgtcctgtcttgccttttcccaggtttgtttcatgacgacggctccgagcttccccaaaagtactactggtggttcttccagactgtcccagggctcactggcgttgttttgctgcttatcttagcaattatgtacgtgtttgcctctcatcactttcgacgtagatcattcagaggtttttggctcacccaccacttgtacatactgttgtacgtgcttctgattatccacgggtctttcgcactcatccagctgcctaggtttcatatcttctttttagtacctgccataatttatggtggggacaagctggtgtccctatcgagaaaaaaggtcgagatatcagtggtgaaagctgagctcctgccctctggcgtcacacacctccggtttcagcggccccagggattcgaatataagtcgggacaatgggtgcgtatcgcatgtttggcactgggcactactgaatatcacccatttacgctgacctcagcaccccatgaggacaccctgtcgcttcatatccgcgctgcaggcccatggactacccggttgcgggaaatttacagtgcccccacgggcgaccggtgtgcaagatatccaaagctgtacctcgacggccctttcggcgagggccaccaggaatggcacaaattcgaggtgagcgtgctagtcggagggggaatcggcgtaactcccttcgcttcaatcctcaaagacctggtgttcaagtcctccgtctcttgccaggttttctgcaagaaaatttacttcatctgggtgaccaggactcaaagacagttcgaatggctggccgacataatccgcgaggtggaggagaatgatcaccaggatttagtgtcagttcacatctatataacccagttagcagagaaattcgacctccgtactaccatgctatacatctgcgagcgacatttccaaaaggtgttgaaccgatccctcttcaccggccttaggtccattacgcacttcgggagacctcccttcgagccatttttcaattcactgcaggaggtgcaccctcaggtgaggaaaattggagttttctcctgcggccccccgggtatgaccaaaaacgtcgagaaggcatgtcagcttattaataggcaggaccgcacccatttctctcatcattacgagaatttctag

SEQ ID NO: 185894 - DNA, 4656 bp, synthetic construct
  misc_feature 1..4656: note = Description of Artificial Sequence: Synthetic coding sequence
  source 1..4656: mol_type = other DNA
atgggcttctgcctggccctggcctggaccctgctggtgggcgcctggacacccctaggtgcccagaacccaattagctgggaggttcagagattcgatggttggtacaacaatcttatggagcaccgttggggcagcaaagggtctagactacagcggctggtacctgcttcttatgcggacggcgtgtaccagcctttgggtgagcctcatcttcctaacccaagggatctcagtaataccatcagccgcgggcctgctggcttggcttccctccgcaatcggacggtgctgggggtcttttttggctatcatgtactgtctgatttggtgagcgtggagacccccggctgccctgctgagtttctcaatataagaatccctccaggagatcctatgtttgacccagaccaaagaggcgacgtagtcctgcccttccaaaggagcaggtgggaccccgaaactggacgatcgccctctaatccacgggaccccgctaatcaggtcacgggctggttggacgggtccgctatatatggaagctcgcactcatggtctgacgccctccgaagtttttcccgaggccagttggcatcaggaccagatccagccttcccccgagactcacagaacccacttctcatgtgggcagctcccgaccccgcgaccggacagaacgggccaaggggattgtatgccttcggcgccgagcgaggtaatcgggagcctttcctgcaggcacttgggcttttgtggtttcgctatcacaatctctgggcccaaaggctggctcgccagcaccctgactgggaagacgaggaactatttcaacatgccagaaagagagtgatagcaacttaccaaaacattgcagtgtatgaatggcttccttctttcttacagaaaacattaccggagtacaccggatacagaccatttctggacccctcgatcagcagtgagttcgtggcggcaagcgagcagttcctaagtactatggttcctcccggtgtctacatgagaaacgcctcttgccattttcagggggtgatcaatagaaacagcagcgtgtctcgcgctcttcgggtgtgtaactcatattggtcaagagagcatccgtcgctgcagagtgctgaagatgtggatgccctgcttctgggaatggcctcccagatcgctgaacgggaggatcatgtgctagtagaagatgtccgtgatttttggcccggccccttgaagttttctagaacagaccatttggctagctgtctgcagcgcgggagagacctcggcctgccctcttacaccaaggctagagccgccctgggcctttcaccaataacgagatggcaggatattaatcccgcgttgtcccggtcaaatgacacagttctagaggctactgctgcgctatataatcaggatctgagttggttggagctcctgccaggcggactactggaatctcatcgtgacccaggtccgctgttcagcactatcgttctagagcagttcgtgagactgagagatggagatcgctattggtttgagaacacccgcaacgggctgttttcgaagaaagagattgaggagataagaaacactacactgcaggacgttctcgtggcggtgatcaacattgacccctctgccctccagcctaacgtctttgtgtggcataaaggcgacccgtgcccccagcccagacagcttagcacggaggggctgcccgcatgcgcccctagcgttgtgagggattactttgaggggagcggctttggcttcggagtgacaataggcacattgtgctgctttcctcttgttagcctgctgagtgcctggattgtggccagactgcggatgaggaactttaaacgcctccagggacaggatagacagtcaattgtgtcagaaaagttggtgggggggatggaagcattagaatggcaagggcataaagagccatgccgccccgtgcttgtatacttgcaaccaggacagatccgagtggtggacgggcgcctgactgtgctgaggactatccaactccagcccccccagaaggtgaattttgttctgtcatccaacaggggacgccgcaccctgctcttgaagatcccaaaagagtatgacctggtgctgctgtttaacctggaggaagaaaggcaggcgctcgtggaaaatctccgaggggctctgaaagaaagtggtttgtccattcaggagtgggaactgagggagcaagagctgatgcgggccgccgttacccgagaacagcgccgccacctgctggagacgttctttagacacttatttagtcaggtcctggatattaatcaggccgacgcgggtactctgcccctggatagttctcagaaggttcgggaagctctgacctgtgaattgtccagagccgagttcgccgaatccctcggcttaaaaccccaagacatgttcgttgagagcatgttcagtttggccgacaaagatggtaacggatatctgtcattccgggagtttcttgacatactggtggtgtttatgaaaggatcaccggaagaaaaatccagactaatgtttcgtatgtacgacttcgatgggaacgggttgatcagcaaagacgagttcattcgtatgctccgaagctttattgagattagtaataattgtctgagcaaagcacagctggcggaggtcgtagaaagtatgtttagagagtccgggttccaggacaaagaggaattgacctgggaggatttccactttatgcttagggatcacaactctgaactgaggttcacccagctgtgcgtgaagggagtcgaggtacctgaggtgatcaaggatctatgcagaagagccagctatatcagccaggacatgatctgtccctcccctagagtctcagcccgctgctccaggtccgacattgaaactgaactcactccccagaggcttcagtgcccgatggatacagaccctccccaggaaataaggcggagatttggaaaaaaggttacgtctttccagcctctgttattcacagaagcccacagggagaaattccaaagaagttgcttgcaccagacagtgcaacagttcaaacgttttattgagaactatcgccggcatataggctgcgtagccgtcttttacgcaatagcaggcggcctgtttctggaacgggcttactactacgcctttgccgctcatcacaccggaataacagatacaactagggtcggtatcatcctgtctcgtggtacggcagcctctatttcttttatgttttcatatattctgctgaccatgtgccgtaatttaatcacttttcttcgcgagacgtttttgaacagatacgttccgttcgatgcggctgtcgattttcatcggttaatcgcaagtaccgcaattgtgctgacagtgctgcactccgtcggacatgtcgtcaacgtctatctgttctctatttctccactcagtgtcctgagctgtctgtttcccgggttgttccatgacgacggctctgagctgccccagaagtattattggtggtttttccagaccgtccccggccttacaggggtggtgctgctcctcattctcgctatcatgtacgtcttcgctagccaccacttcaggaggcgttcattccgcgggttctggctgacgcaccatctctatatcctgttatatgtgctgctgattattcatgggtcctttgctctgatccaactcccgaggttccacatctttttcctggtacctgctattatctatggaggcgacaagctggtctccctgagccgtaaaaaggttgagatcagcgtggtgaaagccgaactcttaccctcgggtgtgacacatctacgctttcagcggccacagggatttgagtacaagagcggtcagtgggttcggatcgcatgtttggcgcttgggaccacagagtaccatcctttcacgctcacttctgctcctcatgaggatacgctctctcttcatatacgcgctgcgggaccatggactacaagacttagagagatctatagcgcccccactggagatcggtgtgcaagatatcccaagctttacctagatgggccattcggggagggccaccaagagtggcacaaattcgaggtttccgtcctggtgggcggggggatcggcgttactccttttgcgagcatactgaaggatctggtgttcaaaagttctgtctcctgccaggtgttttgcaagaaaatctacttcatctgggtaactagaacccaacgccagtttgagtggctagccgacataattcgcgaggttgaagaaaatgaccaccaggaccttgtgagtgttcacatatatataacccaactagccgaaaaatttgatctccgaactaccatgctctacatttgcgaacggcatttccagaaggtgctgaatcgatcactgtttacaggtctccgcagcattacccactttggacgcccccccttcgaaccgttttttaatagtctgcaggaggttcatcctcaggtcagaaagattggggttttttcttgtggtcccccgggcatgaccaagaacgtggaaaaagcttgccaacttattaatcggcaggataggacacacttttcccaccattatgagaacttttag

SEQ ID NO: 185895 - DNA, 4656 bp, synthetic construct
  misc_feature 1..4656: note = Description of Artificial Sequence: Synthetic coding sequence
  source 1..4656: mol_type = other DNA
atgggcttctgcctggccctggcctggaccctgctggtgggcgcctggacgcccctgggggcccaaaatcctatctcctgggaggtgcaacggtttgatggatggtataacaacctaatggagcataggtggggcagtaagggatcacgcctgcaaaggctcgtacccgcctcatacgccgacggcgtctaccagccactaggggagccccacctgccaaaccctcgagacctttctaacacaatcagcaggggtcctgctggattagcctcactcagaaaccgaaccgtgctgggagtttttttcgggtatcacgttctgtcagacttggtttcagttgagacaccagggtgccctgccgaattcctaaacatacgaatcccacccggcgatcccatgtttgaccccgatcaaagaggggacgttgtgttgccgttccagcgctcccgctgggaccctgagactggcaggtcccctagcaatccgagggaccctgcaaatcaggttacagggtggctcgacggcagcgctatatacggctcatcccacagttggtcagatgcactgcgttcattctctcgggggcagctggcgtcagggccagaccccgcattcccaagggatagtcagaatcccttactgatgtgggccgctccggatccagctactggacagaacgggccgagagggttatacgcctttggggctgaaagaggcaaccgagagcccttcttgcaggccttgggtttattgtggttcagatatcataatctgtgggcccagcgtttggcaagacaacacccagactgggaggacgaagagctctttcagcatgcccgcaagcgggtgatagcaacctaccagaacattgcagtttatgaatggctgccctcatttttacagaagaccctccctgagtacaccggctacagacctttcttagacccttccatcagttccgaattcgtggccgctagtgagcaatttttgtcaaccatggtgcctcctggcgtgtatatgagaaacgcttcttgccactttcagggagtcataaacaggaattccagcgtgtctcgggcactgcgggtgtgtaacagctattggagccgagaacatccttcccttcaatccgcagaagacgtggatgccttgctccttggtatggcctcccaaatcgccgaaagggaagatcacgtgcttgttgaagatgtacgagacttctggcctgggcctcttaaattctccagaaccgaccatttggcaagttgcctccagcgcggaagagatctcggattaccttcatacacgaaagccagagccgcactagggctgagcccaatcacaagatggcaagacatcaatccggccctctcccgtagcaacgacacggtcctcgaggcgactgccgcgctctataatcaggacctgagctggctggagctgcttccgggggggctcctggagtctcaccgtgaccctggaccactcttttcgaccattgtgctcgagcagtttgttcgcttgcgtgacggagacagatactggttcgagaatacacgcaacgggttgttctccaagaaagagatcgaggaaatccgcaacacaactctgcaggacgttctggtggctgtcattaacattgacccatcagcgctgcagccaaacgtttttgtgtggcacaagggcgatccttgtccacagccacgccaactaagcacggagggcctgcctgcttgcgccccatccgtggtgcgtgattatttcgaaggttcgggttttgggttcggcgtaaccattggaacactgtgttgctttccgctggtgagcttattatccgcttggatcgtggctcgactgcgaatgcggaatttcaagcggctccaggggcaggatcgacagtccatcgtctccgaaaaactcgttggaggcatggaggcacttgagtggcaaggtcataaagagccctgtcgccctgtgctagtttacctgcagcctggccagattcgcgtggtggacgggcgcctgacagtcctgcggactatacagctgcagccccctcaaaaggtaaattttgtcctgtcttcaaataggggccgtcgtacccttctgctgaagatccccaaggagtacgatcttgtgctactctttaacctggaagaagaaaggcaagcccttgtggaaaatctccggggtgctctgaaagaatccggtttaagtatccaggagtgggaacttcgggagcaagagctaatgagagcagccgtcacccgggaacagcgtcgacacctcctggagactttttttcgtcatttgttttctcaagtcctggatatcaatcaggccgatgcaggtacccttcctcttgactctagtcagaaggtgagggaagccctaacgtgcgaacttagccgggccgaattcgcagaatcacttggtctgaaaccgcaggacatgttcgtggagagcatgttcagtttagcagataaagacgggaacggctacctgtctttcagagagttcttggatatcctcgtagtgttcatgaagggatcaccggaggagaagagccggcttatgttcagaatgtatgattttgacggaaacgggttgatcagtaaggacgaattcatccggatgctgagatcattcatcgaaatatccaacaactgtctctcgaaggcccagctggctgaggtggtcgaaagcatgtttcgagagtcaggattccaggataaggaagaacttacatgggaggactttcacttcatgcttagggaccataattcagagctgaggttcacccagctttgtgtgaagggggtcgaggtacccgaggtgattaaagatctatgtcgtagagcctcttatatttcccaggacatgatctgcccaagtcccagagtgtccgcacgctgtagccgatcagacatagagactgaattaacccctcagagactacagtgccccatggacacggatccaccccaggaaataaggcgccggtttggaaagaaagtgaccagtttccagccgttgctgttcacagaagcccatcgcgagaagttccagcggtcgtgtttgcaccagaccgtccaacagttcaagcggttcatcgagaactaccggcgacacattgggtgtgttgcggtcttctacgcgattgccgggggcctgtttctggagagagcgtactattacgctttcgcagcccatcatacaggaataacagacaccactcgcgtcggaattattttgtctcgaggcacggcggccagtatcagctttatgttcagctacattctgctgactatgtgtcggaatctgatcacctttctgagggagaccttcttgaataggtatgtgcccttcgatgctgccgttgattttcaccgtttgattgcgtccacagctattgtcttgactgtgctacatagtgtgggccatgtagtaaatgtctacctcttttccataagtccactcagcgttctttcgtgtcttttccctggtctgttccacgatgatggctctgagcttccccagaagtattactggtggttctttcagactgtgccaggactgaccggagttgttttgctgctcattctcgcaataatgtacgtatttgcttcacatcacttcaggcgaagaagcttccgtggattctggctaacacaccacctctatatcctcctctatgtgctgttgattatccatgggtcgttcgctctaatacagctccctaggtttcacatattctttctcgtacccgcgatcatctatggcggtgataagctggtctctctcagccgaaaaaaggttgagatttctgtcgtgaaggctgaactcctaccctctggggtaactcacctgagatttcagcgcccacaaggcttcgaatacaaatctgggcaatgggtccggatcgcatgcttggctctggggactacagagtatcatccctttacactcacctcagccccccacgaggacaccttatcattacacatccgtgcggctggtccttggaccacaaggctgcgcgaaatttattctgctccgactggtgaccggtgtgcacgctatcctaagttgtatctcgacgggccatttggtgagggccaccaagaatggcataaattcgaggtgagtgtgttggtgggcgggggaataggggttaccccttttgccagcatcctgaaagatctggtgtttaaaagcagcgtgagctgtcaggttttctgcaaaaagatttactttatatgggtcacgcgcacgcagcggcaatttgagtggttggctgacatcatacgcgaggtagaagagaatgaccaccaggacctggtcagcgtacatatttatataacacagcttgccgaaaaattcgatctacgtacgactatgctgtacatctgtgaaagacacttccaaaaggttctgaaccgtagtctgttcaccggcctgcggtccatcacccattttggccgtccaccgttcgagccattcttcaattctctacaggaggtacacccacaggtccgcaagatcggtgtattctcctgtggccctcctgggatgacaaaaaacgtggagaaggcttgccaactgattaacagacaggataggactcacttctctcaccactatgagaacttctag

SEQ ID NO: 185896 - DNA, 132 bp, synthetic construct
  misc_feature 1..132: note = Description of Artificial Sequence: Synthetic coding sequence
  source 1..132: mol_type = other DNA
atgggcttctgcctggccctggcctggaccctgctggtgggcgcctggactcctctaggtgcccagaacccaatatcctgggaagtgcaacgatttgacggatggtataacaacctgatggagcatagatag

SEQ ID NO: 185897 - DNA, 3594 bp, synthetic construct
  misc_feature 1..3594: note = Description of Artificial Sequence: Synthetic coding sequence
  source 1..3594: mol_type = other DNA
atgtggatgcactgctgctgggcctggcccccccggagccagagcgaaagaactatgtgctggctgaagatgtgcggcgtctctctcagactgagtctccaagttgtcaactcctggcccctcggtcgcgggtcagctggcctgcctgaaccggatttctggcccggacctcttaagttcagccggactgaccatctagcaagttgtttacagagaggaagagaccttgggctcccaagctacaccaaggctagagctgccctgggcctgtctccaattacacgctggcaggacataaaccctgctctgtcccggagcaatgatactgttctcgaggccactgctgctctctacaaccaggatctgtcctggctggaactgctgcccggggggctcctcgaaagccatagggacccagggccgcttttctctactattgtgctggagcaattcgttcggttgagagacggagaccgatactggttcgagaacacaagaaatgggttgttctctaagaaagaaatcgaggagatacgaaataccactctgcaggatgtcctggttgcggttattaacatcgacccttctgcactccagcccaatgtctttgtttggcataaaggcgatccctgcccacagccccgtcagctaagtactgaaggactcccggcctgtgccccgtctgtcgtacgagactactttgagggatccggctttgggtttggtgtcaccatcggcaccctgtgttgttttcccctggtgtctcttctgtctgcatggatcgttgcccggcttaggatgcgcaattttaaacgcctacaaggacaggatcgtcagagcattgtgtccgagaagttggtgggaggcatggaggcactggagtggcagggtcacaaagaaccatgccgccccgttttggtgtacctccaaccaggtcagatccgggtggtagacggtagactgacagttcttcggaccattcagctgcagcctccacagaaagtaaactttgtgctgtcctcgaacaggggacgacgtacccttcttcttaaaattcccaaggaatacgatctagtccttcttttcaacctagaagaggaacggcaggcactggtcgaaaatttgagaggagctctcaaggaatccggcctctccatacaagaatgggaactccgggagcaggaactgatgagggccgctgtgacccgcgagcagcgtcgccatctgctcgaaaccttctttagacatctttttagccaggtgctagacatcaaccaggccgacgcagggacgctgccattggatagcagccagaaggtgagagaggccttaacctgcgaactgtctcgtgccgaattcgccgaaagtctcggcttgaaaccgcaagacatgtttgtagagtcgatgttctctctggccgacaaggacggaaatggatacttgtctttccgggagtttcttgatattctggtagtattcatgaagggctcccccgaagaaaaatctcgcctcatgttccgtatgtatgatttcgatggaaatggcctgatttctaaggatgagtttattcggatgctgcgaagcttcatagagatctcaaacaattgcctgtcgaaagcccagttagctgaggttgtggaatctatgttccgtgagagcggattccaagacaaagaggaactgacttgggaggattttcattttatgctcagggatcataacagcgagctgaggtttacgcaactgtgtgttaaaggtgtcgaagtccctgaggtgatcaaggatttatgtcggcgggcttcctacatctctcaggacatgatctgtccatcaccaagagttagtgctcgttgctcaaggtccgatatcgagacagaactcactccgcagagactgcaatgtcctatggacaccgacccaccacaggagatccggcgtagatttggaaagaaagtcacctcctttcagcctctgctgtttaccgaagcccatagagagaaattccaaaggagttgcttacaccagactgtacaacaattcaagcggtttatcgagaattaccgtcggcacatcggctgcgtcgctgttttttatgccattgcaggcggactgtttctggaaagggcctactactatgcttttgccgcgcaccacaccgggataaccgacacaacacgcgtcggcattattttgagtagggggactgctgccagtatttcttttatgttcagttatattcttctaacaatgtgtaggaacctaatcacattcttgcgcgaaaccttcttgaatcgctacgtgccgtttgatgccgccgtcgactttcaccgtctaatcgctagcactgccatagttttgaccgttctccacagcgtcggacatgtggttaacgtataccttttctctatctcccctttgtcagttctctcatgcctgttccccggcctctttcatgatgatgggagtgagctgcctcagaaatactactggtggtttttccaaaccgtgcccggcctcactggcgtcgtgttgctgctgattttggctatcatgtatgtttttgccagccatcactttcgcagaaggagtttccggggcttctggctgactcatcatctgtacatcctgttgtacgtgctgctgattatccacggtagttttgccctgattcaactcccccgctttcacattttctttctggtgccagccatcatttacgggggtgacaaactggtctccttgagccgcaagaaagtggagatcagtgtggtaaaagccgaactgttgccctcaggagttacgcacctgaggtttcaaagaccccagggtttcgagtacaaaagtgggcaatgggtacggattgcctgtctcgcgctaggcacaacagaatatcacccctttacgctgacaagcgcaccccatgaagatacgctgagtctgcacatccgagccgctggcccctggactactcgcctgcgcgaaatctactctgctcctaccggagatcgttgcgcgaggtatcctaagctctacctggacggcccttttggggaaggacatcaggagtggcacaagtttgaggtgtcggttttggttgggggcggaataggagtaacacccttcgcctccatcctgaaggatctggtgtttaagtcttctgtcagttgtcaggttttctgtaagaaaatctattttatatgggtgactcgaacccagcgccaattcgagtggcttgcagatattatcagggaagtcgaggagaatgaccaccaggacctcgtttccgtgcatatatatatcacccaactggcggaaaaattcgacctacggaccaccatgttgtacatttgtgaacgccacttccagaaggtcctgaaccgatctttattcaccggcttgcggagtatcacacattttggacgcccgccctttgaacccttttttaatagtcttcaagaggtccacccccaggtcaggaagataggagtgttcagttgcgggccaccaggaatgaccaagaatgtggagaaggcctgccagttgatcaacagacaggacagaacccacttcagtcaccattacgagaatttctag

SEQ ID NO: 185898 - DNA, 4647 bp, synthetic construct
  misc_feature 1..4647: note = Description of Artificial Sequence: Synthetic coding sequence
  source 1..4647: mol_type = other DNA
atgctgcgggcccggcccgaggccctgatgctgctgggcgccctgttaactggctccctgggtccctcaggtaaccaagatgccctatccttaccttgggaggtacaacgatatgatggctggtttaacaaccttcgccatcacgaacgcggcgccgtcggctgtcgccttcaacggcgcgttcctgctaattatgccgacggagtctaccaagctctcgaagagccccaactccccaatccccgccgtctgtccaatgctgccacacgggggattgcagggctcccctccctccacaatcgcaccgtattgggcgttttctttgggtaccacgtgttgagtgatgttgttagtgtggagacccctggctgccctgcagagttcctgaacatccgcattccaccaggggaccccgtcttcgaccctgatcagcgcggggacgtggtcctgccttttcagaggagtcgctgggacccagaaactggccggtccccgtctaacccccgggatctggctaatcaggtgaccggatggctggacggttccgcaatctatggcagctcccattcatggtctgacgctctgagaagtttcagcggtggccagttagcatctggaccagacccagccttcccacgcgattcccaaaatccccttctgatgtgggcggccccagaccccgccacaggccagaacggcccccggggtctgtacgcatttggcgccgagagagggaatcgggaaccttttctccaagcactcgggttgctctggttccgctaccacaatttgtgggcccagcgactggccaggcagcaccctgattgggaagatgaagagttgttccagcacgccaggaagagggtaatcgccacctatcagaacattgcagtttatgagtggctcccgtctttcctccagaaaaccctgcctgagtacactggctaccgacctttcttggacccaagcatttctccagagttcgtggtggcctcagagcagttcttttcaaccatggtcccacccggagtgtacatgcgcaatgcaagttgccactttaggaaggtactcaacaaaggatttcagtcctcacaggctttgcgagtgtgcaataactattggatcagagagaaccctaatctgaattccacacaggaggttaatgagctcctcctcggcatggcctcgcagatctcagagctagaggataacattgttgtggaagatctcagggactactggccgggccctggaaaattcagcaggaccgattacgtggcctcttcaatccagcgaggtagggatatgggactgccatcctacagccaggctctgttggcattcggcctcgatatccctagaaactggtctgatctgaatcctaacgtggaccctcaggttctggaagcaactgcggctctctataatcaggacctctctcagctagagcttctgttgggcggattgctcgaatctcatggggaccccggccctctgtttagcgctatcgtccttgaccagtttgtccggctgcgcgacggagatagatactggttcgagaacacacggaatggattgtttagcaaaaaggaaattgaggacatcagaaacactacattgcgcgacgtgttagtcgctgttatcaacattgacccgtccgccctgcagcctaatgtcttcgtctggcacaagggcgcaccatgcccccagcccaaacagcttaccacggacgggctgccccagtgcgctcccctgactgttctcgatttctttgaaggctcttccccaggattcgcaatcacaatcatcgctctctgctgcctgcccttagtgagcctgttgctgagcggtgtggtcgcttatttccgcggacgtgagcataaaaaactccaaaaaaagctcaaggaatcagtgaagaaggaggcggccaaagacggggtccctgcgatggagtggccagggcctaaagaaagaagttcacctatcattattcagcttctgtctgatcggtgtctgcaggtattaaacagacatcttaccgtgctgagagtagttcagctgcagcctttacagcaggttaaccttattctttcaaataaccgtggatgcagaactctattgctgaaaatacccaaggaatatgatctcgttttgctcttttcctcggaagaggaacgtggtgcatttgttcagcagttatgggacttctgcgtccgttgggccctgggcctgcacgttgccgagatgtccgagaaagaacttttccgcaaagcagttacaaagcagcaacgcgagcggatccttgagattttcttccggcatctcttcgctcaagtccttgacataaaccaagctgacgccggcactcttcctctcgattcttctcagaaggtaagggaggccctgacctgcgagctgtctcgagcagagttcgctgagagcttaggcctgaagcctcaggatatgttcgtcgagtcgatgttctcattggccgataaagatggaaatgggtacctgtcgtttcgagaattccttgatatactggtggtcttcatgaagggttcccctgaggataaaagtcggctgatgttcacaatgtatgaccttgacgagaacggatttctatccaaggacgagttttttaccatgatgcggagttttatcgaaattagcaataactgccttagcaaagcccagctggctgaagttgtagagtccatgttccgggagagcgggttccaagataaagaggaactcacatgggaggacttccattttatgctgagggaccacgattccgagctgcggttcacccagctgtgtgtgaaggggggtggtggaggggggaacggcattagagatatttttaagcagaacatatcctgccgggtgagttttatcactcgtacccccggggaacgctcgcaccctcaaggcttgggaccacctgcacctgaagcacccgaactcggaggacctgggctaaagaagcgcttcggaaaaaaggcagccgtccctacacctagactttacacagaagccctgcaggaaaaaatgcaacgcgggttcttagcccagaagctacaacagtataagcgcttcgtcgaaaattaccggcggcacatcgtctgcgtggctatcttcagtgcgatctgcgttggtgtattcgctgaccgggcatactactacgggtttgcctcgcccccatctgatatcgcccaaacgacactggtaggtatcatcttgtcccgcgggactgctgctagcgtgagcttcatgttcagttacattttactgaccatgtgcagaaatctgattacttttctgagagagacctttcttaacaggtacgtgccattcgatgctgctgtggattttcatcggtggatcgccatggctgctgtggtactggcaatcctgcattcagcagggcacgccgtgaatgtatacatttttagcgtgtcccctctgagtcttttggcctgcatcttcccaaatgttttcgttaacgatggtagtaagctgcctcagaaattttattggtggtttttccagacagtgccagggatgacaggagtcttgctgcttttggtactggcaatcatgtatgtatttgcctcccaccatttcagacgcagatcttttcggggtttctggctgacacatcacttgtatatactgctttatgcgctgctgattatccatggcagctacgccctcattcagctccctaccttccacatttactttctggtgcccgctatcatctacggaggggataagctagtctctctcagccgcaagaaagttgagatttccgtcgtcaaggcagaactgcttccttcgggagtgacgtatttacaattccagcggccacaggggtttgaatacaaatccggacaatgggtgcgtatcgcatgcttggcgctggggaccaccgaataccatccattcacactcacgtcagcaccccacgaggacacactctctctgcacataagagccgtgggcccatggacaacccgcttgcgagagatttattctagcccgaaaggtaatggctgcgcgggctatccaaagctatatctcgacggcccttttggcgaggggcatcaggagtggcataaatttgaggtaagtgtgctggtgggcggggggatcggagtcacccccttcgcaagcatcctaaaagatcttgtttttaaatcctcacttggatcacagatgctatgcaaaaagatctatttcatctgggtgacccgcactcagcggcagtttgagtggcttgctgatattattcaggaagtggaggagaacgatcaccaggatctagtctccgtacatatctatgtgactcagctcgcagagaagtttgatctccggaccacaatgttgtacatctgcgagaggcatttccagaaggttctgaacagaagcctgtttaccggactacgctctatcacacacttcggtcgtcctccctttgagcctttcttcaactctctacaggaagtgcacccccaagttcgcaaaatcggcgtattttcctgcggcccccctggcatgacaaaaaacgtggagaaagcctgccaattggtcaacagacaggaccgggcccactttatgcaccattatgaaaatttctag

SEQ ID NO: 185899 - DNA, 1452 bp, synthetic construct
  misc_feature 1..1452: note = Description of Artificial Sequence: Synthetic coding sequence
  source 1..1452: mol_type = other DNA
atggccaccctgggccacaccttccccttctacgccggccccaagcccacatttcctatggatactacgctggcttctatcatcatgatttttttaacagctttagccaccttcatagttatcctccccggcatccgtgggaagacccgactgttttggttattgcgggtcgtcacttctctcttcatcggagctgccatcctagcagtgaatttctccagtgagtggagcgttggccaggtgtcaaccaacacatcctataaggctttttcctcagagtggatatccgctgacatcggattacaggtcggactcggcggcgtcaacattactctcaccggcactcccgtccaacaactgaacgaaacgatcaattacaacgaggagttcacttggcggctaggagagaattacgccgaggaatatgctaaagctctcgaaaagggcctccctgaccccgtgctttacctggctgagaagttcactccaagaagcccttgtggcttgtaccgccagtacaggctggccgggcactatacaagcgccatgctgtgggtggccttcctgtgctggctcttggccaatgtgatgctatccatgcctgtattggtgtatggaggatatatgttgttggcaaccggcatcttccagctgctggcgctcctgtttttctctatggcaaccagcctgacttcgccctgccccttacatctgggtgcctcggtcctgcacacccaccatggcccagcattttggatcaccctgactacggggctgctctgtgtgctcttgggcctcgccatggccgtggcgcaccgtatgcagcctcatcgtctgaaggcatttttcaatcagagcgtagacgaggaccccatgctggaatggtcgccggaggaaggtggcctgttgagccctcggtatagaagcatggcagattcccccaagtcacaagatatacctctgtccgaggcatcaagcacaaaagcctactacaggccgcggagactgtctttagttcctgccgacgtgcgcggccttgctcccgcggcgctttcagcactcccaggcgccctattggcccaggcgtggcgggccctgttacctggcctccgctgccctaaagctggcaaggaatctagactgggacctccacactctccttggagatttggacctgagggatgtgaggagcgttgggcagaacatactggggattcacccagacccttgcgcggccggggcacgggcagactttggcggtggggctccaaagagcgacgggcctgcggggttcgagctatgttgcccaggcttgtgtccaactccggcttgaagcgcccaagttgcttagacctgcccaagtgctgggactataggcgcgatgctcgcgctttttttcatctgctagagccaacaccctgcgttacaagccggcacacacccttgatctag

SEQ ID NO: 185900 - DNA, 1317 bp, synthetic construct
  misc_feature 1..1317: note = Description of Artificial Sequence: Synthetic coding sequence
  source 1..1317: mol_type = other DNA
atggccaccctgggccacaccttccccttctacgccggccccaagcctacctttcccatggacacgacacttgcttctatcatcatgatttttcttacagcactggccaccttcattgtgatactgccagggattcgaggcaagacgcgactcttctggcttctcagagtcgttacttcgctgttcattggcgcagcaatcctggggactcccgtccagcagctgaatgagaccattaactacaatgaggaatttacttggcggcttggcgagaattacgcagaggagtacgcaaaagcgctcgagaaagggttgccagatccagtcctctatctggcagaaaagttcacacctaggtccccctgcggcctgtatcggcagtaccggctagctgggcactatacttcagcaatgctgtgggtggcgtttctatgttggctgttggccaacgtgatgctctctatgcctgtcctcgtctatggagggtacatgctcctggccaccggcatctttcaactgctcgctttgttattcttctccatggctacctccctcactagtccctgtcccttgcacctcggagcttcagtgctacatactcaccatggccccgcattctggattaccttgacaaccggtttgttgtgcgtacttctggggctggcaatggctgtggcccacagaatgcagccccaccggctaaaggcctttttcaatcagtccgtcgatgaggatcctatgttggaatggagtccagaggagggcggactgctgtcacctaggtaccgctcaatggccgattcgcctaagagccaagacataccattgtctgaagcctcttctactaaggcctactataggcctcgaaggctctctctggtaccagctgatgttaggggcctcgcgcctgcagcactgagtgccttgcccggagctctcctcgcacaggcttggagggcactcctccccggtttgcggtgtcccaaagcagggaaagaaagtcgtctcggaccacctcatagcccttggcgctttggcccggaaggctgcgaggaacgctgggccgagcacacaggtgactccccacgccccttacgaggacgaggcacagggagactgtggagatgggggtccaaggagcgacgtgcctgcggggtgcgggctatgttgccgcggttagtctcaaattccggactgaagagaccgtcttgcctggatttacctaaatgctgggactatcgccgggatgcaagagctttcttccacctgctagaacccacgccttgcgtcactagtcggcatacgcccttaatctag

SEQ ID NO: 185901 - DNA, 234 bp, synthetic construct
  misc_feature 1..234: note = Description of Artificial Sequence: Synthetic coding sequence
  source 1..234: mol_type = other DNA
atggccaccctgggccacaccttccccttctacgccggccccaagccaacctttcccatggatacgaccctggcatctatcatcatgatcttcctgacagctttggcaacgttcatcgtaattttgccaggtatccggggaaaaacacggctgttctggttgctaagagttgtgactagcctattcataggtgctgctatcctgggcacccctgtgcagcagctgaacgagtag

SEQ ID NO: 185902 - DNA, 219 bp, synthetic construct
  misc_feature 1..219: note = Description of Artificial Sequence: Synthetic coding sequence
  source 1..219: mol_type = other DNA
atggccaccctgggccacaccttccccttctacgccggccccaagcccacttttcctatggataccaccctggcgtccatcatcatgatcttcctgacagctctggctacattcatcgtgatcctgcccggcatccgtgggaaaacccgcctgttttggctcctgagggtggttacgagcctgtttatcggcgctgctatacttgctgtgaacttctag

SEQ ID NO: 185903 - DNA, 897 bp, synthetic construct
  misc_feature 1..897: note = Description of Artificial Sequence: Synthetic coding sequence
  source 1..897: mol_type = other DNA
atggccaccctgggccacaccttccccttctacgccggccccaagccaacgtttcccatggataccaccctcgccagcatcatcatgatttttttgacggccctggcaactttcattgtgatcttgccggggatcaggggaaaaactcgcctgttctggcttttgagggtcgtaacctccttattcattggtgctgccatactgggtactcctgtccagcagctcaacgaaacgatcaattacaacgaggagtttacctggagattgggtgaaaattatgcagaggaatacgccaaagccctggagaaagggctgcccgatccagtcctatatctggctgagaagttcactccccgatcaccttgcggtctgtatcggcaataccgtctcgccggtcactacacttccgccatgctatgggtagcgttcctttgctggttactggcgaatgtgatgttgtccatgcctgtgctggtgtacggtgggtacatgctgctggccaccgggatattccagctgttggctttgctgttcttttccatggccacctctctgacttctccatgccccctgcacctgggcgcatcagtgctgcacactcaccatgggcctgccttctggattaccctaaccactggcctactttgcgtcctactcggactggccatggctgtcgctcatcggatgcagcctcaccggctaaaagccttctttaaccagagcgtggatgaagacccaatgctcgaatggagtccggaggaaggcgggctcctgtctccccgataccggtccatggccgatagccccaaatctcaggacatcccgctgagcgaggcttcaagcaccaaagcatactgcaaagaggcacacccgaaagacccagattgtgcactgtag

SEQ ID NO: 185904 - DNA, 42 bp, synthetic construct; identical to SEQ ID NO: 79710
  misc_feature 1..42: note = Description of Artificial Sequence: Synthetic coding sequence
  source 1..42: mol_type = other DNA

SEQ ID NO: 185905 - DNA, 897 bp, synthetic construct
  misc_feature 1..897: note = Description of Artificial Sequence: Synthetic coding sequence
  source 1..897: mol_type = other DNA
atggccaccctgggccacaccttccccttctacgccggccccaagccaacattccccatggacactacattggcaagtataataatgatctttcttacagccctggccactttcattgtgatccttcccggtattcgaggtaaaacaaggctgttttggctgctgcgtgtggtgacgtcgctgttcattggagctgctatattaggcacacctgtccagcagttaaacgaaacaatcaattataacgaggagttcacttggaggctgggagaaaattatgcagaagaatatgctaaggccttggaaaagggtctacctgacccagtcctctacctagccgagaagtttaccccaagatctccctgtggtctttacagacagtataggctggcaggccattatacgtccgcgatgttatgggtagctttcttatgttggcttttagcgaacgtgatgctgagcatgccagttcttgtgtacggtggatatatgctcttggcaactggtatctttcagctgctggctttgctttttttttcgatggctacctccctgacctcgccctgccctttgcacctgggtgcttcagtgctccatacacaccacggccctgcattctggatcacgttgactactggcctgctctgcgttctactcggtctcgctatggcggtggcccacaggatgcagccccatcggttgaaagcattctttaatcagtctgttgacgaagacccaatgctggaatggtcccctgaggaaggaggactactgtctccacggtatagatcaatggccgatagcccgaagagccaggatatccccttaagtgaagcatctagtactaaagcctactgcaaagaggcacatcccaaagaccccgactgcgcactctag

SEQ ID NO: 185906 - DNA, 1452 bp, synthetic construct
  misc_feature 1..1452: note = Description of Artificial Sequence: Synthetic coding sequence
  source 1..1452: mol_type = other DNA
atggccaccctgggccacaccttccccttctacgccggccccaagcctaccttccccatggatacgacactggctagcattattatgatctttctaactgctttagccacatttatcgtcatactcccaggtatcagagggaaaacgcggctgttctggctgttacgggtggtgacatctctgttcataggagctgccatcctggcagttaacttcagcagtgaatggagcgttggccaggtaagtacgaataccagctacaaggcattcagctcagagtggatttccgcagatattgggctccaggtggggctgggcggggtgaatatcaccctgactggcactcctgttcagcaactgaacgagacaatcaattacaacgaggagtttacatggcgccttggagagaattacgcagaagagtacgccaaagctcttgagaaggggctcccagatcccgtgttgtatcttgcagaaaagttcacacccaggtctccgtgcggtctctatagacaatacagactggccgggcattacacatctgccatgctttgggtagcttttctgtgttggctactggccaatgtgatgctctccatgccagtattggtctatgggggctatatgctcctggctaccggtatctttcaactgttagcactgttatttttcagcatggcgacctcacttacgagcccatgcccattgcatctcggggcaagtgtcttgcatacacatcacggcccagctttttggatcacactgactaccggcttactgtgcgtcctgctgggcttggcgatggccgtcgcacatcgaatgcagcctcatcggttgaaggccttctttaatcagagcgttgatgaggatcccatgttagagtggtctcctgaggaaggcggactcctgtctccccggtacaggagtatggctgacagtcctaaatctcaagatattcccctgtctgaggcctcttcaaccaaagcatactatcgccctcgacgattgagtctcgtgcccgcagatgtcaggggtctggcaccagcggccctgtccgccttgcctggagcgctgctcgcccaggcatggcgtgccttgctgccaggcctgcgctgccctaaagccgggaaggagagcagactaggtcctccccactccccttggagattcggacccgaaggatgcgaagaaagatgggctgagcacacgggcgactcaccacgcccactgcgcggcagggggaccggacggttgtggcgctgggggtcaaaggagaggagagcttgtggagtgcgggctatgctgcctcgactagtatctaattctggcctgaaacgtcccagctgcctggacctgccaaagtgctgggattacaggcgagacgccagagccttctttcacctcttggagcccaccccttgtgttacttcccgtcataccccattaatttag

SEQ ID NO: 185907 - DNA, 219 bp, synthetic construct
  misc_feature 1..219: note = Description of Artificial Sequence: Synthetic coding sequence
  source 1..219: mol_type = other DNA
atggccaccctgggccacaccttccccttctacgccggccccaagccaacctttcccatggatactaccctggcgagtatcattatgatctttctcacagctctggcaacctttattgtaattcttcctggaatccgtgggaaaacaagacttttctggctgttacgcgtcgtgacttccctgtttatcggcgctgcaatccttgggacccccgtgtag

SEQ ID NO: 185908 - DNA, 51 bp, synthetic construct
  misc_feature 1..51: note = Description of Artificial Sequence: Synthetic coding sequence
  source 1..51: mol_type = other DNA
atggccaccctgggccacaccttccccttctacgccggccccaagccatag

SEQ ID NO: 185909 - DNA, 366 bp, synthetic construct
  misc_feature 1..366: note = Description of Artificial Sequence: Synthetic coding sequence
  source 1..366: mol_type = other DNA
atggccaccctgggccacaccttccccttctacgccggccccaagcccacgtttcctatggacaccactctcgcgtctatcattatgattttccttactgctttagccactttcatcgtgatactgccgggcatccgcgggaaaaccaggctgttctggctccttcgggtggttacaagcctgttcataggtgccgctattctagccgtgaatttctcatctgaatggtcagtgggccaggtgagcaccaatacttcttacaaagctttctcttcggaatggatcagtgctgatattggactccaggtagggttggggggcgtcaatatcactctgacagggactccagtgcagcagctgaattag

SEQ ID NO: 185910 - DNA, 1032 bp, synthetic construct
  misc_feature 1..1032: note = Description of Artificial Sequence: Synthetic coding sequence
  source 1..1032: mol_type = other DNA
atggccaccctgggccacaccttccccttctacgccggccccaagcccactttcccaatggacaccacactggcatccatcatcatgatctttctcacagcgctggccacattcatcgttatccttcctggcatcaggggaaaaaccaggttgttctggctgttaagggtagttacttccttgtttatcggcgccgcaatcttggctgtcaattttagttccgaatggagcgtgggtcaggtttcgaccaacacctcttacaaggcctttagtagcgagtggatctcggctgatatcggtcttcaggttggccttggtggagtcaatatcaccttgaccggcacccctgtgcaacagctcaatgaaaccatcaactataatgaggaattcacatggaggctgggggaaaattacgccgaggaatatgctaaggctttagagaaaggactccccgatcccgtcctgtatctggctgagaagtttaccccccgaagcccctgtggcctctaccggcagtaccgactggctggccattacacgagcgctatgctgtgggtcgcgttcctgtgttggctgcttgccaatgtgatgctttccatgccagtcttagtgtacgggggctacatgctgctggctaccggaatttttcaattgctggccctactgttcttttcaatggctacctccttgacttcaccttgtccccttcatctgggcgcctccgtgttacacacccatcacggcccggctttctggatcactctcacaaccggcctgttgtgtgtcctgttaggattggctatggcagtggctcatcgcatgcagccacaccgcctcaaagcttttttcaaccagtcagtagatgaagaccccatgctggagtggtcacctgaagaggggggcctcttgtctccaagataccgatccatggcggacagccccaaatcccaggacatccccctcagtgaagcatcttccacaaaggcatactgcaaggaagcccatcccaaagacccagactgcgcactttag

SEQ ID NO: 185911 - DNA, 963 bp, synthetic construct
  misc_feature 1..963: note = Description of Artificial Sequence: Synthetic coding sequence
  source 1..963: mol_type = other DNA
atgaccctgtggaacggcgtgctgcccttctacccccagccccggcacgccgctggcttttctgtgccccttctcatagtgatccttgtgttcttggctctggccgctagcttcttactgattcttccagggatccggggacacagccgatggttctggctggttagggtcttactttcactgttcattggggctgagatcgtggcagtacacttttccgccgagtggttcgtcgggactgtgaacacaaacacaagctataaagccttctctgctgcccgagtgactgcgcgagtccggctgctggtcggtctggaggggatcaatattaccctgactggtacaccggtgcaccaactgaatgagacaattgactacaacgaacaattcacctggcgccttaaggagaattatgccgccgagtacgctaacgcccttgagaagggcctgccggaccccgtcctgtatctcgcagagaaatttacacccagcagcccctgcggcctgtatcaccagtaccacctggcggggcactatgcaagcgccaccctgtgggtagctttttgtttttggctgttgtctaacgtgcttctcagcacccctgccccattgtatggcggcctggctctgctgactacgggggccttcgctctctttggggtttttgctctcgcttcaatcagctccgtgcctctgtgcccactgagactcgggtcatcggccttaactacacaatacggtgccgctttctgggtgacccttgctactggcgtgctgtgtctatttctggggggggctgtggtctctctccaatacgtacgtccaagcgctctacgcaccctgctggaccagagtgcaaaggattgtagtcaggagcgtggcgggagcccactgatcctcggggacccattgcacaagcaggccgctctccccgatctgaaatgtattaccacaaatctgtag

SEQ ID NO: 185912 - DNA, 1767 bp, synthetic construct
  misc_feature 1..1767: note = Description of Artificial Sequence: Synthetic coding sequence
  source 1..1767: mol_type = other DNA
atggagggcgacggcgtgccctggggcagcgagcccgtgagcggccccggtcctggtgggggggggatgatccgcgagctctgccgaggatttggcagatataggcgttatctaggccggctgagacaaaatctcagggagacacaaaagttcttccgcgacattaagtgcagtcataaccatacttgtttgagcagcctcaccggcggtggtggggcagagagggggccagccggagacgtagcggagacaggtcttcaggctgggcaactgagctgtatctcctttccacccaaagaggagaaatatctgcagcagatcgttgactgtctcccatgcatcctcatcctgggtcaggactgcaatgttaagtgccagcttcttaacttacttttgggggtgcaagtgcttcccaccaccaagctgggctctgaagaatcatgcaagcttcggcgattgcggtttacgtatgggacacagacccgcgtatcactggctcttccaggccagtatgagttggtgcacaccctggttgctcaccagggcaattgggagacgatccccgaagaagatctggaggtgcaggagaacaacgaggatgccgcacacgtgcttgccgaattagaagtgactatgcatcacgccctgctgcaggaggtcgacgtagttgtggccccatgtcaggggctccgccccaccgtcgatgtcctgggagatctggtcaacgacttcctgccggtgatcacctatgccttgcacaaggatgagttatctgagagagatgagcaagagctacaggagattagaaaatacttttcttttccagtctttttttttaaggtgcccaagcttggcagtgagatcattgactccagcacacgcaggatggaatctgagaggagcccactgtaccgtcaattaatcgacctcgggtacctttcaagtagccactggaactgcggcgctccgggtcaggacactaaggctcagtcaatgctggtagaacagtctgagaagctgaggcacctgtctaccttcagccatcaggtgttgcaaaccagattagtggacgcagccaaggcgctgaacctcgtacattgccactgcctggacatcttcattaaccaggctttcgacatgcaaagagaccttcaaatcactcccaaacgcctcgagtacacaaggaagaaggaaaatgagctgtacgaaagcctgatgaacatcgccaaccgaaaacaggaggagatgaaggatatgatagtggagacactaaatacaatgaaggaggaactcttggatgacgccacaaatatggagttcaaagacgtcattgtacctgaaaacggagagccaatcacagatctcgggttttgcaagcccgaggctatgatgagcggtagtattgtggggacacctatccacatggctccagagctattcacaggcaagtacgataactctgtggacgtttacgcctttgggatcctgttttggtacatctgttctggaagcgtcaagctacccgaggccttcgaaaggtgtgcgagcaaagatcacttgtggaataatgtgagacgtggcgcgagacccgagcggctccccgtgttcgacgaagagtgttggcagctaatggaagcatgttgggacggggaccccctcaagcgcccacttctcgggatcgtgcaacccatgcttcaggggatcatgaacaggctctgcaagtctaatagtgagcagccgaaccgtggacttgacgactcgacctag

SEQ ID NO: 185913 - DNA, 2655 bp, synthetic construct
  misc_feature 1..2655: note = Description of Artificial Sequence: Synthetic coding sequence
  source 1..2655: mol_type = other DNA
atggagggcgacggcgtgccctggggcagcgagcccgtgagcggccccggcccggggggtggcggcatgattagagaactgtgtagggggttcggtcgataccggcgttatctcggcaggcttcgccaaaacctcagagagactcagaagttctttcgcgatataaagtgctcccacaaccatacatgcctctccagcctaactgggggagggggcgccgagagagggcccgcgggggatgtggccgagaccggactgcaggccggacagctgtcttgtatctctttcccccctaaagaggagaaatacctgcagcagattgttgactgccttccatgtatactcattctgggacaagactgtaatgtcaaatgccagctgctgaatctgttgctgggggttcaggtcttgccgacaacgaagctggggagtgaggaaagctgtaaactgcgccgactgagatttacctatggtacccagacccgcgtcagtctggcccttcctgggcagtatgagctggtccacacactcgtcgcccaccaaggtaattgggaaactatccctgaagaagatctggaggtccaggaaaataacgaggacgccgcccacgtcctggctgaactggaggtgaccatgcaccacgccctgcttcaggaggtagacgtagttgtggctccgtgccaagggctgcgtccgacagttgacgtcctgggtgacctcgtcaacgatttcctgcccgtgattacctacgcactgcataaggacgagctgagcgaacgtgacgagcaggagctgcaggagattagaaagtacttctcctttccagtgtttttttttaaagtgcctaaattgggctctgaaatcattgattcaagtacgcggcggatggagtccgaacggtctccgctataccgtcagctgatagacctcggatatctgtcatccagccactggaattgtggggcccctggccaggatactaaggctcaatcaatgctggtggagcaaagcgagaaactccgccacctgtctacgttctcgcatcaagtgctgcagacccgcctggtggatgcggcaaaggcgcttaacttggtgcactgccattgcctggatattttcatcaatcaagccttcgatatgcaacgggacttacagattacaccgaaacgcctcgagtacactcgcaagaaggagaatgagctctacgaaagtttaatgaatatcgcgaatcggaagcaggaggagatgaaagatatgatcgtggaaactctgaacactatgaaagaagagctcctggatgacgcaacaaatatggagttcaaagatgtgattgtccctgaaaacggggaacctgttggcacccgtgagatcaaatgctgcataagacagattcaggagctgatcatttctcgactgaaccaggccgttgctaacaaactgatctcctcagtcgactacctgagggaatctttcgtgggtactttagaaagatgtttgcagtcccttgaaaaatcacaggacgtctccgttcatattacttctaactacctgaagcagattctgaatgccgcttaccatgtggaagtgacatttcactcgggttctagcgttactcggatgctttgggagcagatcaagcagataattcagagaattacctgggtctccccaccagcaattaccttggagtggaagaggaaagtggcacaggaggccatcgaatctctctccgcaagcaagctcgcaaagagcatctgcagtcagttccgtacccggctcaacagttctcacgaggccttcgccgcttccctgcgacagctcgaagcagggcactctggccgtctggagaagaccgaggacctctggttgcgggtgcgcaaggaccatgctccgaggttggcccggttgagtttggagagctgcagtcttcaggatgtcctcctccaccgaaagccgaagctggggcaggagctggggaggggccagtacggtgtggtctatctgtgtgacaactggggagggcatttcccttgcgccctgaaaagtgtcgtgccgccagacgagaaacactggaatgatctcgccctggagttccactatatgaggagtttacctaaacacgagcgacttgtcgatctgcatggcagcgtaatcgattataattacggaggcggatccagcatcgccgttctgttaatcatggagcggctgcatagggatctgtatactggtttgaaagccggcttgactctcgagacccgcctgcagatcgcattagatgttgtagaaggaattaggttcctccacagccagggactcgtacatcgggacatcaagctcaaaaatgtcctcttggataagcagaatagggccaagataacggacctcggattttgcaagccggaggctatgatgagtggttcaatcgtgggcacaccgatccacatggctcctgaactttttacgggagctcgtccagagcgcctccctgtttttgatgaagaatgttggcagttgatggaagcctgctgggacggcgacccgctgaaacggccgctgctgggtatagtccaacctatgttgcagggtattatgaaccgcctgtgcaaaagcaatagtgagcaacccaaccgcggcttagatgactcaacttag

SEQ ID NO: 185914 - DNA, 2790 bp, synthetic construct
  misc_feature 1..2790: note = Description of Artificial Sequence: Synthetic coding sequence
  source 1..2790: mol_type = other DNA
atggagggcgacggcgtgccctggggcagcgagcccgtgagcggccctggaccaggaggcggaggcatgatacgggaactgtgccgaggattcggcagatacagacggtacctgggacggctgcgccagaatctccgcgagacacagaagttctttcgggatatcaagtgctctcacaaccatacctgtctctcgagtctgactggggggggaggggctgagcgaggacccgcgggcgatgtagccgagacaggccttcaagcgggccagctcagctgcattagcttccccccaaaggaagagaaatacttgcagcaaatcgtagattgtctgccctgcattctgatactgggtcaggactgcaatgtcaagtgccagcttctgaatcttctgctgggagtgcaggtacttcccactacgaaactggggtccgaagagtcctgcaagctacgccgccttagattcacttacggcactcagacaagggtgagcttggcactgccaggacagtacgagctcgttcatacattggtggctcaccaggggaactgggaaacaatccccgaggaggacctggaggtgcaagagaacaacgaggacgctgctcacgtcctggccgaattggaagttaccatgcatcacgccttgctgcaggaggtggacgtcgtggttgctccctgtcaaggcctgcgtccaacagttgacgtgctgggcgacctggtgaatgactttcttccagtcattacctatgcgttgcataaggatgagctcagcgaacgcgatgagcaggaattgcaggagataaggaaatacttttcgtttccagttttcttcttcaaggtgccaaaattaggaagcgagataatagactcaagtaccagacggatggagtccgagaggtcccctctgtaccggcagttgattgatcttgggtatctgagttcttctcactggaactgcggtgctccaggacaagatactaaagcccaaagcatgctggtggagcagtcggagaagttacgtcacctcagcacatttagccaccaggtgctgcaaactcgtctggtggatgccgccaaagctttgaatcttgtgcactgtcactgtctcgacattttcattaatcaggctttcgacatgcagcgcgacctgcaaatcaccccaaagagattagaatatacaaggaaaaaggagaacgaactgtatgagtccctcatgaatatcgctaaccgaaagcaagaagaaatgaaggatatgatcgtggagactctaaataccatgaaggaggaactccttgatgacgcgactaacatggagtttaaagacgtcattgtgccagaaaatggggaacctgttggaacccgcgagataaagtgttgcattcgccaaatccaagagttgataatcagcagactgaaccaggcagttgccaataaactgatctcatctgtagattatctgcgggaaagctttgtggggactctggaaaggtgtttacagagccttgagaagagccaggatgtctcggtacatataaccagcaactacctcaaacaaattttgaacgcagcctaccacgtggaggtgaccttccattccggatccagtgtgactcgcatgctctgggagcaaattaagcagatcatacaaagaatcacctgggtctcaccaccagcaataacattggaatggaagagaaaggtagcccaggaagccatcgaatcactgtccgctagtaagttagccaagagcatctgctctcagtttcgcaccaggttaaacagttctcacgaggccttcgcagcaagcctacggcagttagaggctgggcactctggaagactcgaaaagacagaggacttatggctgagggttcgcaaggaccacgcaccaagactggcccggttgtccctggaatcctgttcattgcaggacgttttgctccatcggaagccaaaactgggccaggaactcggccggggccagtatggcgttgtctatctgtgtgataattggggaggacatttcccttgtgcgctgaagtcagttgtcccgcctgatgagaagcactggaatgatctggctttggagttccattacatgcgtagcttgcccaagcacgaaagactggttgatctccatggatctgttatcgactacaactacggggggggatccagcatagctgtgctccttatcatggaacgtttgcatagggacctttatacgggcctaaaggctggacttaccctggagactcgcttgcagatagcgctggatgttgtggaaggtatccgatttctgcactcccaagggctggttcacagggatatcaagctcaagaacgtgctgctagataagcagaatagggctaagattaccgatttaggattttgcaagcccgaagccatgatgtctggctctatcgtcggtacacccattcacatggcaccggagctattcacaggaaagtacgataactctgtggatgtatacgcatttggcatactcttttggtacatctgttccggttctgtcaaactaccagaggctttcgagcgttgcgcatccaaggatcatctgtggaataacgtgcggcgtggcgcccgacccgagagactccccgtgttcgacgaggagtgctggcagctgatggaggcctgttgggacggagacccgctgaagagaccattgctggggatcgtgcagcctatgttgcaaggaatcatgaatagactctgcaaatccaacagcgaacagccaaacagggggcttgacgactccacgtag

SEQ ID NO: 185915 - DNA, 1104 bp, synthetic construct
  misc_feature 1..1104: note = Description of Artificial Sequence: Synthetic coding sequence
  source 1..1104: mol_type = other DNA
atggtgatggaggtgggcaccctggacgccggcggcctgcgggccctgctgggggaacgcgctgcccagtgccttctcctggattgtcgaagtttcttcgccttcaatgccggacatattgctggctctgtgaatgtgagattttctactattgtgaggcgacgagctaagggggctatggggttagagcacattgtacctaacgctgaactgcggggacgcctgctagccggagcataccatgcggttgtcctcctagacgaacggtccgccgcgctcgacggcgccaagagggatgggacactggcactggctgccggcgcgctgtgcagggaggcacgcgccgcccaagtgttcttcctaaaaggcggttacgaagccttcagcgcctcgtgtccagagctctgcagcaaacagtccaccccgatgggcctatcgctgcctctgagcacgtccgttcccgattccgctgagagcgggtgcagctcgtgctcgactccactttatgatcaaggtgggcctgttgagatcctgccatttttataccttgggtcagcttaccacgcaagtcgcaaagacatgctcgacgccctgggtataaccgcccttattaacgtgtctgccaactgtccaaatcattttgagggtcactaccagtataagtccatccctgtcgaagacaaccacaaagccgatatcagcagttggttcaacgaggctatcgattttatcgacagtattaaaaatgctggagggcgcgtgttcgtacactgccaggctggtatttctcgcagcgctacaatttgccttgcctaccttatgagaacaaatcgagtaaagctggacgaggcattcgagtttgtcaagcagcggcgttctattatttcccccaatttttcatttatggggcagctccttcaattcgagtcccaggtgttagctccacactgtagcgcagaggcgggatcccctgcaatggcagtgctcgaccgcggcactagcactacaaccgtgttcaacttccctgtgagcatccctgtacacagtactaattctgcattatcttacctccaatcacccatcacgacctccccttcatgttag

SEQ ID NO: 185916 - DNA, 909 bp, synthetic construct
  misc_feature 1..909: note = Description of Artificial Sequence: Synthetic coding sequence
  source 1..909: mol_type = other DNA
atggtgatggaggtgggcaccctggacgccggcggcctgcgggccctcctgggcgaacgtgcagcacagtgtttactgctggactgccggagtttctttgcattcaacgctggccacatagccggaagcgtgaacgttagattctcagcagcacaggtcttttttctgaaaggtggatatgaggccttcagcgctagttgtcctgaactctgttctaagcaatctactcccatgggattgagtctccccttgtccacttcagtgcccgactctgccgagagtggctgctcatcatgctcaactccactgtatgaccagggtggaccagtggagatacttccattcctgtatttggggagcgcctatcacgcctcccggaaagacatgctcgatgccctgggtattacagcattaattaatgtgagtgctaactgccctaaccatttcgagggccactatcaatataagagcatacctgtggaggataatcacaaggctgacatttcctcatggttcaacgaagctatagacttcattgattcgatcaagaatgcggggggtagagtctttgtgcattgccaggctgggatttcgcgtagtgccacaatctgtttagcctaccttatgagaaccaaccgagtgaaactggacgaagcttttgagttcgtgaaacagaggcgcagtatcatctcacccaatttctcattcatggggcaactgcttcagtttgagtcccaggtgttggcgcctcattgtagcgcggaagcggggagccccgctatggcggtgctggacagaggcacctccacaaccaccgtgttcaattttcccgtcagcattccggtccacagcaccaactccgccctgtcctacctgcagtctcctatcactacgtctccctcatgttag

SEQ ID NO: 185917 - DNA, 1023 bp, synthetic construct
  misc_feature 1..1023: note = Description of Artificial Sequence: Synthetic coding sequence
  source 1..1023: mol_type = other DNA
atggtgatggaggtgggcaccctggacgccggcggcctgcgggccctcttaggcgaacgagcagcccagtgtctgctgctggattgtaggtctttcttcgcatttaacgccggccatattgccggaagcgtcaatgtaaggtttagcactatcgtgcgacgccgcgctaagggggccatgggcttagaacatatcgtgccgaacgcgaagcgagatgggactctggcgctggcggcgggtgccctatgccgcgaggcgcgggccgcccaggttttttttcttaaaggcggttatgaggctttctccgccagctgcccggagctttgctccaagcagtctacgcctatgggtttatccctgcctctgtcgacttcagtccccgactccgccgaatctggttgtagcagttgcagcactcccctgtacgaccagggtggcccggtagaaatacttccctttttgtatctgggatctgcctatcacgctagtagaaaggatatgctcgacgccttagggatcacagcgctaataaacgtaagtgcaaattgtccgaaccacttcgaaggccattatcagtataagagcatccccgtggaagataatcataaagccgacatttcttcctggttcaacgaggcaatcgatttcattgatagtatcaagaatgcgggaggtcgggtgttcgtgcactgccaagcaggcatctcccggtccgcaaccatatgcctcgcttacctcatgcgcaccaatcgagtgaagcttgatgaagcttttgagtttgtgaaacagagaagatcgatcatttcaccaaacttttctttcatgggtcagctgctccagttcgagagtcaggtcttggctccccattgcagcgccgaagccggctccccagcgatggccgtgcttgatagaggaaccagcacgactacggtctttaacttccccgtgagcatccctgtccatagcacgaacagcgccctgtcatatttgcagagcccgatcacaacctcaccaagttgctag

SEQ ID NO: 185918 - DNA, 1134 bp, synthetic construct
  misc_feature 1..1134: note = Description of Artificial Sequence: Synthetic coding sequence
  source 1..1134: mol_type = other DNA
atgcggaacagcgagaccctggagcggggcgtgggcggctgccgggtctttagttgccttggatcttatcctggaattgaaggcgcaggtctcgcactcctggccgatctcgcccttggtgggcggctactcggtacacatatgagtcagtggcaccacccccggtccggatggggccgtcgcagagatttcagcgggcgctcctcagccaagaagaaaggcggcaatcatatcccagagcgatggaaagattacctgccagtggggcagcgtatgcctgggaccagatttattgcttttaaagtgcctcttcagaaatccttcgagaagaaactagccccagaggagtgcttctcgcccctggaccttttcaacaagatacgcgaacagaatgaggagctgggtcttatcatcgacctgacttatacacagaggtactacaaacccgaagaccttccagaaaccgtgccatatctcaaaatatttacggtcggacaccaggtgcccgatgacgaaaccatattcaaattcaagcacgctgttaacggctttctgaaggaaaacaaggacaacgataagctcatcggtgtccactgcactcacggcctgaaccgaacaggctacctgatctgccggtatctcatcgacgtggagggtgtgaggcccgatgatgctatcgaactgttcaacaggtgcaggggtcattgtctcgagcgtcagaactatatcgaggatctgcagaacggccctattcgcaagaactggaacagcagcgtgccccgctcctcagactttgaagactccgcgcatttgatgcagcctgtccacaacaaacccgtgaaacaaggcccgcgttataacctgcaccagatccagggacatagcgccccaagacattttcacacccagacgcagagcctgcagcagagcgtgcggaagttttcagaaaatccacacgtatatcagcgtcaccatctgcctccacccggtccccctggtgaggattactcccacagacgatacagctggaatgtgaaacctaacgctagccgggctgcccaggacaggaggcgctggtatccttacaattacagcaggcttagttatcctgcatgctgggagtggacccaatag

SEQ ID NO: 185919 - DNA, 681 bp, synthetic construct
  misc_feature 1..681: note = Description of Artificial Sequence: Synthetic coding sequence
  source 1..681: mol_type = other DNA
atgagccagtggcaccacccccggagcggctggggccggcggcgggatttctctgggcgctctagcgctaagaagaaaggcgggaaccacatccctgagcgttggaaagactacctgcccgtgggacagagaatgcctggtactcggttcatagccttcaaagtcccccttcagaagagtttcgagaaaaaactcgcccccgaagagtgcttttctccactagacctgttcaacaaaatccgagaacagaatgaggaacttggcttgatcatcgatttgacctacactcagagatactacaagcctgaggatttacctgaaacagttccatacctgaagatcttcacagtgggccatcaggtccctgacgacgaaacaatttttaagttcaaacacgcagtaaatggcttcctcaaggaaaacaaggacaacgacaagttgatcggggtgcactgtacccatgggctcaatcggaccggctacttaatctgccggcgcagcctagccttgtctccccgtctcgagtgttccgggacaatctctacccatagcaaattctgctttccgggtagcaggagatccccagcaagtgcgagccaagtggccgggacaacaggcgctagacatcatgctcgtctgatattctgtatatttagccgagacgtcgtgtccccatgctag

SEQ ID NO: 185920 - DNA, 822 bp, synthetic construct
  misc_feature 1..822: note = Description of Artificial Sequence: Synthetic coding sequence
  source 1..822: mol_type = other DNA
atgcggaacagcgagaccctggagcggggcgtgggcggctgccgggtgtttagctgccttggatcatatccaggtatagaaggagccggcctggccctgctagctgacctagctttgggcggacggcttctgggcacccacatgtcgcagtggcaccacccgcggtcgggctgggggaggcggcgggacttttctggccggagctccgctaaaaagaaaggggggaaccatattccagaacggtggaaggattacttgcctgtcgggcagcggatgcccgggactagattcattgcgtttaaggtgcctctccagaagtctttcgaaaagaagctggcacccgaggagtgctttagccctctcgacctgttcaataagattcgcgagcagaacgaggagctgggattaatcattgatttaacttacacacagcggtattacaagcccgaggacctccctgagacagtgccctatctgaagatattcacagttgggcaccaggtgcctgacgacgaaaccatcttcaagtttaaacatgctgtcaatggttttctaaaagagaataaggacaatgacaaactgatcggggtgcactgtacccatggtctgaatcggacgggttatctcatttgtcgtagatcgcttgctttgagtccgaggcttgaatgtagtggcactatcagcactcacagcaaattttgctttccaggcagccgccgatcccctgcctcagcttctcaggtggcagggaccaccggtgcccgtcatcatgccagactaatcttctgcatattctcccgcgacgtagtgtcaccttgttag

SEQ ID NO: 185921 - DNA, 597 bp, synthetic construct
  misc_feature 1..597: note = Description of Artificial Sequence: Synthetic coding sequence
  source 1..597: mol_type = other DNA
atggacagcctgcagaagcaggacctgcggcggcccaagatccacggcgccgtacaggcaagcccttatcaaccacctactctagcgagcctgcagcgactgctttgggtgcggcaggccgctacgttgaaccatatcgacgaggtttggcctagtctctttctgggcgacgcttacgcagccagagacaaatcgaaactgattcagcttggaattacccatgtagtgaatgccgctgcagggaagttccaggtcgatactggcgccaagttctaccgcggcatgtctcttgaatactacggcattgaagccgacgacaatcctttttttgacctatctgtatacttcctgccagttgccagatacattcgggccgccttgtcagtgccccagggccgggtgctggtgcactgtgccatgggcgtgtctcgcagcgcaacccttgttctggctttcctgatgatctgcgagaacatgaccctcgtagaagcaatccagacagtacaagcccacagaaacatttgcccgaactcaggctttctacggcagttgcaggtcctggacaatcggctcggccgcgagaccggcagattctag

SEQ ID NO: 185922 - DNA, 747 bp, synthetic construct
  misc_feature 1..747: note = Description of Artificial Sequence: Synthetic coding sequence
  source 1..747: mol_type = other DNA
atggccgagaccagcctgcccgagctgggcggcgaggacaaggccacaccctgcccgtccatcttggagcttgaggaactcttgagagccgggaaatcttcttgtagcagggtcgacgaagtttggccgaacctgtttatcggagacgctatggatagcctgcagaaacaggatctcaggagacctaaaatccacggagccgtacaggcctcaccctaccaaccacccaccctggcaagcctccagaggctcctgtgggtccggcaagccgctactcttaaccacattgatgaggtgtggccctccctgttcctgggggacgcctacgcagcccgggataaatctaaactgattcagctgggcattacacatgtggtgaatgctgctgcaggcaagtttcaggtagataccggcgccaaattctaccgcggcatgtccctggagtactatggtatcgaggctgacgataaccccttcttcgacctgtccgtctatttcttacctgtggcccgctacattcgcgccgccctttccgtgcctcaggggcgagtgctggttcactgcgctatgggtgtcagccgctctgcaacgctggttctggcctttctgatgatctgcgaaaacatgacattggtggaggccatccagaccgtacaagctcataggaacatttgccctaattcaggcttcctgagacagttgcaagtccttgacaatagattggggcgcgaaacagggcggttctag

SEQ ID NO: 185923 - DNA, 567 bp, synthetic construct
  misc_feature 1..567: note = Description of Artificial Sequence: Synthetic coding sequence
  source 1..567: mol_type = other DNA
atggccgagaccagcctgcccgagctgggcggcgaggacaaggccaccccttgtccttctatcctggaattggaggaattgctacgggccggcaaaagctcctgcagcagggttgatgaagtctggcctaacctattcattggtgacgcagccaccgcaaacaatcgttttgagctgtggaaattgggaatcactcatgtcctgaacgctgcccataaaggactgtactgccaaggaggacccgacttttacggttcttctgtgtcctatctcggagtccccgctcacgacttacctgactttgatatctcagcctatttttcaagcgccgctgattttattcaccgtgcgctcaacacccccggggctaaggtgctagttcactgtgtggtgggtgtcagccgtagtgccacgctggtgctcgcatacttaatgcttcaccagcgattgtctctccggcaggccgtaataacggtcaggcaacataggtgggttttccctaaccgaggctttctccaccagctgtgtcgcctagatcagcagctacggggggctggacagtcttag

SEQ ID NO: 185924 - DNA, 876 bp, synthetic construct
  misc_feature 1..876: note = Description of Artificial Sequence: Synthetic coding sequence
  source 1..876: mol_type = other DNA
atgggcctgtgccacttcgccaccctggccctgatcctgctggtgctcctggaagcactggcacaggcagatacacagaagatggtggaagcccagcggggcgtgggccctcgcgcctgttactcaatatggctactcctggcacctacaccgccactgagccactgcctccagtctcctcagaaacagcaccaggtgtgtggcgaccggcggctgaaggcgtcatctacaaattgccccagcgagaaatgcaccgcttgggccagatactctcacagaatggattctctgcagaaacaagacctccgcaggcctaagatacacggggccgtacaagcttccccttaccagcctccaaccctcgcctcgttacagagactgttgtgggttagacaagccgccacccttaatcacattgatgaagtctggccatcactcttcctcggcgatgcatacgcggccagggacaaaagcaagttgatccagctcgggattactcatgtggtgaatgcggcagcaggtaagtttcaggtcgatacgggcgctaaattctatagaggcatgtccctggagtactacggcatcgaggccgacgacaaccctttcttcgacctcagcgtttactttctgccagtggcccggtacattagggccgccctttctgtcccacagggccgggttctcgtccactgtgcaatgggagtgtccaggtctgcaacattggtgcttgcctttttgatgatttgcgaaaatatgacgctcgtcgaggccatccaaacagtgcaagcccaccgcaatatctgtcctaattccggattcttgcgccagcttcaggtcctggacaatcgcctgggacgagagaccggtcgcttctag

SEQ ID NO: 185925 - DNA, 597 bp, synthetic construct
  misc_feature 1..597: note = Description of Artificial Sequence: Synthetic coding sequence
  source 1..597: mol_type = other DNA
atggacagcctgcagaagcaggacctgcggcggcccaagatccacggcgctgttcaggcatccccataccagccacccactttagcttctctacagaggctgttatgggtcaggcaagctgctacgttaaaccatatcgacgaggtgtggcccagcctgtttctgggtgatgcctacgcggcgcgggacaaaagcaaactcatccagctggggatcacccacgtcgtgaacgcggccgccggcaaattccaggtcgacactggagccaagttctatcgggggatgtctctcgagtactacggtatagaagcagatgacaatccatttttcgacttatcagtttattttttgcctgtcgcgagatacattcgcgccgctctaagcgtccctcagggacgggtgctggtgcattgcgccatgggcgtctcccgttccgcaaccctggtgctggcattcctgatgatatgtgagaacatgaccctagttgaagcgattcagacggttcaggcacacaggaatatctgcccaaactccgggtttttaaggcagttgcaggtgctggataacagactgggcagggaaactggacgcttttag

SEQ ID NO: 185926 - DNA, 984 bp, synthetic construct
  misc_feature 1..984: note = Description of Artificial Sequence: Synthetic coding sequence
  source 1..984: mol_type = other DNA
atgggcctgccccagccccggctgcccgcccccgccctgcaggccggcccagcaactgcagggtgtcggcccgaattgcgtggccagtcttggtctcttcttccagctatggggctttgtcacttcgccactcttgccctgatcctgctggtcttattggaggctctggcccaggccgatacgcagaaaatggtggaagcccagcgaggtgttggccctcgggcctgctattccatctggctcctgctcgccccaaccccgccactgagtcattgcctgcaatctcctcaaaagcagcaccaggtgtgtggcgacaggagattgaaagcctcgtcgacaaattgccctagtgaaaagtgtaccgcatgggcaagatatagccacagaatggattccctgcaaaaacaggatttgagaaggcctaagatccacggtgccgtgcaagcctctccttaccagccccccacccttgcgtccctgcagaggctgctgtgggtcaggcaggctgccacactcaaccacatagacgaggtgtggcccagtttgtttctcggggatgcctacgcagccagagataaaagtaagctgatccagttgggtattactcacgttgtaaacgccgcagcgggtaagtttcaagtggatacaggcgcaaaattctaccgcggcatgtcactggagtattatggtatcgaagcagatgacaacccattttttgatctgtctgtatactttctccccgtagcccgctatattcgggccgccttgtccgtgccacagggtcgggttctggtgcactgcgccatgggcgtttcccgcagtgcgacactagtgctggccttcctgatgatttgcgaaaacatgaccttagttgaagccattcaaacagtccaagcacaccggaacatttgtccaaactctgggttcctgcggcagcttcaagtgcttgataacaggctgggccgcgaaacaggacgcttctag

SEQ ID NO: 185927 - DNA, 597 bp, synthetic construct
  misc_feature 1..597: note = Description of Artificial Sequence: Synthetic coding sequence
  source 1..597: mol_type = other DNA
atgagcagccggggccacagcaccctgccccggaccctgatggcccccagaatgattagcgaaggagatattggtggcattgcgcagatcacgtccagcctgttccttgggaggggatctgtagcatccaatcgacacctccttcaggcccgaggcatcacgtgcattgttaacgctacaattgagatccccaattttaactggccacagtttgagtacgtgaaggtgccattggccgatatgcctcatgctcccattggactgtacttcgatacagttgctgataagatccactctgtcagtcgcaagcatggagccaccttagtacattgtgcggccggagtcagccggtccgccacactctgtatagcatatctaatgaaattccataatgtttgcctgctggaagcttacaactgggttaaagctcgccgccctgtgattaggcctaacgtcgggttttggcggcagctgatcgattacgaacgccaattgttcggcaaatctactgtcaaaatggttcagaccccgtacggcattgtcccggacgtgtacgagaaggaatcaagacacctgatgccatattggggaatttag

SEQ ID NO: 185928 - DNA, 597 bp, synthetic construct
  misc_feature 1..597: note = Description of Artificial Sequence: Synthetic coding sequence
  source 1..597: mol_type = other DNA
atgagcagccggggccacagcaccctgccccggaccctgatggccccacgaatgataagcgaaggcgatataggaggaatagctcagattactagctctctgtttctgggtcgggggtccgtcgcatctaatagacacctgctgcaagctcgcggaataacctgtattgttaacgccaccatagaaatcccgaacttcaattggccgcaatttgagtacgttaaggtgcccctggcggacatgccccacgctcctatcgggctttacttcgacacagtcgccgataagatccacagcgtcagccgcaagcatggggctactcttgtgcactgcgctgccggagtctcccggtctgctactttatgcattgcttacttaatgaaatttcataatgtatgtttactggaggcctacaactgggtgaaggctcgtcgcccagtcattaggcctaatgttggcttctggcggcagttaattgactatgagaggcaattatttggtaagtccacagtcaagatggtgcagacaccatacggtattgtgccagatgtctatgaaaaggagagcagacacctcatgccctattggggaatctag

SEQ ID NO: 185929 - DNA, 945 bp, synthetic construct
  misc_feature 1..945: note = Description of Artificial Sequence: Synthetic coding sequence
  source 1..945: mol_type = other DNA
atgggcctggaggccgcccgggagctggagtgcgccgccctgggcaccctactgagggaccccagagaggccgaacgcacgctattgctggattgccgtcctttcctagcgttctgccggcgccacgttagggcggcccgtccagttccttggaacgccctgctgcggcgacgcgctcgaggtccccctgcagctgtgttagcctgtctactgcctgacagggcgctgcgcactaggctagtcaggggcgagttggcgagggctgtcgtcctggacgaaggttccgccagtgtggctgaattgcgaccagattcccctgcccatgtacttctcgctgctttgctgcacgaaacacgcgccggccctacggcagtatatttcctccgaggaggctttgacgggttccagggctgctgccccgatctatgctcagaggctcccgcacctgctttaccccccacaggtgacaaaactagtcgatcagattcccgcgcccctgtatacgaccagggcggccctgtggaaattttgccttacctgttcttgggtagttgttcccacagttccgatttacaaggactccaagcgtgtggcatcaccgcagtgctgaacgtgtccgcctcttgccccaaccacttcgagggactgttccgctacaagtcaatccccgtcgaggataaccagatggtcgagatttccgcctggtttcaggaagccatagggttcatcgactgggtgaagaacagcggggggcgtgtactggttcactgccaggcaggaattagtagatccgccaccatctgcctggcctatcttatgcagtcaagacgagtgaggctggacgaggcatttgactttgtaaaacagagacgtggcgttatttccccgaactttagctttatgggtcagcttctacagtttgagacgcaggtactgtgccactag

SEQ ID NO: 185930 - DNA, 288 bp, synthetic construct
  misc_feature 1..288: note = Description of Artificial Sequence: Synthetic coding sequence
  source 1..288: mol_type = other DNA
atggccgccgcccggctgtgcctgagcctgctgctgctgagcacctgcgtcgctttattactgcagcctcttctgggagcacaaggcgctcccctggaaccggtgtaccctggcgataacgccacacctgagcagatggcccagtacgcggctgacctgcggagatatataaacatgctcacaaggcccagatacgggaagaggcacaaggaagataccctcgctttcagcgagtggggttctccccatgctgctgtacccagggaactgagcccgttggatctgtag

SEQ ID NO: 185931 - DNA, 435 bp, synthetic construct
  misc_feature 1..435: note = Description of Artificial Sequence: Synthetic coding sequence
  source 1..435: mol_type = other DNA
atgagcgtggcccaggacatccccaagctgcagaagctgggcatcactcacgtgctgaacgcagcagaggggcgcagctttatgcatgtgaatactaatgctaacttttacaaagattccggaatcacgtatcttggcatcaaagccaatgacactcaggagttcaacttgagcgcgtacttcgagcgtgccgccgacttcatcgaccaggcactggcccaaaagaatggacgagtactggtccactgcagagaggggtattcccggtcgcctacgctggtgattgcctatctgatgatgaggcagaaaatggacgtgaagagcgctctgagcatcgtgaggcagaacagagaaatcggccccaatgatggattcctggctcaactgtgtcagctgaacgaccggctggctaaggaggggaagctgaaaccttag

SEQ ID NO: 185932 - DNA, 1185 bp, synthetic construct
  misc_feature 1..1185: note = Description of Artificial Sequence: Synthetic coding sequence
  source 1..1185: mol_type = other DNA
atggtgaccatggaggagctgcgggagatggactgcagcgtgctgaaacggcttatgaatagagacgaaaacggagggggcgccggcggttccgggtcacacggtacgctgggccttccatccggtgggaagtgtcttctccttgactgccgacccttcctggcccatagcgccggctatattctggggtcagtgaatgttcgttgcaacaccatcgtgagacgccgggctaaaggaagcgtgagcttggaacaaatccttcctgccgaagaggaagtaagggctagactcaggtcagggctgtattcagcagttatagtatacgatgaaagaagcccaagagccgaatcactaagagaggactctacagtttcattagtagtccaggccctgcgccggaacgctgagagaactgatatttgcttactcaagggagggtatgagcgcttctcaagcgaatatcccgagttttgttccaaaaccaaagcacttgctgcgattcctccgcctgttcctcctagcgccaccgaacctctggatcttgggtgctcttcgtgtgggacccctctacacgaccagggaggacctgtggagatattgccttttctctacctgggcagcgcgtaccacgctgctcgcagggacatgctggatgccctgggcattaccgctctcttaaatgtcagttccgactgccctaatcatttcgaggggcattatcagtataagtgcattccagtggaggacaatcacaaagctgacatctcctcctggtttatggaagccattgagtatatcgacgcagtgaaggactgtcggggcagagttctcgtccactgccaagccgggatctcacgatccgccacaatctgtctggcatacttaatgatgaaaaagagagtccggctcgaggaggctttcgaatttgtaaagcagcggcggagtatcataagccccaacttcagctttatgggccaactcttacagtttgaatcgcaggtcttggcaactagctgtgccgcagaggctgctagccctagtggaccacttcgggaacggggaaagacaccggccacacccacaagccagttcgtatttagctttcctgtctctgtgggggtacatagtgctccatcctcacttccctacttgcacagcccgatcaccaccagcccaagttgttag

SEQ ID NO: 185933 - DNA, 912 bp, synthetic construct
  misc_feature 1..912: note = Description of Artificial Sequence: Synthetic coding sequence
  source 1..912: mol_type = other DNA
atgggccggaaggtgcacagcaacggcagccagttcgccgagcacagcaggagtcctaggcgtacaggccgcgattgcaaacccgtgagggcccccagcatggctttaggcgtaagccagcttgctggaagatccaggtgcttgtgctcggagagtcaaggaggctacgagagattctcctcggagtatccggagttttgttcaaagaccaaagctctcgctgctatcccgccccccgtgcctccatctgctactgagcctttagacttgggttgttcttcatgtgggacgccattacatgaccagggcggtcctgtcgagattctgccattcctctacctgggcagcgcctatcacgctgcccgacgggacatgctggacgccttgggcataaccgcccttctgaacgtctcatcagactgccccaatcactttgagggtcattaccagtacaaatgcatccccgttgaggataatcataaagctgatatttcatcctggttcatggaggcaatcgagtacatagatgccgtgaaggattgccggggcagggttctggtgcactgtcaagctgggatttcgcgctctgcaactatctgcttagcatacctcatgatgaagaagagggtccgccttgaagaggcatttgagttcgtcaagcagagaagatccattatttcaccaaacttcagtttcatgggacagctcttgcagttcgaatcacaggtgctggcaaccagctgcgccgctgaagccgcttcgccttcgggccccctgagggaacgagggaagactccggctaccccgactagtcagtttgtcttttcgtttccagtgtccgttggagtgcacagtgctcctagttcccttccctacctgcacagtcccattactacgagtccgtcttgttag

SEQ ID NO: 185934 - DNA, 1155 bp, synthetic construct
  misc_feature 1..1155: note = Description of Artificial Sequence: Synthetic coding sequence
  source 1..1155: mol_type = other DNA
atgaaggtgaccagcctggacggccggcagctgcggaagatgctgaggaaagaggctgccgcacgctgcgtggtcctggactgtcgaccctacctggccttcgcagcatcaaacgtacggggttcgctgaatgtcaacctaaactctgtggtgctcaggcgagcccggggaggcgccgtcagcgcacgatacgtattgccagacgaagccgcccgtgctaggctactgcaagagggaggcggtggtgttgctgccgtggtggtgctggaccaaggtagtaggcactggcagaaactacgggaggagagcgcagctagggtagtgttgacctcgttgctggcttgcctgcccgccggccctcgcgtgtattttttaaagggtggctacgagactttctactctgaataccccgagtgttgcgttgacgtgaagccaatcagtcaggaaaagatcgaatctgagcgggccctgattagtcagtgcggcaagccagttgtgaacgttagctaccggccagcatatgatcagggcggtccagtcgagatactcccgttcctctacctgggatctgcatatcatgccagcaagtgcgagttcttggccaaccttcacattaccgccttactcaacgtgagccggaggaccagcgaagcttgcgctactcatctgcattacaagtggatacctgttgaggattcccacactgcagatatttcatcccattttcaggaggcaatcgattttattgattgcgtcagggaaaagggcgggaaggtgcttgttcattgcgaggcagggatatctaggtccccaacaatctgcatggcatatctcatgaagactaagcagtttcgcttgaaggaggcctttgactacatcaagcaacgccgatccatggtgtccccaaattttgggtttatgggacaactgttgcagtacgagtcagaaattttaccatctactccgaacccccagccccctagctgccagggcgaagcagcaggttcctcccttattggccatttgcagaccctctctccggacatgcagggtgcttactgcacctttcctgcaagtgtcctcgctcctgtccctacccacagtaccgtatctgagctcagtagatctccagtggctactgccacctcttgctag

SEQ ID NO: 185935 - DNA, 1107 bp, synthetic construct
  misc_feature 1..1107: note = Description of Artificial Sequence: Synthetic coding sequence
  source 1..1107: mol_type = other DNA
atgccctgcaagagcgccgagtggctgcaggaggagctggaggccaggggaggagcgtccctcttattgttggactgtcggccacacgaattgttcgagtcctcccacatcgaaactgccatcaaccttgcaatacccgggttgatgctgagacggctgcgaaaagggaatctacccattaggagcatcatcccaaaccatgctgacaaggaacgcttcgcgacacggtgcaaggctgcaacggttctgctctacgacgaggcaacagcagagtggcagccggaacctggagcacccgccagcgtgctcgggctgctgctgcagaagctccgcgatgatggctgtcaagcttactacttgcagggcggctttaataagttccagaccgagtacagcgagcactgcgagactaatgttgactcttcaagttccccctcaagctcgccgcccactagtgtcctggggctcggcggtttaaggatctcctccgattgctccgatggtgagtctgaccgggagctgccctcttccgcgacggaatctgacggcagcccagtccctagcagtcaacctgccttccccgttcaaatactcccctatttatacctcgggtgtgccaaggattccaccaacctcgatgttcttgggaagtacgggatcaaatatattcttaatgtgaccccaaacctgcctaatgcttttgaacatggcggggaatttacatataaacagattcctatcagcgaccattggtcacaaaaccttagccagttttttcccgaagcaatctctttcatcgatgaggctcgctccaagaaatgcggtgtcctggtgcactgcctggcagggatctcaaggtcagtgacagtgacggtggcatacctgatgcagaagatgaatttgagcttaaacgacgcctacgatttcgtaaagcgcaaaaaaagtaacatctctcctaacttcaattttatgggtcaactcttggacttcgagaggacacttggcttgagctctccttgcgacaatcacgcctcttccgagcagttgtatttcagcaccccaactaatcataatctttttccactgaatacactggaatctacctag

SEQ ID NO: 185936 - DNA, 1260 bp, synthetic construct
  misc_feature 1..1260: note = Description of Artificial Sequence: Synthetic coding sequence
  source 1..1260: mol_type = other DNA
atgaagaaccagctgcggggcccccccgcccgggcccacatgagcacgtctggggctgccgccgcgggaggaacccgcgccgggtcggagcctggagctggatctggcagcggggccggaacaggtgccggcgcggctacgggggctggcgccatgccctgtaagtccgccgagtggctgcaagaggagcttgaggcaagaggcggtgcctcactcctcttgcttgactgtagacctcacgagctattcgagagcagccacattgaaaccgctataaacctagcgatccctggtcttatgctgcgccgcctccggaaaggcaaccttccgattagaagtattatcccaaaccacgccgataaagagcgattcgctactcgctgtaaggctgccacagtgctcctctacgacgaagcgacagccgagtggcagccggagccaggcgcccctgccagcgtgctgggactgctgctgcagaagctaagggacgacgggtgtcaagcctactatctgcaaggaggattcaacaagttccagactgagtattcagagcattgcgaaaccaatgtcgatagcagctcctctccatcgagcagcccgcccacgagcgtgttggggctgggcggcttgcggatttcttccgattgctctgatggcgagagcgaccgggaacttccatcctccgctactgaatcagacggttcccctgttccttcaagccagcctgcctttccagtgcagatcctgccctatctgtacctaggatgcgccaaagattcgactaatctggatgtgctggggaagtatgggattaagtacatcctgaacgtgaccccgaatttgcccaacgcttttgagcacgggggcgagtttacctacaagcagattcccattagcgatcactggagtcaaaacttgagccagttttttccggaagcgatctctttcattgatgaggcgagaagtaagaagtgtggagtcctcgtgcactgtcttgctggtattagccggtccgtgacagtcactgtggcgtatctgatgcaaaagatgaacctgagcctgaacgacgcatacgactttgtcaaacgaaaaaagtcaaatatttctccaaacttcaatttcatgggccaactgcttgacttcgaacgcacattgggcctgtccagtccctgcgacaatcacgccagctctgaacagttgtatttctccacccctacgaatcacaatctctttcctctgaacactcttgagtccacgtag

SEQ ID NO: 185937 - DNA, 1878 bp, synthetic construct
  misc_feature 1..1878: note = Description of Artificial Sequence: Synthetic coding sequence
  source 1..1878: mol_type = other DNA
atggccggcgaccggctgccccggaaggtgatggacgccaagaagcttgcctcactgctccgcggtggcccaggcggaccgttggttatcgactctaggtctttcgttgagtataattcatggcacgttctctcaagcgtgaacatttgttgttcaaagctggtcaagaggcgtctccaacagggcaaagtaaccattgccgaattaatccagccagccgccagatcacaggtggaagccaccgagccccaggacgttgtcgtctacgatcagagcactcgggatgcctccgtgctggcagctgacagcttcctctccatcttgctatctaagctggatgggtgttttgattcagtcgccatactaacagggggctttgcaaccttcagctcatgcttccctgggctctgtgaaggtaaacccgctgccctgctccctatgagtctcagtcagccctgcctaccagtgccgtctgtggggctcacccgcattctcccgcacctctaccttggcagtcagaaggacgtcctgaataaggatctgatgacccaaaacggcatctcctacgtgctcaatgcctctaactcctgtccaaagcccgacttcatctgcgagagcaggtttatgcgagtgcctattaatgacaattattgcgaaaaactacttccatggctcgacaagagtattgagtttattgataaagcaaagttaagctcctgtcaggtgatcgtgcactgcctggccggcatttctcgcagcgccaccattgccattgcctatattatgaagaccatgggcatgagcagcgatgatgcatatcgtttcgtcaaagataggcggccatcaatctccccgaacttcaacttcctcggtcagttgctggagtacgagagaagtttgaagctgctagctgccctgcagggggatcctggcactcctagcggcacccccgaacctccgccttcacctgctgccggggctccactgccaaggctccctccacctacctctgagtccgctgctaccgggaacgcagccgctcgtgaggggggactcagcgccggcggggaacctccggcaccaccaacacctccggccacttccgccctccagcagggattgcgcggtctgcacctgagcagcgatagactgcaagatactaacagactcaaaagatcctttagcctcgatattaaatccgcttatgcccctagcaggcgcccagatgggcctggtccccccgatccaggcgaggcaccgaaattgtgcaagcttgattctccaagcggcgccgcccttggtctctccagcccatctcctgattctccagatgctgccccagaggcccgcccccgcccgagaagaagacctagaccgcctgccggcagccctgcgagatcaccagcacattccctaggcctcaacttcggagacgccgcccggcagaccccaaggcatggactcagcgccttatccgccccagggctccctggacccggccagcctgctgggccaggcgcatgggctcctccactagattcgcccggaactcccagccccgatggcccgtggtgcttctcccctgaaggagcccagggagccggcggggtccttttcgcaccgtttggacgggcaggggctcccggaccggggggaggctcagatctgaggcgccgagaggctgctagggctgagcctcgggatgctaggacaggctggccggaggagcctgcccctgagacacaatttaaacggagaagctgtcagatggaattcgaggagggaatggtcgaaggacgcgccagaggggaagaactcgccgccttaggaaagcaggcgtcctttagtggctcggttgaggttatcgaggttagttag

SEQ ID NO: 185938 - DNA, 1878 bp, synthetic construct
  misc_feature 1..1878: note = Description of Artificial Sequence: Synthetic coding sequence
  source 1..1878: mol_type = other DNA
atggccggcgaccggctgccccggaaggtgatggacgccaagaagttggcatccttgttgcgtgggggccccggcggaccccttgtgatcgatagccgctcatttgttgaatacaatagttggcatgtactgagttctgtgaacatttgctgttccaaactggtgaagcgcaggctacagcagggaaaggtcactattgcagagttgatacagccagcagcccgatcacaggtggaggcaactgaaccccaggacgtcgtagtgtatgaccagagtactcgggacgctagtgtgcttgcagctgactcgttcttgtcaatcctgctctccaaactggatggttgcttcgattctgttgctattctgaccgggggctttgctacctttagcagctgctttccgggcctgtgcgaaggcaaacctgccgccttgctgcccatgagcctctctcagccctgcttaccggtcccctccgtggggcttacacggattctgccccatttatacctcggctcccagaaggatgtgctcaataaagatttaatgactcagaacggcattagttatgtgctgaacgcctcgaatagttgccccaaacctgatttcatctgcgagtctcgatttatgagggtgcccataaacgacaactactgtgaaaaactgctgccatggctggacaagagtatcgaatttatcgacaaggcaaagttgtcatcctgccaggtaattgtgcactgtctggccggaatctctcgctctgccacaatcgccatcgcttacatcatgaaaacaatgggcatgagttcagacgacgcttacaggttcgtcaaggaccggcgaccgtccataagccctaacttcaattttctgggccagttattagaatacgaacgttccctcaaactgctggcagcactacaaggagatccaggcacgccctctgggacaccggagcctccaccctccccagcagcgggggctcctctgccgcggctaccgcctccgacatctgaatccgctgccacaggcaacgctgcagcgcgcgaagggggcctgtccgcaggtggggaacctcctgcgccacctacccccccagcaacctcagccctgcaacagggcctgagaggtttacatcttagtagtgaccgtctgcaggacaccaataggctgaaaaggagcttctctctcgatatcaaatctgcctacgccccctctaggcggcccgacggaccaggcccacctgaccccggtgaggcccccaagctgtgcaagttagactctcctagtggcgccgccctgggcctttcaagtccgtcgcctgactcgcccgacgccgcacccgaagcacggccacgccccagacgacgcccacgccccccagccggatcacctgctagaagccccgctcacagtctagggttgaacttcggtgatgcagcaagacaaacacccagacacggcctcagtgctctgagtgctccaggcctgcctggcccaggtcagccagcaggccccggggcctgggctcctcctcttgacagcccaggaacaccctctcccgacggtccctggtgcttttctccggagggcgcccagggggccgggggtgtgctgtttgccccctttggtagagctggagcacccggacctggcggggggtctgacctgcggcgtagggaggctgcccgagctgagccgcgagacgccaggaccggctggcccgaagaacctgctcccgaaacacagttcaagaggcggtcatgccagatggagttcgaagagggcatggtggagggacgggccagaggcgaggaattagccgcattgggtaagcaggcttctttcagcgggtctgtggaggtcatcgaagtatcttag

SEQ ID NO: 185939 - DNA, 1626 bp, synthetic construct
  misc_feature 1..1626: note = Description of Artificial Sequence: Synthetic coding sequence
  source 1..1626: mol_type = other DNA
atgcacaccggcggcgagaccagcgcctgcaagcccagcagcgtgcggcttgcacctagctttagttttcatgccgctggtctgcagatggctggacagatgcctcacagccatcaatatagcgatcggagacagccgaatattagtgaccagcaggtgagcgccctgtcttattccgaccagattcagcaacctctgactaatcaggtgatgcctgatatcgttatgctgcagcgtcggatgccacagacattccgggatccagccaccgcgcccctgcggaaactgagcgtcgatctcatcaagacctataagcacatcaacgaggtctattacgccaagaaaaaaaggcggcaccagcagggccaaggtgacgattcgagtcataagaaggagaggaaagtctacaacgacggttacgacgacgataactacgattacatcgttaaaaacggggagaagtggatggatcgctacgaaattgatagccttattggcaagggatcttttggccaggtggtgaaggcttacgatcgcgtggagcaagagtgggttgccattaagattattaaaaacaagaaagctttcctgaatcaggctcagattgaagtccgcctactcgagttaatgaataaacacgacacagaaatgaagtattacattgttcacttgaaacggcattttatgtttagaaaccacctgtgtcttgtgtttgaaatgctgtcgtataacctctatgacctgttgcgcaacactaatttcaggggtgtgagcctgaatctgacgcgcaaattcgcacagcaaatgtgtactgcgctcctgttcctggcgacccccgaactgagtatcatacactgcgatttaaagcctgagaacatcctgttgtgtaatcctaaacgtagtgctatcaaaatcgtagattttggcagcagctgtcaactcggacagagaatttaccagtacatccaaagcaggttttaccggagccccgaggtcctccttgggatgccttacgacctggcgatcgacatgtggtctctgggatgcatcctggtggagatgcacacaggcgaacctctcttctccggggcgaatgaggtggaccagatgaataaaatcgtcgaggtgcttggcataccacccgcacatattctagaccaggcccctaaggcaaggaagttcttcgaaaagctgcctgacggaacctggaacctaaaaaaaacaaaagatggcaaacgtgagtataaaccaccagggacccgaaagttgcacaatatacttggggtggaaactggaggccctggaggaagaagggctggagaatccggacacactgtggccgactacctgaagttcaaagacttgattctgcgcatgctggactatgacccaaaaactcggattcagccttactatgccctgcagcactcattttttaagaagaccgctgacgagggaacaaatacatcgaattcagtgtctacttccccagctatggaacaaagtcagagctccggcaccacaagcagcactagcagctcctcagttgtagagcagcactggatgccaggagcgtttcgaatgaccgtgtcctttaccctggaggttcatgatgtgcctgtctag

SEQ ID NO: 185940 - DNA, 1755 bp, synthetic construct
  misc_feature 1..1755: note = Description of Artificial Sequence: Synthetic coding sequence
  source 1..1755: mol_type = other DNA
atgcacaccggcggcgagaccagcgcctgcaagcccagcagcgtgcgcttggcaccctctttcagcttccatgccgccgggttacagatggccgggcagatgcctcactcacaccagtactccgataggagacagccaaacataagcgaccaacaggtgtccgccctaagttattctgatcagattcagcagcctcttacaaaccaggttatgccagatatcgtgatgctccagcgcagaatgccgcagacatttcgggaccctgctactgcaccactccggaaactgtccgttgacctcattaaaacatacaagcacattaacgaggtgtactatgcgaaaaaaaagagaagacatcagcaggggcagggcgacgattccagccacaagaaagagcggaaagtatacaatgacggatacgatgatgataattacgattacatcgtcaagaatggagagaagtggatggacagatatgagattgacagcttgataggcaagggctcattcggccaggtggtaaaggcttatgaccgggtcgaacaggagtgggttgccattaaaattattaagaataagaaagccttccttaaccaagcccaaatcgaggtgaggttgcttgaactgatgaacaaacacgataccgagatgaagtattatatcgtgcatttaaagaggcacttcatgtttcggaatcatttgtgtctcgtgttcgagatgttgtcttataacttatacgatcttctaagaaacaccaattttagaggcgtgtccctcaacttaacacgcaagttcgctcaacagatgtgcaccgcacttcttttcctcgcaacgcctgagctctcaatcatacattgtgacttgaaacctgaaaacattctgctttgcaatccaaagaggagtgcaatcaaaatcgtagatttcgggagctcgtgccagctaggccagagaatctatcagtacattcaaagccggttctatagatcaccggaggttctgctggggatgccctacgatctggcaatcgatatgtggagcctggggtgcattcttgtggaaatgcacactggtgagcctctgttctccggggccaacgaggtcgatcagatgaacaaaatagtagaggttctcggcattcccccggcacacatcctcgatcaggctccaaaggcccgcaagttctttgagaagctcccagatggcacatggaacttaaaaaagaccaaggacggcaagcgggagtataaaccacctggcacgcgcaagttacacaacatcttgggtgtcgagaccggaggacctggcggcaggagagctggagagtccggacacactgttgccgactaccttaaatttaaggaccttatcttgcgtatgcttgactacgatccaaaaacccgaatccagccttattacgcactccagcacagcttttttaagaagaccgccgacgagggcactaatacatcaaattcggtttcgacatctcctgccatggagcagtcccagagctctggtaccacttccagcacctcatctagtagcggcggctcctcagggacgtcaaattctggtcgggcgcgcagtgaccccacccaccagcaccgacactctggcgggcactttactgccgccgttcaggccatggattgcgagacacactctccacaggtttcttcccacgtagtgcacctgcttgtgagtcccgctatcctgagatggtcttccacaggatgccaggtgcccctggagtag

SEQ ID NO: 185941 - DNA, 2265 bp, synthetic construct
  misc_feature 1..2265: note = Description of Artificial Sequence: Synthetic coding sequence
  source 1..2265: mol_type = other DNA
atgcacaccggcggcgagaccagcgcctgcaagcccagcagcgtgcgactcgccccttctttcagctttcatgcagctgggcttcaaatggccggacaaatgccacacagccaccagtattctgataggagacagcctaacatctccgaccagcaggtatccgctttgtcctactcagaccagattcaacagcctttaactaaccaacgtagaatgccacagacttttcgcgaccctgcgaccgccccgctgaggaagctgagtgtggatctgatcaaaacatacaagcatatcaatgaggtttattacgcaaaaaaaaagaggcggcatcagcaaggtcagggggacgatagctcccacaagaaggaacgcaaggtatataacgacggttatgacgacgacaactatgattatattgttaagaatggggaaaagtggatggatcggtatgagatagacagcctgatcgggaaagggtcttttggccaggtggttaaagcttatgatagggtggagcaggagtgggtggccattaaaataatcaaaaacaagaaagctttcttaaatcaggcacaaatcgaagtcaggttactggagctcatgaataagcatgacacggagatgaagtactacatagttcacctgaagcgccactttatgttcaggaaccacctgtgcttggtgtttgagatgttaagctacaatctctatgacttactgaggaacaccaatttccggggggtcagtctgaacctaaccaggaaatttgcacagcaaatgtgcacagcattgctgtttctagcaacccctgaattatctattatccactgtgacttgaaaccagaaaatatcctgttgtgcaacccaaagcgctcggctattaagattgttgacttcggcagttcttgccagctcggtcagcgaatttaccagtacattcagtccagattttaccgcagtcccgaagttttgctcggcatgccttacgacttggctattgacatgtggtcgttggggtgcatccttgtggagatgcacaccggagagcccctgttctcaggcgccaacgaggtcgaccagatgaataagattgtggaggtgcttgggatcccgcccgcgcacatcctggaccaagcaccaaaggcacgcaagtttttcgagaaactgccggatggcacgtggaatttgaaaaagacaaaagacggcaagcgggagtataaaccacctggaacccgcaaactacacaacatcctcggcgtagaaacaggtgggcctggcggccgtcgtgctggtgaatcaggacataccgtggccgattatttgaagttcaaagacctgatcctgagaatgctcgattacgacccaaaaactaggatccagccctattacgcattgcagcactctttctttaaaaaaaccgccgatgaagggacgaatactagtaattcagttagcacaagcccagctatggagcagtcacaatcgtcaggcacgacttcctccacgtcatcttcctccggcggtagctctgggacatcaaatagtgggcgcgccagatccgaccctacgcaccagcaccgacacagcggcggacacttcacagccgcagtgcaggccatggactgcgagacccacagcccacaagtacgtcaacagtttccagctcctcttgggtggagtggaaccgaggcacctacccaggtcaccgtggaaacccatccagtccaggaaactacttttcatgtagctccccaacagaatgccttacatcaccaccatggcaacagcagccaccatcatcaccaccatcaccaccaccaccatcatcacgggcagcaggcacttggaaatagaacaagaccaagggtgtacaattccccaaccaactctagctcgacccaggactccatggaggttggccatagccaccacagcatgacatctttgtctagttctaccacctcaagctctactagtagctcaagcaccggcaatcaaggaaatcaagcttaccagaatcgacctgtcgccgcgaatacattagattttggccaaaacggggccatggacgtgaacctaactgtatactccaatccaagacaagagacaggcatagctggtcatccaacctatcagttctcagctaacactggacctgcccattacatgacagaaggacacctcactatgaggcagggtgctgatagagaagagtcaccgatgaccggagtttgtgtgcaacagtccccagtcgcttctagctag

SEQ ID NO: 185942 - DNA, 1590 bp, synthetic construct
  misc_feature 1..1590: note = Description of Artificial Sequence: Synthetic coding sequence
  source 1..1590: mol_type = other DNA
atgcacaccggcggcgagaccagcgcctgcaagcccagcagcgtgagattagctcctagcttctcttttcacgccgctggtcttcaaatggcaggccagatgcctcactcgcaccagtactccgacagacggcagccaaacatctcagaccagcaggtgtccgccctgagctactccgaccaaatacagcagccgctgactaatcaggtgatgcctgatatcgtgatgctccagagacggatgccccaaacattccgcgatcccgctaccgctcctctgcgtaaattatccgtggacctgatcaaaacctacaagcatatcaacgaagtgtactatgcgaagaagaagaggagacatcagcaggggcagggtgacgattcttcgcacaaaaaagagcgtaaggtgtataacgatggttacgacgatgacaattatgattatatagtgaaaaacggagagaagtggatggatcgctatgagattgatagtttgatagggaagggcagttttggacaggtagtgaaagcttatgaccgggtagagcaggaatgggtagcaattaaaattattaagaataaaaaggcttttctcaatcaggctcaaatcgaagtgcggttgctggagctcatgaataaacatgatactgaaatgaaatattacatcgtgcacttgaaacgtcatttcatgtttcgcaaccatctgtgtttagtgttcgagatgctgtcttacaatctgtacgacctgctgcgcaatactaacttcaggggagtgagtctcaatctgacgaggaagttcgcccaacagatgtgcactgcactgctgtttcttgcgacacccgaactgagtatcatacactgtgacttgaaacccgaaaacatcctgctgtgcaatccaaaacgttcggctatcaagatcgtggattttgggagctcatgtcagctcggccagcggatctaccaatatatacagtcacggttttatcggtctcctgaggtattgctcggaatgccgtatgacctggcgatcgatatgtggtcactgggctgtatcctggtggaaatgcataccggggaacctctgttcagcggcgctaacgaggtagatcaaatgaataaaatagtggaggttctgggcattcctcctgcgcacattctagatcaggctccgaaggccagaaagttttttgagaagctgccagatgggacttggaatcttaaaaagaccaaggatggtaagagagaatataaacctccaggtacccgcaagcttcataacattctgggagttgagacagggggccctgggggcagacgtgctggtgaaagcggccacaccgtggcagattatttgaaattcaaagaccttatcctacggatgttagactatgatcccaaaacgaggatccagccttattacgctctccagcattcattcttcaaaaaaactgccgatgaaggaaccaacacctccaactccgtgtccacttcaccggccatggagcagtctcaaagtagtggcacaacatcaagtacctcttcaagctcaggagcaagcgctatttcctgcagcagctggctagtaagacactag

SEQ ID NO: 185943 - DNA, 2292 bp, synthetic construct
  misc_feature 1..2292: note = Description of Artificial Sequence: Synthetic coding sequence
  source 1..2292: mol_type = other DNA
atgcacaccggcggcgagaccagcgcctgcaagcccagcagcgtgagactggcaccttcgttcagctttcacgctgccggccttcagatggcaggccagatgccccactcgcatcagtactctgacaggaggcagccaaatattagcgatcagcaggtgtctgcgttgtcttactccgatcagattcagcagcctctgaccaaccaggtgatgcctgacatcgtgatgctgcagaggcggatgccccagactttcagagatcctgccacagctcctctacgcaagctgagtgtggatctgatcaaaacctataagcatattaatgaggtctattatgccaagaaaaagcgtaggcatcaacagggccagggcgatgactccagtcataagaaggagcgcaaggtgtataacgacggctacgatgacgacaactacgattatatcgtcaagaatggggagaagtggatggaccgctacgagatcgattctttgattgggaaaggctcattcggacaggtcgtgaaagcttacgacagagtggagcaagagtgggtggcgatcaagattatcaaaaataaaaaggccttcctgaatcaggcacagattgaggtccgccttctcgaactaatgaacaaacatgacaccgaaatgaagtactacatcgttcacctcaagcgtcattttatgttcagaaaccacctctgtctcgtctttgaaatgctgagttataatctgtacgatctgctgagaaacacaaatttcaggggcgtgagtctaaacctgaccaggaaattcgcgcagcagatgtgtaccgccctcctgtttttggctacgccagagctgtctattattcactgtgacctcaagcccgagaatatcttgctctgcaacccaaagagatcagccataaaaatcgtagacttcggctcctcttgccagctgggacagcgaatctatcagtacatccagagcaggttttatagatcacccgaggtacttctcggcatgccttacgatctagctatcgacatgtggtctctgggttgcatattagtggaaatgcacacaggtgaacctctgtttagtggagcaaacgaagtggaccagatgaacaagattgtcgaggtactaggaatcccacccgcacacattctggaccaggcaccgaaggcgcgaaaattctttgagaagctacccgacggcacttggaacctcaagaagactaaggatggcaagcgggaatataaaccaccaggaacaagaaagcttcacaatatcctcggagtggaaactggcggtccaggcgggaggcgggccggcgaaagcggccataccgtcgctgactacttaaaattcaaagatctcattcttaggatgttggattacgaccccaagactagaatccaaccttactacgcattacagcactcatttttcaaaaagacagccgatgagggcacaaacaccagcaactccgtctcaacctcaccagcaatggaacagtctcagagctcagggactaccagctccacttcgagctctagcggcggatcgagtggcacttccaattccgggcgagccagatctgaccctacacatcagcatcggcactcaggagggcatttcaccgccgcagtccaggccatggattgtgaaacccatagtccccaagtccgccagcagtttcctgcccccttggggtggtctgggactgaggcgccaactcaggtcacagtagagacccaccctgtccaggaaaccacattccatgttgctcctcagcagaatgccttacaccaccaccacgggaactcgagccaccatcatcaccatcatcaccatcaccaccatcaccacggccagcaggcacttggcaacagaacaaggcctcgtgtgtacaatagcccaacgaattcttcttcaactcaggactcaatggaagtaggtcactcccatcactctatgaccagtctgtcatcaagtactacttcctcaagcacgtccagcagttcaacaggaaaccagggaaaccaggcctatcagaatcggcctgtggccgccaataccctagatttcggacagaacggcgcaatggacgtgaacttgacggtatattccaatccgcgtcaggaaaccggtattgcagggcaccccacctaccaattttcggccaacacaggccctgcacactatatgactgagggacaccttaccatgagacagggcgccgatcgggaggagtcccccatgaccggcgtctgtgtgcagcagtctcctgtcgcttcctcctag

SEQ ID NO: 185944 - DNA, 396 bp, synthetic construct
  misc_feature 1..396: note = Description of Artificial Sequence: Synthetic coding sequence
  source 1..396: mol_type = other DNA
atgcacaccggcggcgagaccagcgcctgcaagcccagcagcgtgaggctggccccatccttctcttttcacgcagccggattgcagatggcgggacaaatgccccatagtcaccagtacagtgaccgtcgacagccaaacatttctgatcagcaggtctcagccctctcatactcggatcagatacaacaacctttaaccaaccaggtgatgcctgacattgtgatgttacagcgccgtatgcctcagactttcagggatcccgccaccgccccactgcgaaaattgagcgtggatttaattaagacttacaaacatataaatgaggtgtactacgccaaaaagaaaagaaggcatcaacagggacagggagacgattcatcccataaaaagtag

SEQ ID NO: 185945 - DNA, 1755 bp, synthetic construct
  misc_feature 1..1755: note = Description of Artificial Sequence: Synthetic coding sequence
  source 1..1755: mol_type = other DNA
atgcacaccggcggcgagaccagcgcctgcaagcccagcagcgtgagactcgctccttctttctcattccatgctgccggcttgcaaatggcaggacagatgccccatagtcatcagtactcagaccgccgccaaccgaacattagtgaccaacaggtctccgcactgagttattctgatcaaattcagcagccactcacgaaccaggtaatgcccgatattgtcatgctgcagaggcgaatgccacagacatttcgagaccccgctactgcacccctgcgtaagttaagcgttgatctgataaaaacttataagcacatcaatgaggtctattacgccaaaaaaaagaggcgtcaccaacagggtcagggggacgattcaagccataaaaaagagcgaaaagtctataatgacgggtatgatgatgataactacgactatatcgtaaagaacggggagaaatggatggaccgctacgagatagatagtttgatcggcaagggatctttcggacaggtggtaaaggcatatgaccgggtcgagcaggaatgggtcgccatcaagatcataaaaaacaagaaagcatttctcaaccaagcacagattgaggtgagacttttagagctgatgaacaagcacgacaccgagatgaaatattatatagtacacttaaagcgccactttatgttcagaaatcacttatgtttggtgtttgagatgctatcctacaacctttacgatctgctgcgaaatacaaattttcgcggggtgtcgctgaatctgaccaggaaattcgcccagcagatgtgcacagccctgctttttttggctacgcccgaactgtcaattattcactgcgacttgaaacctgaaaatatcctgctgtgtaatcctaaacgcagcgcaataaagatcgtggatttcggctcatcatgtcagctgggccagcgtatttaccagtacatccagagtaggttctatcggtctcctgaggtcctgctgggtatgccatacgacctggcaattgacatgtggagccttggttgtatcctagtagagatgcatactggggagccgttattcagcggggccaacgaagtggaccagatgaacaagattgtggaagtcctgggtataccacctgctcatatattggaccaggctcccaaggcccgtaaattctttgaaaagctacccgacgggacctggaatttgaaaaagacaaaagatggcaaacgcgagtacaagcccccaggtacccgcaaattgcataacattctcggcgtggagaccggaggacccggtgggaggcgagcgggcgagtcaggccatactgtcgcagactatcttaagtttaaagatctaatcctgcgaatgctggattacgatccaaagacccggatccagccctattacgccctgcaacactcgtttttcaaaaaaacggccgatgaggggaccaacacttctaattccgtctctacctcaccagctatggaacagtcacagtccagcggcaccaccagcagcacgtcaagctctagcggaggaagttctggcacctccaactccggacgggcccgcagcgatcccacgcaccagcacaggcacagtgggggacacttcaccgccgcggtgcaagcaatggactgcgaaacccactcgccccaggtgagcagtcatgtggtccacttgttagttagtccagctatactgcggtggtcaagcacgggctgtcaggtgcctctggaatag

SEQ ID NO: 185946 - DNA, 141 bp, synthetic construct
  misc_feature 1..141: note = Description of Artificial Sequence: Synthetic coding sequence
  source 1..141: mol_type = other DNA
atgcacaccggcggcgagaccagcgcctgcaagcccagcagcgtgcgcttagccccaagtttttccttccacgccgccggcctgcagatggccggtcagatgccgcattctcatcagtatagcgatcgcagacagccttag

SEQ ID NO: 185947 - DNA, 1608 bp, synthetic construct
  misc_feature 1..1608: note = Description of Artificial Sequence: Synthetic coding sequence
  source 1..1608: mol_type = other DNA
atgttccggaaccacctgtgcctggtgttcgagatgctgagctacaacctgtacgatttgctccgcaatacgaacttccgcggagtcagcttgaatctgacccgaaagtttgcccagcagatgtgcaccgccctgttgttcctggctacacccgagctgagtattattcactgcgacttaaaacccgagaacatcctcctgtgtaaccccaagcgatcagcaatcaagatcgtagactttggctcctcttgtcagctgggtcaacgcatataccagtacatccaaagcaggttttacaggtcccctgaagtgttgttaggaatgccatacgacctagcaatcgacatgtggagcctgggctgcatacttgtggaaatgcatactggcgaacctctgttctccggggcaaatgaagtggatcagatgaataagattgtggaagtgctgggaatacctcccgctcatatcctcgatcaggcccccaaagcacggaagttctttgagaaacttcctgacggcacatggaacctgaaaaagactaaagatggcaaacgggagtacaagcccccaggcacgcgcaagttgcacaacattttaggcgtcgagacaggtggcccggggggccggcgagcgggggagagcggccacacggtggccgactacttgaaatttaaagatcttatcttgcggatgttagactatgatcctaaaactaggatccagccctattacgccctgcagcactcattctttaaaaagacagcagatgaaggtaccaacacaagcaactctgtgtccacctcaccagccatggagcagagccagagcagcggcaccacttcatcaaccagctcttcttccggcggcagcagcggtaccagtaattctggccgagccaggtctgaccccacacatcagcatagacactctggaggacactttacagctgccgtgcaggcaatggactgtgaaacccacagtccacaagtgcggcagcagttccccgctccactgggatggtccggcaccgaggctccaactcaggtaacagttgagacacaccccgtacaggaaaccacctttcatgtagcaccacagcagaacgcccttcatcaccaccatggaaatagttctcaccaccatcaccatcaccatcatcaccatcaccaccatggccagcaggccttgggtaaccgtaccagacctagagtttacaacagccccaccaacagcagctcgacacaggattctatggaggtaggtcattcgcatcatagtatgactagcctgtcgagttccacaacttcctcgagtacttcttcatcgtccactggcaaccaggggaatcaggcttaccagaaccggcccgtggcggccaacacattagattttggacaaaatggggccatggacgtgaacctgacggtctattccaatccgcgacaggagaccggcatcgctggacatcctacctatcaattctccgcgaatacaggtcctgcccactacatgacggagggacacctgacgatgcgacaaggtgctgatcgtgaagaaagcccaatgaccggcgtgtgtgtgcagcagtcgcccgttgcctcaagctag

SEQ ID NO: 185948 - DNA, 1890 bp, synthetic construct
  misc_feature 1..1890: note = Description of Artificial Sequence: Synthetic coding sequence
  source 1..1890: mol_type = other DNA
atggccgtgccccccggccacggccccttcagcggcttccccggcccccaagagcacacccaggtgctccccgacgtccgcttgctcccacggcgcctgcctctcgctttccgggatgctacctccgcacccttgcgcaagttgagtgtggatctgatcaaaacgtacaaacacattaatgaggtatattacgctaaaaagaagcggcgggcccagcaggcccctcctcaagacagctccaacaagaaggagaaaaaagtgctgaaccatggttacgacgatgacaaccacgactacattgtgagaagtggagaacgttggctcgaacgctatgagatcgacagtcttatcggtaaaggctccttcgggcaggtcgtcaaagcttatgatcatcagacacaggaattggtcgctatcaagataattaaaaacaaaaaggcctttttaaatcaagctcagatcgaactacgcctgctggagctgatgaatcagcatgatacggagatgaaatattacatcgttcacttgaaacgccatttcatgttccgcaaccacctgtgccttgtgttcgagttgctctcctacaacttatatgacttattacgcaacacccactttcggggcgttagtctgaatctgacgcgaaaattagcccagcagctgtgtactgctctgttgtttcttgctacgccggagctgagcatcatccattgcgacctgaagccggaaaatatcctcctatgcaatcccaagcggtctgccatcaaaatcgtggacttcggcagtagctgccaactaggacaacggatttatcagtacattcaatccaggttttatcggagcccagaagtccttcttggcacaccatacgacctcgccatcgacatgtggtccttgggttgcatacttgtggaaatgcatacaggcgagccactgttcagtgggtctaacgaggtggatcagatgaacagaattgtggaagtgctgggaattccaccagccgctatgctggaccaggcccccaaagcccggaagtactttgagaggttgcccggcggaggctggaccctgcgaaggaccaaggaactgcgaaaggattatcaggggcccggtacaaggagattgcaggaagtgctgggcgtgcagacgggagggccagggggccgtcgggccggagaaccgggccacagccctgccgattatctgcggttccaggacctggtactgagaatgttggagtatgaacccgcggccagaatctcccctttgggggcacttcagcacgggttcttcaggcgtactgcagacgaagcaacaaataccggaccggccggctcaagcgcctcaacatcgccagctcccttggacacatgtccctcatcaagtaccgcttcctctattagtagcagtggcggatcaagcggatcaagttccgataacagaacttatagatacagtaatagatattgcggaggccccggcccccctatcactgactgcgagatgaattccccacaggtccctccctctcaaccactgaggccatgggctggcggcgatgtgcctcataagacacaccaggcaccagccagcgctagttccttacccgggacaggggctcaactacctcctcaacccagatatctgggaagaccccccagtcccactagtcccccaccgccagaactcatggacgtgagcctcgtcggagggccggctgactgcagtcccccacaccctgcccccgcgccacagcaccccgctgcgagcgccctgcggacgaggatgaccggcgggaggcctcccctgccaccgccagatgacccggccacattggggccccatttgggcctgagaggcgttccacagtcgacagccgcaagctcctag

SEQ ID NO: 185949 - DNA, 1806 bp, synthetic construct
  misc_feature 1..1806: note = Description of Artificial Sequence: Synthetic coding sequence
  source 1..1806: mol_type = other DNA
atggccgtgccccccggccacggccccttcagcggcttccccggcccccaagagcacacccaggtcctgcccgacgtgcgactactaccacggagacttccgctggcgtttcgtgatgcaacatctgcaccattgagaaagttgtcggtcgacttgattaaaacctacaagcatatcaacgaggtatactatgcaaagaaaaaaagaagagcgcagcaggcaccaccccaggacagtagtaataaaaaagaaaaaaaggtacttaaccatgggtatgacgatgacaatcacgattacattgtgagatccggcgagaggtggttggaacgctatgagattgactcactgattggcaaaggctccttcgggcaggtggtcaaggcctacgatcatcagacacaggaactggtggcaattaagattatcaagaataaaaaggcctttttgaaccaagcccaaatcgaactacgcttacttgaactgatgaaccagcacgatacagagatgaagtattacattgtgcatctgaaacggcactttatgtttcgaaaccacctgtgcttggtttttgaactgctgtcctacaacctttatgatctgctgagaaacacacacttccggggtgtttccctaaatctaactcgcaaattggcacagcaactgtgtactgccctccttttcttagctacccctgagttaagtatcatacattgtgaccttaagcctgagaacatactcctgtgcaaccctaaacggtccgccatcaagatcgtggactttgggagctcctgccagttggggcagcgcatctaccaatacattcagtcacgcttttaccggtctcccgaggtactgctgggcaccccctacgacctcgctatcgacatgtggagtctgggatgcattcttgtcgagatgcatacaggggaaccactctttagcggtagcaacgaggtggaccagatgaatagaatcgtcgaagtcctcggaatccccccagccgcgatgctcgaccaggctcccaaggcaaggaaatactttgagcggctgcctgggggaggatggacactgagacgcactaaagagctgagaaaagattaccagggacctggaactcgaagactccaggaggacctcgtgcttcgaatgctggaatatgagcccgcggcacggatcagtcccttaggggctttgcagcatggattctttagacgaaccgcagacgaagcaaccaatacaggcccagccggttcatctgcaagtacctcccccgccccactcgacacctgtccctcaagctcaacagcaagctctatcagcagctctgggggttccagtgggagctccagcgacaacaggacgtaccggtactctaacagatactgtgggggacctgggccacccattactgactgcgagatgaacagtccccaggtgccgccaagccaacctttgcgaccctgggcagggggcgacgttccccacaaaacacaccaggctcccgcctccgccagctctcttcccggtacaggcgctcaactgccgccgcagcctagatatcttggtaggcctccaagccccaccagccctcctccccccgagctaatggacgtgagtttagtcggaggccccgccgactgttcccctcctcatccggcaccggcccctcaacaccctgccgcttctgcgttgcggaccaggatgactggtggccggcctcccctccccccacccgatgaccccgccaccctggggcctcacctggggctcagaggcgttccgcagagcacggccgctagcagctag

SEQ ID NO: 185950 - DNA, 1770 bp, synthetic construct
  misc_feature 1..1770: note = Description of Artificial Sequence: Synthetic coding sequence
  source 1..1770: mol_type = other DNA
atggccgtgccccccggccacggccccttcagcggcttccccggcccccaggagcacacacaagttctcccagacgtccgcttgttgccccgccgcctacccctcgcattccgcgacgccactagtgctccacttagaaagttaagcgtggacttgataaaaacctataagcacatcaacgaagtttactatgctaagaaaaaacggagggctcagcaggctcccccccaagactcgagcaataagaaggagaagaaagtcctgaatcacggctatgacgatgataaccatgactacatcgtgagatctggtgagcgttggctggagcgctatgagatcgatagcctgataggaaaaggttccttcggacaggtggtcaaagcatatgatcaccaaactcaggaattggtcgctatcaaaattatcaagaataagaaggccttcttgaaccaggcacagatcgagttgcgcctgttggagctgatgaatcagcacgacactgagatgaagtactatatcgtccatctgaagaggcactttatgtttcgtaatcatttgtgtctggttttcgaactcctcagttataatctgtatgatctactgcgcaacacccactttcgtggagtcagcttgaatctcacacgaaaactggctcagcagctctgcacagcactgctctttctggcaacccctgaactttccatcattcattgtgacctgaaaccagaaaacatcttattgtgtaacccgaaacgttctgccatcaaaattgtggatttcgggagctcatgccagttaggccagcgcatataccagtatatacaaagcaggttctaccgcagtcctgaggtgctactcggaaccccctacgaccttgccatcgacatgtggtccctcgggtgtatcctggtggaaatgcacactggggagcccctgtttagcgggagcaacgaagtggatcagatgaacaggattgtagaggtgctgggtattccccctgctgctatgctcgaccaggcccccaaagccaggaaatatttcgagcgactccctggagggggatggaccctgcggcgcacaaaggagctgcggaaggatctcgtgctgcggatgctcgaatatgagcctgccgcccgcatcagccctctgggggctctgcagcacggattttttcgaaggactgcagacgaggccaccaacacgggacctgccggatcatccgcctctacttcacccgccccactcgacacctgtccatcttcatcgaccgcgagtagtatatcttcaagcggcgggtcgtcaggaagttctagtgacaataggacttaccgatactctaaccgctactgtggcggaccagggcctcctattaccgattgcgagatgaatagccctcaggtccctccaagtcaacccttgcgcccatgggccggcggcgacgtgccccacaagacccaccaggcacccgccagtgcgtcaagtctcccaggaacaggagctcagctccccccccagcccaggtatctggggcgaccccctagccccacgtcccctccacccccagagcttatggacgtcagcctggtgggtggaccagctgattgtagcccgccccaccccgcacctgcccctcaacatcctgctgccagcgctctccgtacacgcatgacgggcggaaggcctcctctccctcctccagatgatccggctaccctgggccctcacctgggactgcggggcgtaccccagagtacagctgcatcttcctag

SEQ ID NO: 185951 - DNA, 285 bp, synthetic construct
  misc_feature 1..285: note = Description of Artificial Sequence: Synthetic coding sequence
  source 1..285: mol_type = other DNA
atgaacgaccacctgcacgtgggcagccacgcccacggccagatccaggtacagcaactgtttgaggacaactccaacaaacggactgtgctcacaacacaaccaaacggcctgaccactgtaggaaagacaggactgcccgtggtgcccgaaagacagttagattccatacaccggcggcagggttcttccaccagcctgaagtcaatggaaggtatgggcaaagtgaaggccactcccatgacacccgaacaggctatgaagcagtatatgcagaaactgtag

SEQ ID NO: 185952 - DNA, 1806 bp, synthetic construct
  misc_feature 1..1806: note = Description of Artificial Sequence: Synthetic coding sequence
  source 1..1806: mol_type = other DNA
atgctgacccggaagcccagcgccgccgcccccgccgcctaccccaccggccgggggggagatagcgcagttcggcagctgcaggcttctccgggtctcggagctggggcaacaaggtcgggtgtgggcaccggccctccgtcccctatcgcactgccaccactgagagcctccaatgcagccgccgctgctcacaccattggggggtccaaacacactatgaacgatcacctgcatgtgggcagccacgcgcatgggcagatccaggtgcagcagctctttgaggataattctaacaagcgcactgtattgacaacccagcccaacggcctcacaacagtgggaaaaaccggtttaccagtcgttcccgaacggcagctggactcaatccacagacggcaggggagctctaccagtttgaaaagtatggaaggtatggggaaggtcaaagcaacccctatgacgccagaacaagcaatgaagcagtacatgcagaaattgacagcctttgaacatcatgagatatttagctatccagagatctatttcctaggcctgaacgcaaaaaaaagacagggtatgaccggtgggccgaacaatggtggctacgacgatgaccagggatcctacgtgcaggtgccacacgaccacgttgcctatcgctacgaagtgctgaaggtcatcggtaaaggctcatttggtcaggtggtcaaagcttatgaccacaaagtgcaccagcacgtagcgctgaaaatggtccggaacgaaaagagatttcacaggcaggctgcggaagagattagaattctggagcatctgcgcaagcaggacaaggataacaccatgaatgtaatccatatgctggagaattttacatttcgaaatcatatctgtatgacatttgagctcttaagcatgaacctctatgaattaatcaagaaaaataagttccagggtttttcactgccgctggttcgcaaattcgcccactcgattctacaatgcctggacgctctgcacaagaatagaataatacactgtgacctaaagccagagaacatcctactgaaacagcagggacgatcaggaatcaaggtgatcgatttcggatcctcctgctatgagcatcaaagagtgtatacatacatccaaagcagattttacagagctcctgaggtgatccttggagcccgatacggcatgcctatcgatatgtggtcgctcgggtgcatcctagcagagctcctcactggctacccattgctgcctggggaggacgagggggatcagcttgcatgtatgattgaactccttggcatgccaagccagaagctgctggacgcatccaaacgagcaaagaacttcgtaagttcaaaggggtacccccggtactgcacagtgaccactctttcagatgggtccgtggttctcaatgggggcaggagtagacgaggaaaactgcgtggcccaccagagagtcgggaatggggaaatgctctgaaaggctgtgatgacccgctgttcctcgacttccttaagcagtgcctcgagtgggatcccgctgttaggatgacgcccggccaggccttgaggcatccttggctgcgacgaaggctgcctaagcccccaacaggagagaaaacttcagtgaaacgaattaccgagtcaacaggagcaattacttctatctctaagttaccccccccaagctccagcgcatccaaactgcgcactaacttagcccaaatgaccgacgcaaatggaaacattcagcagcggacagtcttacctaaactggtgtcatag

SEQ ID NO: 185953 - DNA, 1587 bp, synthetic construct
  misc_feature 1..1587: note = Description of Artificial Sequence: Synthetic coding sequence
  source 1..1587: mol_type = other DNA
atgaacgaccacctgcacgtgggcagccacgcccacggccagatccaagtgcagcagctcttcgaggacaactccaataagcggactgtccttaccactcagcccaatggacttaccaccgtgggtaagactggtctcccggtcgtgccagagcgccagctagattccatacacaggcgtcagggatcgagcaccagcttaaagtcaatggaagggatgggaaaggttaaggcgacccctatgaccccagagcaagccatgaaacagtatatgcagaagctgaccgccttcgagcaccatgagatattttcctatcctgagatttactttctgggcttaaacgctaagaaaagacaaggtatgactggcgggcccaacaacggcgggtacgatgatgaccagggatcatacgtccaagtccctcatgaccacgttgcctatcgctacgaagtgctcaaggtgattgggaaaggatccttcggccaggtcgtgaaggcctacgaccacaaagtgcaccagcatgtggccctcaaaatggtaaggaatgaaaagaggttccacagacaggctgcggaggagatacgtatcctcgaacatctcagaaaacaggacaaggacaatacgatgaacgtgattcacatgctggaaaacttcactttccggaaccacatatgcatgactttcgagctgttaagtatgaatctgtatgaactgatcaagaagaataaatttcagggattctccttgcccctcgtacgcaagttcgcgcattccatactccaatgtctggatgcactgcacaaaaatagaattattcactgtgatctgaaaccagagaatattcttctcaaacagcaagggcgctcaggaataaaggtgatcgacttcggatctagctgctacgagcaccagcgagtatatacttatatccaatctcggttctacagggccccagaggttatcctaggagcgaggtacgggatgccaattgatatgtggtcccttggttgcattctggccgagctcctgaccggatatccactcctgccgggggaggatgagggagaccagctcgcttgtatgatcgagctgctcggtatgccttcccagaagctgctcgacgcatccaaaagggctaaaaattttgtgtccagcaagggatatcctcgatattgcactgttaccacactgtcggatggctccgtggtcctaaatggcggtcgttctcgcagaggcaaattgcgaggtccacctgaatcacgggaatggggtaatgctctgaaggggtgcgatgacccactttttctggattttctgaagcagtgtctggagtgggaccccgccgttcggatgactcccggtcaggcgctgagacatccgtggttgaggcggaggctacccaagcctccgacgggggagaaaacctcggtaaaaagaatcactgagagtacgggcgccatcacctccatttccaagctgcctcctccttcctcctccgcctcaaaactgcgcactaacctcgctcagatgactgacgctaatgggaacatccagcaaagaacagtgctccctaaactggtgagttag

SEQ ID NO: 185954 - DNA, 471 bp, synthetic construct
  misc_feature 1..471: note = Description of Artificial Sequence: Synthetic coding sequence
  source 1..471: mol_type = other DNA
atgaacgaccacctgcacgtgggcagccacgcccacggccagatccaagtacagcagcttttcgaggacaatagcaataaacgaaccgtgctaactacacagcccaatgggctgacaacagtgggaaagaccggactgcccgttgtgcctgaacgccagctagacagcatccatagacgccaagggagttctaccagcttgaaatctatggaggggatggggaaggtcaaagcgactcccatgactccagagcaggctatgaagcaatacatgcagaaactcaccgcttttgaacaccacgaaatctttagctaccccgagatttatttccttggcctgaacgccaagaaacggcagggcatgactggtggtcctaacaatggcgggtacgatgacgaccagggctcctacgtgcaggtgccccatgatcacgttgcctacagatatgaagtgctgaaggtaatcggttag

SEQ ID NO: 185955 - DNA, 1707 bp, synthetic construct
  misc_feature 1..1707: note = Description of Artificial Sequence: Synthetic coding sequence
  source 1..1707: mol_type = other DNA
atgaagtggaaggagaagctgggcgacggcgtgtacgacaccttcatgatgatcgatgaaaccaagtgccccccgtgttctaatgttctgtgcaacccttcggagcctccgccacctcgccggctaaacatgacgaccgaacagttcactggagaccatacacagcatttcctggatggtggggagatgaaagttgaacagctttttcaggaattcgggaacagaaagtccaatactattcagtctgatggaatctcagatagtgaaaaatgttcacctactgtctcgcagggcaaatcctccgactgtcttaatacagtgaagagcaactcctcctctaaagcacctaaagtggttccccttacaccagagcaagccctgaagcagtataagcaccacctcacagcgtatgaaaaactggaaatcatcaattacccagaaatctattttgtgggcccaaatgccaagaagcgccatggggtgatcggaggccccaacaacggcggctatgacgacgcagatggcgcttatatccacgtgcctagggatcacctcgcctacaggtatgaagtgcttaagatcataggtaagggatcctttggccaagtggctcgcgtgtacgaccataaactcaggcagtacgtcgctctgaagatggtaagaaatgagaaacggtttcacagacaagcggctgaagagatacggatcctcgagcatctcaaaaagcaggataagaccgggtcgatgaacgtgatccacatgcttgaatccttcaccttccgcaatcacgtttgtatggcgtttgagctgctcagtatcgacctgtacgagcttattaaaaaaaacaaattccaaggcttttctgtgcagctcgtccgcaagttcgcacagtcaattcttcaatcattggatgcattgcataaaaataagatcatccattgtgacctcaagccagagaacatcttactgaaacaccatggacgttcctctaccaaagtcatagactttggaagcagttgctttgagtaccagaaattatatacttatattcagtcgcgcttttaccgggcgccagagatcatactgggaagtcgttactcaacacctatcgatatatggtcctttggatgtatcttggcagagctgctgaccgggcagcctcttttccccggagaggacgaaggagaccagttggcttgtatgatggagcttctgggcatgcctccaccaaaattactagagcagagcaaacgagctaaatactttattaactcaaaagggattccaagatactgtagtgtcacaacccaagcagacggccgggtggtgttggtgggggggagaagcaggaggggcaaaaaacgtggcccacccgggagtaaagactggggcacagcgttgaaagggtgcgatgattatctctttatcgagttcttgaagcggtgcctccactgggacccttctgcaaggctcacacccgcccaggctctgcgacatccttggattagcaaatccgtgccaagacctctcacgaccatagacaaggtatctggtaaacgtgtggttaatcctgcctccgccttccagggactgggctcaaaactccctcccgtcgtgggaatcgccaacaaactgaaggcaaaccttatgagcgagaccaatggaagcattccgctttgtagcgtgcttcctaagctcattagctag

SEQ ID NO: 185956 - DNA, 1707 bp, synthetic construct
  misc_feature 1..1707: note = Description of Artificial Sequence: Synthetic coding sequence
  source 1..1707: mol_type = other DNA
atgaagtggaaggagaagctgggcgacggcgtgtacgacaccttcatgatgattgatgagactaagtgtccaccatgttctaacgttttatgtaatccctccgagccacctccccctcggcggctgaatatgacaaccgagcagtttaccggcgaccacacacagcatttccttgatggaggcgaaatgaaggtggaacagcttttccaagagtttggcaataggaagtctaacacaatccagtctgatggcatctccgattctgagaagtgcagtccaactgtttcacaggggaaaagtagtgactgtcttaacacagtgaagtctaattcaagcagtaaggctcccaaagtagtacctctgacccccgagcaagcccttaagcagtacaaacaccacctcactgcctacgagaagctcgagattattaactacccagagatttatttcgtcggtccgaacgctaaaaaaagacatggcgtaataggcggccccaacaacggcggctacgacgatgcagacggagcttatatacacgtgcctcgggaccatctggcttacagatacgaggtgctaaagattattggaaagggctcctttggccaggtagcgagagtgtatgaccacaagttgcgccagtatgtcgcattgaagatggtgcgcaacgaaaaaagatttcacaggcaggctgccgaagagataagaattctcgaacacctaaagaaacaagacaagacaggctctatgaacgtgattcacatgctggagtcattcacgttccgcaaccatgtgtgtatggcttttgaactcctgtctatcgacttgtacgagcttatcaaaaagaacaagttccagggattctcggtccagctggttcggaagtttgcccaatccatcctgcagtcactggacgccttgcacaagaacaaaattatccattgcgacctaaagcctgaaaacattctcctcaagcatcatgggagaagcagcaccaaggtaatcgactttggctcttcatgtttcgagtaccagaaactgtacacctatatccagtcccggttttaccgggcacctgaaataatattaggaagccgctattctacccctatcgatatctggagctttggctgtatcttggccgagctcctgactggccaacctctctttccgggggaagacgagggcgatcagctggcttgcatgatggagctccttggtatgcctccccccaagctcttggagcagtctaaacgagccaagtatttcattaattctaaggggattccaaggtattgcagcgtgaccacccaagccgacgggagagtcgtgctggtgggagggcgatcaagaagaggcaagaagagaggccctcccggttcgaaagattgggggactgccctgaaagggtgcgacgattacctgtttatcgaattcctgaagagatgcctgcattgggatccgtccgcgcgccttactcccgcccaagctcttaggcacccttggataagcaagagcgtccctagaccgctcaccacgatcgataaagtgtctggcaaaagagtcgtcaaccccgcgagcgcctttcagggtctgggcagtaagctgccacctgtggtggggatcgccaataagttaaaggcaaatctcatgtctgaaaccaacggctccattccactctgttctgttctgcctaaactcatcagttag

SEQ ID NO: 185957 - DNA, 1767 bp, synthetic construct
  misc_feature 1..1767: note = Description of Artificial Sequence: Synthetic coding sequence
  source 1..1767: mol_type = other DNA
atgggcggcaccgcccggggccccggccggaaggacgccggcccccccggtgctggattaccgcctcaacagcgtcgcctcggcgatggggtctacgacacatttatgatgatcgacgaaaccaaatgtcccccctgttcaaacgtcctgtgtaatcccagcgagccccctccaccacgaagactcaatatgacaaccgaacagtttacaggggaccacacacagcattttctagacgggggggaaatgaaagttgaacagttgtttcaggagtttggaaaccggaagagcaataccatccagtccgacggcatttcggactctgagaagtgcagtcccaccgtctcacagggcaagagctcagactgtctgaatactgtgaagagcaattcatcttccaaggcacctaaagtggtcccactgacccccgaacaggctctcaagcagtacaagcaccatctcacagcttatgaaaagctcgagattatcaattatccagaaatttacttcgtcggtcctaatgcaaaaaagcgccatggtgtgattggcggccccaataacggcggatatgatgacgctgacggagcttatattcacgtgccaagagaccacctggcgtaccggtacgaagttctgaagatcataggtaaggggagcttcggtcaggtggcgagagtgtatgaccacaaattgcgccaatatgttgcccttaagatggtgaggaatgaaaagagattccatagacaagccgctgaggaaattaggattctcgagcacttaaagaagcaggacaaaacgggttctatgaacgtcattcatatgctagagtcattcacctttcgaaatcacgtctgcatggccttcgaactcctgtctattgacctctatgagctgatcaagaagaacaaatttcaggggttttccgttcagttagtccgtaagttcgcacagtcaattctgcaaagtttggacgcattacataaaaataaaatcattcattgcgacctgaagcccgaaaacattctcctgaagcaccacgggcggtcctcgacaaaagtcattgacttcggttccagctgctttgagtaccagaagctttatacctatatccaatccagattctacagggctccagagatcatcctggggtcaaggtacagcactcccattgacatctggtcttttggctgcatactggccgagctcctgacaggtcaacccttgtttcctggcgaggacgagggcgaccagttggcttgtatgatggagctcctgggcatgcctccaccaaagcttttagaacaaagtaaacgggccaaatatttcattaactctaaaggaattccgcgttattgtagtgtcaccacacaagctgatggaagggtcgtgctagtgggaggacggtcacgtaggggaaagaagcgggggcccccggggtccaaagattggggtaccgcccttaaagggtgcgatgactacttgttcatagagttcctgaaaagatgtctgcactgggatccatcagcacggcttactccagctcaagctctacgccacccctggatctctaagagcgtcccacgtcctctgaccactatcgataaggtgtcaggtaagcgggttgtcaatcccgcttcagctttccagggcctgggttctaaactccctccggtggtagggatagccaataaattgaaggctaatttaatgagcgagacaaacggtagcattcctctttgttctgtccttcctaagctcatctcttag

SEQ ID NO: 185958 - DNA, 732 bp, synthetic construct
  misc_feature 1..732: note = Description of Artificial Sequence: Synthetic coding sequence
  source 1..732: mol_type = other DNA
atgaagtggaaggagaagctgggcgacggcgtgtacgacaccttcatgatgatcgacgagactaaatgtcccccctgttcaaacgtgttgtgcaacccaagcgagccaccccctcccaggagactaaacatgacaaccgagcagttcaccggcgaccatacacagcacttcctggacggcggggagatgaaagtggaacagctgttccaagagttcggaaacaggaagagcaacaccattcaatcagatggaatcagtgattcagagaaatgctcccctaccgtttcccagggcaagagttccgactgcctgaatacggttaagtccaactcctcctctaaggcgcctaaggtggttcctctgacacccgagcaagcccttaagcagtacaaacatcatctgacggcttatgagaaactggaaatcataaactatccagagatttattttgtgggccctaatgcaaagaaaagacatggggtgattgggggcccgaacaatggtggatacgatgatgcagacggcgcttatatccacgtgccgcgcgaccatctggcatatcgctatgaagtcttaaaaatcattgggaaaggtagttttggtcaggtggcacgcgtgtatgaccataagctgagacagtatgtggccctgaagatggtccgcaacgagaagcggtttcaccgccaggccgccgaagagatacgcatcctcgagcacttgaagaagcagtag

SEQ ID NO: 185959 - DNA, 1563 bp, synthetic construct
  misc_feature 1..1563: note = Description of Artificial Sequence: Synthetic coding sequence
  source 1..1563: mol_type = other DNA
atgcccgccagcgagctgaaggccagcgagatccccttccacccctccatcaaaacacaagaccccaaagccgaggagaagagtccaaaaaaacagaaggtgacactgactgcagcagaggcattaaagctgtttaagaaccaactgagcccctatgaacagagtgaaatcttgggctacgccgagctgtggtttctcggcctggaggccaaaaagcttgatacggcccccgagaaatttagcaaaactagctttgacgatgagcatggtttttacctgaaagtcctgcatgatcatatcgcctaccgatacgaggtgttagagactatcggcaaagggtcttttggtcaggtcgcaaagtgcctggatcataagaacaacgagttggtggctctaaaaatcattaggaacaaaaagaggtttcaccagcaggccctgatggaattaaagattctcgaagcccttcgcaagaaggacaaggataatacatacaacgtcgtgcacatgaaagattttttctacttccgtaaccacttctgtataacattcgaattgctaggaattaacctgtatgaacttatgaagaacaacaatttccagggattcagtctgagcatcgtgcgacgctttactctctcagttcttaagtgtctgcagatgctctccgtggagaagatcatccactgtgacctcaagcctgagaacatcgtgctctaccagaagggccaagccagcgtgaaagtgatcgatttcggctccagctgctacgaacaccaaaaggtctacacatatatccagagcaggttttatcgctcaccagaggtaatcctggggcacccttatgacgtggcaatagacatgtggtctctcgggtgcatcactgccgagctctacacaggatatcctcttttccccggcgaaaacgaagtggagcaactggcctgtattatggaggtccttggcttgccccctgcagggttcattcagactgcttcccggcgccagacctttttcgattcaaagggcttcccaaaaaatatcacgaataatcgcggtaagaagcgatatccagatagtaaggatctgaccatggtccttaagacgtatgacacatcctttctggatttccttaggagatgtctggtttgggagccatctcttcgaatgactccggatcaggccctcaaacacgcctggatccaccaaagtcgaaatctcaagccgcaaccccgccctcagacccttcggaagtcaaattcgttctttccctcagagacgcggaaagacaaggtccagggctgtcaccatagctctcgcaaagccgacgagatcacgaaggaaactaccgagaaaactaaggatagccccaccaagcacgtccaacacagcggcgaccagcaggactgcctgcagcatggcgctgacaccgttcagttgccccagctggtcgacgcacccaaaaagtctgaggcggccgtgggcgcagaggtgtccatgacatctccaggacaatccaagaatttctccttgaaaaacactaatgtgctccctcccattgtatag

SEQ ID NO: 185960 - DNA, 1563 bp, synthetic construct
  misc_feature 1..1563: note = Description of Artificial Sequence: Synthetic coding sequence
  source 1..1563: mol_type = other DNA
atgcccgccagcgagctgaaggccagcgagatccccttccaccccagtatcaagacacaggatccgaaggccgaggaaaaaagcccaaagaagcagaaggtaaccctaacggccgcagaggccctgaaactgttcaagaatcagctgtctccatatgagcagtcggagatcttgggctatgcagaattgtggtttcttggattggaagctaagaaactcgatactgcaccagaaaagttcagcaagacatcattcgacgatgagcacggcttctacctgaaggtcctgcacgaccacatcgcctatcgttatgaggtcctcgaaacgataggtaaaggaagtttcggccaggtcgccaaatgcttggatcacaaaaacaatgagcttgtggcactgaagatcatacggaacaagaaacgctttcatcaacaggcccttatggagctgaaaattctggaagctttgaggaagaaggacaaagacaacacctacaacgtggtccatatgaaggatttcttctactttagaaaccatttttgtatcacctttgagctcctggggattaatctatatgaactgatgaagaacaataactttcagggattttctctgtcgatagtacgccggtttactttgtctgtgctgaagtgccttcagatgctttctgtcgagaagataattcactgtgatctcaagcctgagaacatcgtactctaccagaagggccaagctagcgtgaaggtgattgattttggctctagttgttatgagcaccagaaggtgtacacctacattcagtcaaggttttacaggtcaccggaggtgattctcggccatccatatgatgtggctatcgatatgtggtcactcggatgcataacggccgagctctatacaggttaccctctctttcccggcgaaaatgaggtcgagcagctggcatgtatcatggaggttcttggcctccccccggccgggttcatccaaacagccagcaggcgtcagactttctttgatagtaaaggctttcccaagaacattacaaacaatagggggaaaaaacgataccccgacagcaaggacctgaccatggtcctgaagacttatgacacttcttttctcgattttctgcggagatgcctcgtgtgggagccatccttgcgaatgacccctgaccaggcactaaagcacgcgtggatccaccagtcccgcaacctgaagcctcagcctaggcctcagactctgcgcaagtcaaattcttttttcccctcggaaacacgcaaagataaggtgcaagggtgccaccactcaagcagaaaggctgacgagataaccaaggagaccacagagaagacgaaagacagccccactaaacacgtgcagcattccggagatcagcaggactgccttcagcacggagccgataccgttcagctgccacaactggtcgatgctccaaagaaatctgaagcagccgtcggagcggaggtcagtatgacatctcccggtcagtcaaagaacttctccttgaaaaacaccaacgtgttgccccctattgtgtag

SEQ ID NO: 185961 - DNA, 1560 bp, synthetic construct
  misc_feature 1..1560: note = Description of Artificial Sequence: Synthetic coding sequence
  source 1..1560: mol_type = other DNA
atgcccgccagcgagctgaaggccagcgagatccccttccacccctccataaagacacaggaccccaaagctgaggaaaaaagtccaaagaagcagaaggttacactgactgcggcagaggcgttgaagctctttaagaaccagctgtctccttacgaacagtctgagatcctgggatacgccgaactgtggttccttggtcttgaagctaaaaaactggacacagccccagaaaagttctctaagaccagtttcgacgatgagcacggattctatctaaaggtgcttcacgatcatatcgcctaccggtacgaagtgttggaaaccatcgggaagggtagctttgggcaggtagccaaatgcctggaccacaagaataacgaactcgtggccctcaaaatcatcagaaataagaagaggttccaccagcaggccctgatggagcttaaaatcctcgaggctcttcgcaagaaagacaaagacaacacatacaatgtggtccatatgaaagactttttctatttcagaaaccacttctgcatcacttttgaactgcttggtattaacctttacgaattgatgaaaaacaataacttccagggatttagcttgagtatcgttaggaggtttacactgtctgtactcaaatgtttacagatgctctctgtggagaagatcattcactgtgatttgaagcccgagaacattgttctgtaccagaaaggccaagcaagtgttaaggttatcgactttggaagctcttgctatgagcaccagaaagtgtacacctacatccaatctcgattctatagaagtccagaggtcattctgggccacccctacgatgtagccatcgatatgtggtccctcggttgcatcacagcggaactatacaccggatatccactgtttccaggagagaatgaggtggagcagctcgcatgcattatggaggtgcttgggctcccccctgccggattcattcagaccgcttctcggcggcagaccttttttgactctaaaggatttcccaaaaacattactaataacaggggcaagaagcgatatcccgacagcaaagaccttacgatggttcttaaaacttacgacacttcatttctggacttcctccggcggtgcctggtgtgggaaccgtctttgcgtatgactcccgatcaggcgctcaagcatgcttggatccatcagagcaggaatctcaaaccacagcccagaccccagacgcttcggaaaagtaactctttttttccatccgagaccagaaaggataaagttcagggctgccaccactccagtagaaaagatgagatcaccaaggaaaccactgaaaaaaccaaggactcgcccaccaaacacgtgcaacatagcggcgaccagcaggactgcttgcaacacggcgcagataccgtgcagctgccgcagctggtggacgcaccaaagaaaagtgaagccgcagtgggggcagaggtcagtatgacgtctccaggccagtctaagaacttttctctgaaaaatacaaacgttctgccccccatcgtgtag

SEQ ID NO: 185962 - DNA, 474 bp, synthetic construct
  misc_feature 1..474: note = Description of Artificial Sequence: Synthetic coding sequence
  source 1..474: mol_type = other DNA
atggtgctgaagacctacgacaccagcttcctggacttcctgcggcgttgcctggtgtgggaaccttccctgcgaatgacccctgaccaggcgcttaagcacgcttggatacaccagagcaggaacctgaagccacaacctcgaccacaaactctccggaaaagcaacagtttctttccttccgaaacgcgaaaggataaagtgcagggctgccaccactcctcacgtaaggccgacgagattactaaagaaactacggagaagactaaggacagccctacaaagcacgtgcagcactcaggagaccaacaggattgtcttcagcacggcgccgatactgttcagttaccccagttagttgatgccccaaaaaaatctgaagccgcggtgggcgccgaggtgagcatgacaagtcctggccagagtaaaaacttttctcttaagaacacaaacgtactgccaccaatcgtgtag

SEQ ID NO: 185963 - DNA, 1011 bp, synthetic construct
  misc_feature 1..1011: note = Description of Artificial Sequence: Synthetic coding sequence
  source 1..1011: mol_type = other DNA
atgggcaactgcctgcaccgggccgagctgagccccagcaccgagaattccagtcaactagattttgaggacgtttggaacagctcgtacggtgtcaatgattcttttcctgatggagattacggtgccaatctcgaagccgctgctccatgccactcttgtaacttactcgacgattccgccctgcccttcttcattctgacaagtgtgctgggtatactggcatcttccacggtcttgttcatgctctttagacctttgtttaggtggcaattgtgtcccggatggcctgtcttggcccagctcgcagttgggagcgcactcttttcaatcgttgtccccgtactggcaccaggcctggggagtactcggtcgagcgcgctttgtagcctgggatattgtgtgtggtacgggagcgcatttgcacaggctctgcttctcggttgccacgcctccctggggcaccggcttggcgcaggtcaggtccctggactgactctgggtctgacagtgggcatctggggagttgccgcgttattaactcttcctgtgaccctcgcaagcggggcgtctggaggtttgtgcactctgatttactcaacagaactgaaggccctccaggcgactcatacggtagcttgtctcgccattttcgtgctcctgcctttgggtctgttcggcgctaaaggcctgaagaaagccctcggcatgggaccaggaccctggatgaacattctgtgggcatggtttattttctggtggccccacggtgtggtacttgggctggacttcctagtgcgaagtaagctgctactgctgtctacttgtttggcccagcaggccctggatctgttgctgaacctggcagaggctttagctatcttgcattgtgttgctactcccctgttactcgcactgttctgtcatcaggccacgcgcaccttactgccttccctcccactgccggaggggtggtcctcccatctggacaccttaggttcgaaaagttag

SEQ ID NO: 185964 - DNA, 1017 bp, synthetic construct
  misc_feature 1..1017: note = Description of Artificial Sequence: Synthetic coding sequence
  source 1..1017: mol_type = other DNA
atggccagcagcggctacgtgctgcaggccgagctgagccccagcacagagaatagttcacagctggattttgaggacgtgtggaatagtagttatggagttaacgattctttccctgatggggactacggtgcgaatctggaggctgccgcaccatgtcacagttgtaatctgttagacgactctgccctgccattctttattctcacatccgtattagggatcttggctagctccacagttctgttcatgcttttcagacccctgtttcggtggcagctatgtcccggatggcccgttctcgcgcagttggcagtggggtccgccttgttcagcatcgtagtgcccgtgttggcacctgggctgggctctacaagatccagcgcactttgttctctgggctattgtgtgtggtacggttcagcctttgcacaggccctgctgctggggtgtcacgcatcattgggccacaggctaggtgctggtcaagttcccggcctcaccctagggctgaccgttggcatttggggagtggctgcccttctgaccttgcccgttacgctggctagcggagcaagtgggggcttgtgcacactgatttacagcacagaactcaaggcactccaggctacgcataccgtggcatgcctcgcaattttcgtcttgctccctttaggtctctttggggcgaaggggctcaaaaaagcgctcgggatgggccccggcccctggatgaatattctctgggcttggtttatcttctggtggcctcatggcgtcgtactgggactagattttcttgtcaggtccaagctgcttttgctgagcacttgtctggcccagcaggcactggatcttttgcttaaccttgcagaggcactggctattctgcactgtgttgctactcccctactgctggcgctcttctgccaccaggccactaggacccttctcccttcattacctctccccgagggttggtcatcccatctagataccctgggatccaaatcatag

SEQ ID NO: 185965 - DNA, 1011 bp, synthetic construct
  misc_feature 1..1011: note = Description of Artificial Sequence: Synthetic coding sequence
  source 1..1011: mol_type = other DNA
atgggcaactgcctgcaccgggccgagctgagccccagcaccgagaattcatcgcagctcgacttcgaggatgtttggaacagctcatatggcgttaatgactccttccccgatggggattatggagccaatctcgaggctgctgccccctgccactcttgtaacctattagatgattccgctctgccctttttcattttgacgtctgtgctgggaatcctggccagttctaccgtcttgtttatgctttttcggcctcttttccggtggcagctgtgtcccggctggccagtgttagcccaactggcggttggctctgctctgttttccatagtggtccccgtgctggcccccggactggggtctacaaggtctagtgccctctgcagcctcggttactgtgtgtggtacgggtccgcctttgcgcaggctttactcctgggctgccatgcttctctcggacatagactgggcgccggacaggtgcctgggctaaccttgggccttaccgttggaatctggggagtcgcagccctgctcactctgccagtgactctggctagcggcgccagcgggggcctctgcacattaatttacagcacagaactcaaggcccttcaggccacgcacaccgtggcgtgtttagcaatcttcgtcctgctacccttaggcctgtttggagctaagggccttaagaaggcactcggcatgggacccggtccctggatgaacatcctgtgggcttggtttatcttctggtggccacacggggtggttttgggcctagactttttagtgcgctccaaacttctgctccttagcacgtgtctggcacaacaggccctggatttactgctgaacctggcggaagcgctcgccatcctccactgcgtggcgacgccactcctgctagcactgttctgtcatcaggcgacccgaacgcttctcccctccctgcccttgcccgaagggtggagcagccatttggatacacttggatcaaagtcatag

SEQ ID NO: 185966 - DNA, 468 bp, synthetic construct
  misc_feature 1..468: note = Description of Artificial Sequence: Synthetic coding sequence
  source 1..468: mol_type = other DNA
atggccagcagcggctacgtgctgcaggccgagctgagccccagcacagaaaactccagccagctggactttgaggacgtgtggaacagctcatatggagtcaatgactcctttcccgacggcgactacggagccaacctggaagccgccgctccatgccactcctgcaacttactcgatgattccgcactgccattttttatcctaactagcgtgttgggcatactggccagtagtacagtattgttcatgctattccgtccactgttcaggtggcagctgtgccccggttggccagtcctggcgcagcttgccgtggggtccgctctgttctctatagtcgtccccgtgctggctcctggactcggctcgaccaggtccagcgctctctgctcattaggctattgtgtgtggtatgggtcagccttcgcgcaggcgttgctacttggttgtcatgcaagcctctag

SEQ ID NO: 185967 - DNA, 1011 bp, synthetic construct
  misc_feature 1..1011: note = Description of Artificial Sequence: Synthetic coding sequence
  source 1..1011: mol_type = other DNA
atgggcaactgcctgcaccgggccgagctgagccccagcaccgagaatagcagccagctggactttgaggatgtgtggaattcaagttacggtgtcaatgactcatttccggacggcgattacggcgcaaatcttgaggcagctgccccatgtcatagctgcaatctcctggacgacagcgccctgcctttttttatacttacaagcgtcctgggtatcctcgctagctcaacagtgctattcatgctgttccggcccctgtttcggtggcaattgtgccctggatggcccgtgctggcacagttggccgtcgggagcgctcttttttctattgtcgtcccagttctggctcctggcctaggctcaaccagatcttccgctctttgctctctcggatattgcgtatggtacgggtcagcctttgcccaggctttgctccttgggtgtcacgccagtcttgggcaccggttgggggccggccaggtgcctggtctgaccctcggactcacggttggcatctggggcgtggccgctctcttgacattaccggtgactctggcatcaggggcctccggcgggttgtgcaccctcatctattctaccgaactgaaggcactgcaagccacgcacactgtggcctgcttggcgattttcgtgttactccccctgggactgtttggggccaaggggttgaaaaaggccctcgggatgggaccaggtccttggatgaatatcctctgggcttggttcattttctggtggccacatggtgtggtcctggggctagatttccttgttcgttctaagctgctgttgttgagcacctgcctcgcccagcaggcgttagacctgttactgaacctcgctgaggcgctggctatcctacactgcgttgccactcccctactgttggccctcttctgtcatcaggccaccaggaccctcctgccatcgctgccactgccagagggctggtcgtcccacctggacacccttggcagtaagtcatag

SEQ ID NO: 185968 - DNA, 2010 bp, synthetic construct
  misc_feature 1..2010: note = Description of Artificial Sequence: Synthetic coding sequence
  source 1..2010: mol_type = other DNA
atgggcagcaacagcagccggatcggcgacctgcccaagaacgagtacctgaagaaactgagcggaaccgagagtatttccgagaacgacccattttggaaccaactcttatcgttttcattcccagcgccaacaagctcctccgagctgaaacttctcgaggaggccaccatctctgtttgccgttctctggtggagaacaatcctcgtacaggcaacctgggggctctcattaaagtgtttctgagccggacaaaagagctgaagttaagtgccgagtgccagaatcacattttcatatggcaaacgcacaatgcactgttcatcatatgctgtctgttaaaagtcttcatctgtcagatgagcgaggaggagctgcagctccactttacatatgaggagaagtcccctggcaactacagttccgactccgaggatctgttggaggagctgctgtgctgcttgatgcagctcatcactgatatcccgctactggatattacctatgaaatatcggtcgaagctatcagcaccatggtggtctttcttagctgccaacttttccacaaggaagttctgaggcagtccataagtcataagtacttaatgcgcggtccatgcctgccatataccagtaagctggtaaagaccctcttgtacaactttattaggcaggaaaaaccaccacctccaggcgctcacgttttcccccaacagagcgatggcgggggtctcctgtatggcctggcttccggcgttgccacaggtctatggacggttttcaccctcggaggcgtcggttctaaagcagcagccagtccagaattgtcgtcaccactggcgaatcagtcgctcctcctgttgctcgtgctcgctaacctgaccgatgcgtccgacgcccctaacccgtaccgtcaggctattatgtcctttaagaacacacaggactcttctccatttccatccagcatccctcacgccttccagattaacttcaatagcctttacaccgctctatgcgaacagcagacctcggaccaagctactcttctactgtacacactcctacaccagaactcaaacatcagaacatacatgctagcccgaactgatatggagaaccttgtgttgcctatcctggagattctgtaccacgtggaggagagaaactcccaccatgtttacatggcactgataatcctcctcattctgactgaggacgacgggttcaatagatctatccacgaagtcatccttaaaaacattacttggtactctgagcgcgtgctgacagaaatttccctgggctccctcttaatactagttgtcataaggaccatccagtacaacatgacaagaacaagagataaatacttgcatacgaattgcctggccgctctagctaacatgtccgcacagttcagatccctgcaccagtatgcggctcaacggatcatcagcctgttttccttactgtcaaagaaacacaataaggtcctggaacaggctacacaatccctaagggggagcctgtctagcaacgatgtgcctctcccagactacgctcaggatctaaatgtgattgaagaagtgatccgcatgatgctggagattatcaattcttgtctgactaattccttacatcacaaccctaatttagtttacgctctcctgtataagcgcgacctgttcgagcagttcagaacacacccttcctttcaggacattatgcagaacatcgatttagtgatctcttttttcagcagcagattgctccaggccggcgctgaactatcggtggaacgcgtgcttgagatcattaaacaaggagtcgtggcattaccaaaagatcgtctcaagaagttccccgaactcaaatttaagtacgtggaggaggagcagcccgaagagttctttattccgtacgtttggtcccttgtctacaatagtgctgtcggtctgtactggaaccctcaagatattcagctgttcaccatggactctgattag

SEQ ID NO: 185969 - DNA, 519 bp, synthetic construct
  misc_feature 1..519: note = Description of Artificial Sequence: Synthetic coding sequence
  source 1..519: mol_type = other DNA
atggccctgatcatcctgctgatcctgaccgaggacgacggcttcaaccggtccatccacgaggtaatccttaagaatatcacttggtattctgagcgagtgctgacggaaatctctctcgggtctctcctcatcctggtcgtgatcagaacgattcagtacaacatgacgaggactcgtgataagtacctccacactaactgcctcgcagccctggcaaatatgagtgcccagtttcggagcctccatcagtacgccgcccaacggataatttcatatacctgccgccatctgcgtaggtatgtgtacgtcctggacaagctgtacttccctcatagtcattgctccactttgcagcactgttttagtactctgagtgataacggagaagaattgctatcgctgacatgttctcacatccttagatcctatgcaagcagcctcttcagtctcctgtcgaagaagcataacaaggtcctggaacaggctactcaatctctgaggggctccctgtcctag

SEQ ID NO: 185970 - DNA, 1440 bp, synthetic construct
  misc_feature 1..1440: note = Description of Artificial Sequence: Synthetic coding sequence
  source 1..1440: mol_type = other DNA
atgggcagcaacagcagccggatcggcgacctgcccaagaacgagtacttaaaaaagctaagcggcaccgaatccatatcagaaaatgacccgttttggaaccagctgctatctttcagctttcctgccccgacaagcagctccgagctcaagttattagaggaggcgacaatttcagtatgcaggtctttggccgggttgtggacggtgttcactttggggggtgtcggaagcaaagcagctgcctctccagagctctcgagcccattggccaatcagtccttactgctgcttttagtcttggccaacctgaccgatgcttccgatgcacctaacccgtaccgccaagcaattatgagctttaagaatactcaagacagctcccccttcccgtctagcatcccacatgcctttcaaatcaacttcaatagcctctacacggcactttgtgaacagcagacatcagaccaggcaactctgcttctgtataccctcttacaccagaacagcaacattaggacttacatgctggctagaaccgacatggagaaccttgttctgcccatcttggagatcctttaccacgtggaagaacgtaattctcaccacgtgtacatggccctgattatcctgctgatattaaccgaggatgacggatttaataggtctatacatgaggttattctgaaaaacataacttggtacagtgagcgagtcctgacagagatcagcctcggcagcctcctgattctggtggttattcggactattcaatacaatatgaccaggacgagggataaatatcttcacaccaattgccttgcggctttagccaatatgagtgcacagtttcgaagcctgcatcagtacgctgcccaaaggattatctccctgttctcgctcttgtcaaaaaagcacaacaaagtactggaacaggcaacacagtcgcttcgtggaagcctgagttcaaatgacgtcccgctccctgattatgctcaggacctgaacgtcatagaggaagtaattcggatgatgctggaaattataaacagctgcttgaccaattcgctccatcataatccaaatcttgtgtatgctctgctgtataagcgggacctgttcgagcagtttcgtacccacccatccttccaggacatcatgcaaaacattgacctggtcatttctttcttcagttcacgactgctacaagccggtgccgaacttagtgtcgagagggtgctggagattattaagcagggagtagtcgcattacccaaagaccgcttgaagaagtttccagaattgaagttcaagtatgtcgaggaagaacagccagaggaattcttcatcccttatgtatggagcctcgtctacaacagtgcagtcggcctgtactggaacccacaggatatccagcttttcaccatggatagtgattag

SEQ ID NO: 185971 - DNA, 3837 bp, synthetic construct
  misc_feature 1..3837: note = Description of Artificial Sequence: Synthetic coding sequence
  source 1..3837: mol_type = other DNA
atggcccagagcaagcggcacgtgtacagccggacccccagcggctctcgtatgtcagcagaggcttccgcccgacctcttcgggtggggtcccgggtggaggtcattggcaaggggcaccgcggcactgtggcatacgtgggcgctaccctcttcgctaccgggaagtgggtcggggtgattttggacgaagcgaagggcaagaacgacggaactgttcagggacgcaaatacttcacttgcgacgagggccatggaattttcgttcgtcaatcacagattcaggtattcgaggacggtgctgacacaacgtcaccagagactcctgacagcagtgcaagtaaggtactcaagcgcgaaggcaccgacacaacagcaaagacatccaagttgagagggctgaaacccaagaaagcaccaactgcgcggaagacaacaacacgcagacccaaaccgactaggcccgctagtaccggtgtcgccggggcctcatcaagcctcgggccatccggctccgcgtcagcaggcgaattgagttcttccgaaccaagcacacccgcccagacaccactggcagcccccattatacctacccccgtgctgacctctcccggcgccgttccccctctaccttctccaagcaaggaggaggagggattaagggctcaagttagagatcttgaggagaagttggagacactgcgactgaagcgcgcagaggacaaggctaaactgaaggaattggagaagcacaagattcagcttgaacaggtccaggagtggaagagtaaaatgcaagagcagcaggccgacttgcagaggcgtttgaaggaagcccgaaaagaagcaaaggaggccctagaagcgaaagagaggtatatggaggagatggcagacacagccgatgcaatcgaaatggcaacactggacaaggaaatggctgaggaacgcgctgaatctcttcagcaggaggtagaagccttgaaggaacgagtcgatgaactgactaccgaccttgaaatcctgaaggccgagattgaagagaagggctccgacggcgcggcttcaagttaccagctaaagcaactagaagaacagaatgcccgcctgaaagacgccctcgtaagaatgcgcgatctgtcctcttccgaaaaacaggaacatgttaagctgcagaagctgatggaaaaaaagaatcaggagctcgaagttgttaggcagcagcgcgagcggctgcaagaggaactgagtcaagccgagagcacgatcgacgagcttaaagaacaggtggacgctgccctgggcgcggaagaaatggtggagatgttgaccgaccggaacctgaatctcgaggagaaggtacgggaactccgcgagactgtgggtgacctcgaggccatgaatgagatgaatgacgagcttcaggagaatgccagggagacagaacttgaactgcgcgaacaactggacatggcaggggccagagtccgggaagctcagaagagagtagaggccgctcaggaaaccgtcgccgattaccagcagaccattaagaagtaccgccagcttacagcccacttacaagacgtgaacagagagcttacaaaccaacaagaggcttccgtggaacgccaacagcagcctcccccggagacttttgactttaagatcaagtttgcagagacaaaggcccacgccaaagccattgaaatggaactgcgccaaatggaagtggctcaggccaatcgacatatgtccttattgaccgccttcatgcctgacagcttcctgcggcctggcggagatcatgactgtgtcctggttctactgcttatgcctcgcttaatttgtaaagcggaattgatcagaaagcaagcccaagaaaaattcgagctgagtgagaactgttccgaacggccaggtctgcgaggtgcggccggggaacaactttcatttgccgcaggtctcgtgtactcacttagcctcctgcaggccacattgcatcggtacgagcacgctctttcccagtgctccgtagatgtttataagaaggttggtagtctgtaccctgagatgtccgcacacgagcgctctctcgactttctgatcgagctccttcacaaggatcagttggacgaaaccgtcaatgtcgaacctctaactaaagctattaaatactaccaacatctgtacagcatacaccttgccgaacagcccgaagattgcactatgcagctcgctgatcacatcaagttcacgcaatccgccctggattgtatgtccgtggaggtcgggcgactgagagccttccttcaggggggtcaggaggccaccgacattgcgctgttgcttagggatctggaaacctcctgctcagacatcagacagttttgcaagaagattaggagacgtatgcctggaaccgacgcgcccggcatacctgccgccctggcctttggcccgcaggtctcagataccttgctcgactgtagaaaacacctcacctgggtggtggccgtgctgcaggaagtggcagcagctgctgcacagttgatcgctccgctggcagagaatgaggggctgctcgttgccgctctcgaggagctcgccttcaaggcctcagagcagatctacgggactccctcaagcagcccttacgaatgtttaagacagtcatgcaatatactcatctccactatgaataagcttgcgacagcgatgcaagagggggagtatgatgcagagcgaccaccatccaagcccccacccgtggaactgcgggctgctgcactgagagcagagatcacggacgccgagggactgggattgaagctggaagacagggagaccgtgattaaggaactcaagaagtctctaaaaataaaaggagaagagctgtccgaagccaacgtgcgcctctcccttcttgagaagaagttggactctgctgccaaggatgccgacgaaagaatagaaaaggtgcagacaagactggaggaaactcaggctctccttcgaaaaaaagagaaagagttcgaggaaacgatggacgctttgcaagctgacatcgatcagttggaggcggaaaaagcggagctcaaacagcggctgaatagccagtctaagcggaccattgaggggctgaggggacccccaccaagcgggatcgcaactctggtctccggaatcgccggcgaggagcaacagaggggtgctattcctggtcaggcaccaggaagcgtcccagggcccggccttgtgaaggactcacccctccttctccagcagataagcgccatgcggctgcatatcagtcagctgcagcacgagaatagcattcttaagggtgcacagatgaaagcatcccttgcatccctgcctcccctacatgtagcgaaactgtctcacgagggccctgggtcagaacttccagcaggagcgctttaccgaaagacttctcagcttctagaaaccctaaaccagttatccacccacacccacgtcgtggacatcacccggaccagtcccgccgcaaaatccccatccgcacagcttatggagcaagtggcccagttgaaaagccttagcgacactgtggagaagctgaaggacgaagtcctcaaggagacagtgagtcagcggcctggcgccaccgtccccaccgatttcgctacatttccatcctccgctttccttagagcaaaagaggaacaacaggacgacactgtctacatgggtaaggtgacattttcatgcgctgccggttttggccagagacataggcttgtgctgacacaagagcagttgcaccagctgcattcgcgcttaatatcttag

SEQ ID NO: 185972 - DNA, 3786 bp, synthetic construct
  misc_feature 1..3786: note = Description of Artificial Sequence: Synthetic coding sequence
  source 1..3786: mol_type = other DNA
atgagcgccgaggccagcgcccggcccctgcgggtgggcagccgggtggaagtgattggaaaaggacaccgcggtaccgtggcttatgtaggcgctacccttttcgctactggcaaatgggtgggtgtgatcttagatgaagcgaaagggaaaaacgatggcactgtgcagggccgaaaatacttcacatgcgacgagggccacggcatttttgttaggcagagccagatccaagtgtttgaagatggggcagatacgactagccctgaaactccggactcttctgcttctaaggttctaaaacgcgaggggaccgacacaaccgccaaaacaagcaaattacgcggcctgaagcccaagaaagcaccaacagcgcggaagggccggcgtgtgaggactaagcccaccagacccgcaagtactggtgtcgctggcgcctcctcaagcctgggcccctccggaagcgcaagcgccggggaattatcctcttctgagcctagcacacctgcacaaacaccgctggccgcccccattattcccaccccagttctcacaagtcccggcgctgtccctccattaccaagcccaagcaaagaggaggaaggtctcagggctcaggttagagatctcgaggagaagctcgagactcttagattgaagagggccgaagataaggctaaactgaaagaattggagaagcacaaaatacaactggagcaggtacaggagtggaagtcaaagatgcaggaacagcaggcagacctgcagcgtaggctgaaagaagcaagaaaggaggcaaaggaagccctggaggcgaaagagcggtacatggaggagatggctgatactgcagacgccatagagatggccaccctcgacaaagaaatggcggaggagcgggccgaatctctccagcaggaggtggaggcactgaaagagagagtcgatgaactgactactgatttggaaatactgaaggcagaaatagaagaaaagggcagtgatggtgcagcgtcatcataccaactcaagcagcttgaggagcaaaatgctagattgaaggacgcccttgttcggatgcgagacctaagcagctctgaaaagcaggagcacgtgaagctccaaaaactgatggagaagaaaaatcaggagctggaagtcgtgcgacagcagcgcgagcgcctacaagaagaactttcccaggcagaaagtaccatcgacgagcttaaggagcaggtggacgccgccctgggcgcagaagagatggtagagatgctcaccgacaggaatcttaacctggaggagaaggtgagggagctcagagaaacagttggagacctagaggctatgaatgaaatgaacgacgaattacaggagaatgctcgcgaaaccgagttggaactcagagagcagctcgacatggccggagcgagggtgagggaggctcagaagagagttgaagctgcacaagagaccgtagctgactaccaacagactataaagaaatataggcagctgaccgcccatctgcaagacgtgaaccgggagttaacaaaccagcaggaggcatccgtggagaggcaacagcagccacctcccgaaacctttgatttcaagattaaattcgcagagactaaggcacacgccaaggccatcgaaatggaacttcgacaaatggaggttgcccaggccaacagacacatgtctcttttgaccgcattcatgcctgattcctttctgcgccctggcggggatcacgattgtgtgttggttctgctcctcatgcctcgattgatttgtaaggcggaactgatcagaaaacaggcccaagaaaagttcgagctgtccgagaactgcagtgagaggcccggcttaaggggagccgccggagaacagctttcctttgcagctgggctagtttacagcttgtctctcctgcaggctactctacaccgatatgaacacgcactgagtcagtgcagcgtggacgtctataagaaggtcggcagcctgtatccggaaatgtctgctcacgagaggagcctcgatttcctgatcgaattacttcacaaagatcaacttgatgaaacagttaacgtggaacccctcacaaaagccattaagtactaccagcatctatacagcatccacctggccgaacaacctgaggactgtacaatgcaactggccgaccatataaaattcacccagtcagcactcgactgtatgtcggtggaagtcggccgactgagagcgtttctgcaggggggacaagaggctactgatattgctctgctgctgcgggacctggagacctcctgcagcgacattcgccaattttgtaagaagattcgcagacggatgccaggaactgacgcccctggcatcccggccgccctggccttcggtccccaggtctctgacacactattagactgtcgtaaacacctcacctgggtcgtagccgttctgcaggaggtggctgccgccgccgcacaactgatcgccccactcgcagagaatgaaggactgttggtagcggcattggaagagctggccttcaaagcctcggaacaaatctacggaacgccatcgagctctccctacgagtgcctcagacagtcctgtaacatcttaatcagtactatgaacaagctggcaaccgcaatgcaagagggcgagtatgacgcggagcgccctccctcaaaaccgccccccgtggaactccgagcagcggccctgagagctgagatcacggatgccgaggggctcggacttaaactagaagatagggaaactgtaatcaaggagttgaagaagagtctgaagattaaaggcgaggagctctccgaagcaaacgtccgtctttcccttctggaaaagaagcttgatagcgccgccaaagacgctgacgaacgcatcgaaaaggtgcagactagactcgaagaaacccaggctttacttcgaaagaaagagaaagagtttgaggagactatggacgctctgcaggctgatatcgaccagctggaagctgagaaggcagaattgaagcagcgcttgaactctcagtccaagcgaaccatcgagggcctgaggggaccccctccttccggtattgctaccttagtgtcaggaatcgctggtgaagagcagcagagaggagctattccagggcaagccccggggtcagtccctgggccaggactggtgaaagacagtcccctgctgctgcagcagatttctgctatgcggttacacatttctcagctgcagcacgaaaattccattctcaagggagctcagatgaaggccagtctagcttcattacctccactccatgttgccaagctgagccatgaggggcccggctctgagttaccagccggagcactctacagaaagacctcacaactcctggagacgttgaaccagctgtccactcatacgcacgtggtcgacatcacccgcactagccccgcggccaaatccccaagtgcccagctgatggagcaagtggcacagttgaagtcgcttagcgatacagttgagaagctgaaggacgaggttttgaaagagactgtttcacaacgtcccggtgcaactgtgccaacagattttgcgacattcccatcatctgccttcctgcgggccaaagaagaacaacaagatgacacagtatatatgggcaaagtgaccttctcttgtgctgcgggatttggacaacggcaccgactggtgttaacgcaggagcagttacaccagctccacagtaggctcattagctag

SEQ ID NO: 185973 - DNA, 3816 bp, synthetic construct
  misc_feature 1..3816: note = Description of Artificial Sequence: Synthetic coding sequence
  source 1..3816: mol_type = other DNA
atggcccagagcaagcggcacgtgtacagccggacccccagcggctctcggatgagcgccgaggcctctgccagacccctgcgggtgggcagccgggtggaagtcatcggtaagggtcacaggggcactgttgcttacgtgggagcaaccctgtttgctactgggaagtgggtcggcgtcatattggatgaggccaaaggtaaaaacgatgggacggtgcagggccggaagtattttacctgcgatgagggacatggtatcttcgtgaggcaatcccagattcaggtctttgaggatggagccgacactactagtcccgagacccctgattcctctgcctctaaagtgttgaagcgagagggcacggacacaactgccaaaacttcaaagttagcacccaccgcccgcaagacaacgacaagacgtccaaaacctacgagacccgcaagcacgggtgtggccggtgcatcaagcagcctgggaccatccggaagcgcatctgccggagagctgtcttcatcagagccttccactcccgctcaaacacctctcgcagctccaatcatccccactcccgtgctcacatcacccggtgcggtgcctccgctcccttccccaagtaaagaggaggaaggcctccgggcacaggttcgtgatcttgaagaaaaactcgagactctgcgcttaaagcgtgctgaggacaaagcgaagcttaaggaactggagaaacataagattcagctcgagcaggtgcaggaatggaagagcaaaatgcaagagcagcaggccgacctccagcgcaggctcaaagaagccagaaaggaggctaaagaggccttagaggctaaagagagatacatggaggagatggcggacaccgctgacgcaatagagatggctacattggataaggagatggcagaagaaagagctgaaagtctccaacaggaggtagaagcgttgaaggagagagttgacgaactgaccacagacctggagatcctgaaggcagagatcgaagagaaaggttccgacggtgctgcctcctcttatcagctcaaacaactagaagaacagaacgctcgcttgaaggacgccttagtcagaatgagggacctcagttctagtgaaaaacaggagcacgtcaaactgcaaaagctcatggagaaaaagaaccaggaacttgaggtagtgcgccagcagcgtgagcgacttcaggaagagctctctcaggctgagtcaacgattgatgagctgaaagagcaggtggacgcggccctcggcgcagaggagatggtggagatgctgactgatcggaatctaaacctggaggagaaggtgcgcgagctgagagagacagttggcgaccttgaggcaatgaatgaaatgaacgacgagctccaggagaacgcacgtgaaaccgaattggaactgagggaacaattggacatggcaggcgcgagagtgcgagaagcccaaaaaagggtagaggctgcccaggaaaccgtagcagactatcagcagacgatcaagaaataccgccaactgacagcccacctccaggatgtgaatagggaattaacgaaccagcaagaagcatctgtcgaaagacagcagcagcccccccccgaaacattcgattttaagataaaattcgccgagacaaaggcccacgccaaagcaatagagatggagcttaggcaaatggaagtggctcaagccaatcgtcatatgagtctgttaactgcattcatgccggacagtttccttcgaccaggcggcgaccatgactgcgtgttggttcttttgttgatgccgagactgatctgtaaggccgagctgatcaggaagcaggcccaggagaaattcgagctgtcagagaattgcagcgagaggcccggactcaggggggcagcgggcgagcagctttctttcgcggctgggttggtgtattccctgtcactcctacaggctacgctacaccggtacgaacacgcactttcccaatgctccgtcgacgtatacaagaaggttggctccctgtatccagagatgagtgcccatgagcggtctcttgactttctgatcgaactgcttcataaagaccagttggacgaaacagtgaacgtggagccactgacgaaagcaatcaaatattaccaacatctgtattctattcacctggccgagcagccagaggactgtactatgcagttggccgaccacattaaatttacgcagtcagccctagattgcatgtctgtggaggttggcagacttcgcgccttcttgcaggggggacaggaagccacagacattgcgttactacttcgagatctggagacatcttgctccgatattaggcagttttgcaaaaaaatccgccgtcgcatgcctggaacagatgctcctgggattccggccgctctcgcctttggcccacaggtgagtgataccctgctagattgtcgcaaacacctcacttgggtggtggcggtgctgcaggaggtagccgctgccgctgctcagttgatagctcctttggccgaaaatgaaggactgctggttgcagcactagaagagctggcctttaaagcctccgaacagatatatggcaccccatcaagctctccatatgaatgcctgcgacagtcttgcaatatcctgatatccaccatgaacaaattagccacagctatgcaggagggcgagtatgacgcggagcgcccccctagtaagccaccgcccgtggagctccgggccgctgctctgagggccgagattacagatgccgagggcctcggtctgaagctggaggatcgggaaaccgtaatcaaggagttgaaaaagtcacttaagataaaaggagaagagttatccgaggctaacgttcggctgtctctgctggaaaaaaagctcgattccgcagcaaaggatgccgacgagaggattgaaaaggtgcaaactcggttagaggagacccaagctcttttaagaaaaaaagagaaggagtttgaggagactatggatgcgcttcaggcagacatcgaccaactggaagccgaaaaggcagagctgaagcagcgattgaattcacagtctaaacgtactatcgaagggctccgtggacccccaccatcaggcatcgcaacactcgtgagcggaattgccggagaggagcagcagcgcggcgcaatccccggccaagcgccaggctctgtaccaggccctggacttgtgaaagactcacctttgctgctccagcagatctccgccatgcgtcttcacatatcccagctgcagcatgaaaattctatacttaagggagcccagatgaaggcaagtctggcttctttgcctccgctccatgtcgcgaagctgtctcatgaaggacccggatccgaactgccggccggagccctgtaccgaaagacttcccagctgctggagacattaaaccagctgtcaacccacactcatgtcgttgacattacaagaacttcacccgccgctaagtcaccaagtgcacagctcatggaacaagtcgctcaacttaagtctctgtccgacacagtagagaaactcaaagacgaggtattgaaagaaactgtctcccagcgtcccggagctacagtgcctacagactttgccacattcccgtctagtgcctttcttagggccaaagaggaacagcaggacgataccgtgtacatgggcaaagtcacgttcagctgtgctgctggctttgggcagcgtcacagattggttcttacgcaggagcaactgcaccagcttcacagtcgtttgatctcctag

SEQ ID NO: 185974 - DNA, 3435 bp, synthetic construct
  misc_feature 1..3435: note = Description of Artificial Sequence: Synthetic coding sequence
  source 1..3435: mol_type = other DNA
atgatgcggcaggcccccaccgcccggaagaccaccacccggcggcctaaacctacacgacccgcaagtaccggagtcgccggtgcctcttcgtcactgggccccagtggctcagccagtgccggcgagctgagtagcagtgagccaagcactcccgctcagaccccgttagccgcacccattataccgactcctgtgttgaccagcccgggagccgtgcctcccctgcctagcccttctaaagaagaggaaggcctgagggcacaagttcgggatttggaggaaaagttggagacacttaggctaaaacgtgcagaagataaagcaaagcttaaggaactggaaaagcataaaatccaactggagcaagttcaagaatggaagtcaaagatgcaggaacagcaagccgatttgcagcgtcgattaaaagaggcccggaaagaggccaaggaagctctggaggcaaaggagaggtacatggaggaaatggccgatacagccgatgccattgagatggctactctggacaaggagatggcggaggagagggctgagtcactgcagcaagaggtggaggcgctcaaagaacgggtggatgaacttaccactgatctggagatcttgaaagcagagatcgaagagaaggggtctgacggcgctgctagttcttaccaattaaaacagttagaggaacagaatgcacgattaaaagacgcactggtgcggatgcgcgacctgtcttcgtctgagaagcaggaacatgtgaagcttcagaaacttatggagaaaaagaaccaggaactggaggtggtgcggcagcaaagggagagattgcaagaggaattaagtcaggccgagtcaacgattgacgagctcaaggagcaggtggacgcagccctgggcgcggaggaaatggtggaaatgcttacggacagaaatctgaatctggaggaaaaagtgcgtgagctgcgagagacagtaggagacttagaggctatgaatgaaatgaatgacgaactgcaggagaacgctcgggagacagagctggagctccgagagcagttggatatggccggcgcccgagtgagagaagctcagaagcgggtagaagcggcccaagagacggtggccgattaccagcagaccattaagaaatacagacagttgactgcccatttgcaggacgttaatagagagctgaccaatcagcaagaggccagcgtcgaaagacagcagcaaccacccccagagacctttgattttaagattaagttcgcagaaaccaaggcccacgcgaaggcaatcgaaatggagttaagacagatggaagtggcacaagcgaatcgccatatgagcctgctaaccgcttttatgcccgatagcttcttaagaccaggcggagaccacgactgcgtgctcgtgttgctgttaatgcctaggctgatctgtaaggccgagctgattcgcaagcaggcacaggaaaagttcgagctttctgagaactgttccgaaaggcctggcctgcgtggagcagctggagagcagctctctttcgcagcaggcctagtttactctcttagtctgcttcaagcaactctgcacaggtacgagcacgccctgagccagtgttctgtcgacgtctacaaaaaggtcgggtcactgtaccccgaaatgtccgcacacgagcggtccctcgatttcctgatcgaactgctacataaggatcagctcgatgaaacagtgaacgtcgaaccactgactaaagctattaaatattaccagcacttgtactctattcatctagcagaacagcctgaggactgtacaatgcagctggccgaccacattaaatttacgcaatccgcgctagactgcatgtcagttgaggtagggcggcttcgggcgtttcttcaagggggtcaggaagccacagatattgctctgctgctcagagacctcgagacttcctgttcagacataaggcagttctgcaagaaaatccggaggagaatgcctggcaccgatgcccctgggattcctgctgcattagccttcgggccacaggtttctgacaccctgttagattgcaggaagcacctgacatgggtggttgccgtcttacaagaggtagccgccgccgccgcacagctgattgcacccttggctgaaaatgaagggctccttgttgccgcactcgaggaattagcatttaaggcttcggagcaaatttacggaaccccttcttccagtccatatgagtgtttgcgacagagctgtaatatcctcatatccacgatgaacaagctcgctacagctatgcaggagggcgaatatgacgcggagaggccgccgtccaagccacctcctgtcgagttaagagcagccgcactgagagcggaaatcacagatgccgaaggattaggcctgaagctggaggacagagagacagtcattaaggaactaaagaagtccctgaagatcaagggggaagagttgagcgaagctaacgttcgtctttcattactcgaaaagaaactcgactcagcagctaaagatgccgacgaaagaatcgagaaggttcagaccagattagaagaaacacaagccctgctccggaagaaggagaaagagttcgaagaaacaatggatgccctgcaagccgacattgaccaactggaggcagagaaggcagaactgaaacagagactgaattctcagtcgaaacggaccattgaaggtctgcgggggcctccacccagcggaattgcaacactggtatccggcatcgccggtgaggagcagcagcgcggtgccattcccggtcaggcccccggatcagttccggggcctggcctggtgaaagattcccctctgctgctgcaacaaattagcgctatgcgcctacacatctcccagctccagcacgaaaactctattctgaagggcgcccagatgaaagcatctctcgcgtcacttcctccgctgcacgttgccaaactcagtcatgaagggcctggcagtgagctgccggccggggccttataccgcaagactagtcaactgctggagactttgaaccagttgtcaacgcacacacacgttgtggatatcacccggaccagccccgctgccaaatccccctcagcccagctcatggaacaggtagctcaattaaagtccctcagcgacacagtggagaagcttaaagacgaggtcttaaaggaaacagtgtctcagcggcctggagcaaccgtacctactgacttcgccaccttccctagtagtgccttcctccgcgcaaaagaggaacagcaggatgacactgtgtatatggggaaagtcacatttagttgtgctgctgggtttgggcagcgccacagattggttctgacacaagagcagctccatcagctccactctagattaatctcatag

SEQ ID NO: 185975 - DNA, 3771 bp, synthetic construct
  misc_feature 1..3771: note = Description of Artificial Sequence: Synthetic coding sequence
  source 1..3771: mol_type = other DNA
atgagcgccgaggccagcgcccggcccctgcgggtgggcagccgggtggaggtgatcggtaagggccataggggcactgtggcctatgtcggcgcgactcttttcgccacagggaagtgggttggcgtcattctggatgaagcgaaaggcaaaaacgatggaacagtgcaaggtcgcaagtactttacttgtgatgagggacacggcatattcgtgagacagtcccagattcaagtgtttgaggacggcgcggatacaacttctccggagacccccgattcgagtgccagcaaggttcttaaaagagaaggcaccgataccacagctaagacaagtaagttacgcggacttaagcccaaaaaagcgccaacggcgcgcaaaactaccacacgacggccaaagccgaccaggcccgcttcgacaggagtcgctggcgcttcctccagcctggggccatctggctctgcctctgctggggagttgagctcatcagagccatccacgccagcccagaccccactggcagccccaattattcccacccccgtgttaacatcccctggtgctgtgcccccccttccttctcctagtaaggaggaggagggactgagggcccaggtgcgcgaccttgaggagaagttagagacacttcggttgaaacgggcggaggacaaggcaaagctgaaagagctggaaaaacataagatccaactcgaacaggtgcaggagtggaaaagcaaaatgcaggaacagcaggcggatttgcagagacgcttgaaggaggcacggaaggaagcgaaggaggctctggaggccaaagagcggtacatggaggaaatggccgataccgctgatgccatcgaaatggccaccctcgataaagaaatggccgaagaaagggctgaatcgctccagcaggaggtcgaggccctcaaggaacgcgtggatgagctgactacagacctcgagattctgaaggcggagattgaggagaagggctcagacggcgctgcaagctcttatcagttgaaacaactagaggaacaaaatgcgagattaaaggacgcacttgtgagaatgcgagatctgagctcatccgaaaagcaggaacatgtcaagctgcagaagctcatggagaaaaaaaaccaggaacttgaagtggtgcggcaacagcgagagagactccaggaggaattatctcaggctgagagcacaattgatgaacttaaagagcaagtagatgcggcgctgggggcagaagaaatggtagaaatgctcacggatcgaaatctaaacctcgaggagaaagttcgggagttgagagaaactgtcggggacttagaagccatgaatgagatgaacgacgaattacaggaaaatgcaagggagacagagctggagctaagagagcagctagacatggcgggagcacgcgtgcgtgaggctcagaaacgagtcgaggccgctcaggaaacagttgcagattaccagcaaactattaagaaatataggcagctaactgctcatctgcaggatgtgaacagagagctgacgaaccagcaggaggcctcagtggaacggcagcagcaacccccccccgagacattcgactttaagatcaagtttgccgaaactaaagcccatgcaaaagccatcgaaatggaactgcgacagatggaagtcgctcaggcgaaccggcacatgtccctgctgaccgctttcatgcccgacagttttctgcggccgggtggcgaccacgattgtgtcctggtattactgctgatgcctcggcttatttgtaaggccgaacttattaggaaacaggcgcaggaaaagtttgagctctccgagaattgctcagagagacctggactacgtggtgccgccggcgagcaactctcatttgcagccgggttggtgtactccctttctctgctgcaggcaaccctccatagatatgagcacgctttaagccagtgcagcgtcgatgtatataaaaaagtgggtagtctctacccggaaatgtccgcccacgaacgatctttggatttcctgatcgaactgcttcataaagatcagttggatgagactgtgaacgtcgagcctctgactaaggccatcaagtattaccagcatctctattccatccacctggcagagcagcccgaagattgtaccatgcaactagccgatcacatcaagttcactcagtcagccctggattgcatgtccgttgaggtgggtagactccgagcctttctacaggggggccaggaggccacggacatagcgttactgttgagggacctggagacttcttgcagcgacattaggcagttctgcaaaaaaataaggcgcaggatgcctgggactgacgcacccgggatcccagccgcgctggcttttggaccacaggtgtcagacactctgcttgactgccgcaaacatttgacttgggtggtggcagtgttgcaggaggtggcggccgccgccgcccagctaatagctcctctcgcggagaatgaaggccttctagtcgccgccctggaggagctggcctttaaagcgtccgagcagatatacggcacaccctcaagcagcccttatgaatgcctaaggcagagctgcaacatcctcatctcaactatgaacaaactggccacggccatgcaggagggggagtacgacgccgaacggcctccttccaagccaccccctgttgagctacgcgctgcggccctgcgcgctgaaataactgacgcggagggccttgggcttaaactcgaagatagagaaacagtcattaaagagctaaaaaaatccctgaaaataaaaggagaagagctcagcgaggccaacgtacgcctgtcccttctggagaagaaactggacagcgctgcgaaagacgctgatgaacggattgagaaagtgcagactcgcctggaagaaacccaggccctgctgagaaagaaagagaaggagttcgaagagactatggatgcactgcaagccgacatcgaccaactggaagccgaaaaggctgagctgaaacagagactgaacagccagtctaagcgcactatagagggactcaggggcccacctccctccgggatcgcgaccctggtgtccgggattgccggtggggctattcctggccaggctcctggaagcgtccccggcccaggccttgtgaaagatagcccgctactcctgcagcagatctctgcgatgcgactccatattagccaactgcagcatgagaacagcatactcaagggcgctcagatgaaagcatccctggcctcgcttccgcctttacatgtcgccaagctgagccatgaaggacctggctctgagctgccagctggcgcgttgtaccgaaagacctcacagttactcgagactctgaaccagctgtcgacccacacacacgtggtggacatcacacggacctcccctgccgccaagtcaccctcggcacagcttatggagcaagtcgctcagctgaagagcctatcagatacggtggagaagctgaaggacgaagtcttaaaggagaccgtttcccaaagacccggagctactgtcccgactgactttgcgacctttccttctagcgcttttctgcgagcaaaagaggagcaacaggatgacaccgtatacatggggaaagtcaccttctcctgtgcagccggatttggacagaggcaccggcttgtcttaacacaggaacaactgcatcaactgcattcgcgcctgatctcatag

SEQ ID NO: 185976 - DNA, 2673 bp, synthetic construct
  misc_feature 1..2673: note = Description of Artificial Sequence: Synthetic coding sequence
  source 1..2673: mol_type = other DNA
atgagcgccgaggccagcgcccggcccctgcgggtgggcagccgggtggaagtgattggtaaaggccaccgcggtactgtcgcatacgtcggggccacgctgttcgccacgggtaaatgggtaggggtcatcctggatgaggcaaagggaaagaacgacggaactgtccaaggaaggaagtattttacatgtgacgaaggccacggcatttttgttagacagtcacagatccaggtgttcgaggacggagctgataccacctcacctgaaacccccgactcctcagcaagtaaggtccttaagcgggaaggcacagacaccaccgctaagacgtctaagctccctacaagacctgccagcaccggggtagctggcgcgtctagtagtcttggtccgtctggcagcgcttctgctggagaactgtcaagctcagagccaagcacacccgcacagacccctttggctgcccccatcattcccaccccagtgttaactagtcctggggctgtgccgcccctgccatcaccctccaaagaagaggagggcttgagggcccaggtccgcgatctcgaggagaaattggaaaccttgcgcttaaaacgagccgaagacaaggccaagctcaaggagttagagaagcacaagatacagctggaacaggtgcaggaatggaagagcaagatgcaggagcaacaggcggatctgcagcgacgtctgaaggaggctaggaaggaggccaaggaggccctagaagccaaagaacgctacatggaggaaatggccgataccgcagacgcaatcgaaatggctaccctcgataaagagatggctgaggagcgggcagagtctttacaacaggaggttgaagcgcttaaagaacgagtggacgaactgactacggacctggagattctaaaagcagagatagaagagaaaggctctgacggagctgcctcctcttaccagctcaagcagcttgaagaacaaaatgctcggttgaaagatgctttggtccggatgagggacttatctagttctgagaagcaagaacacgtcaaactgcaaaaactgatggagaaaaaaaaccaagaactcgaggtggtgaggcagcagcgcgagcgcttacaagaggaattgtcccaggcagagtcaaccattgatgagctgaaggagcaggtggacgccgctctgggtgccgaagaaatggtcgagatgctaaccgacagaaatctgaacctcgaggaaaaagtccgcgagctgcgcgaaaccgtgggagacttagaagcaatgaacgagatgaacgacgagctccaggagaacgcccgggaaaccgaactggagctgagagaacagttagatatggcaggggcgcgggtgcgggaagcgcagaagcgggttgaggcggctcaggaaaccgtcgccgactatcaacagactattaagaaatatagacaactcactgctcacctgcaggatgttaaccgggagcttacaaaccaacaggaggctagcgtggagagacaacaacaaccacctcccgagaccttcgacttcaaaattaaattcgctgagacgaaggctcacgccaaagccattgaaatggaattaaggcaaatggaggtcgctcaggccaacagacacatgtctcttctgactgccttcatgccggatagctttcttcgtcctggcggcgaccatgactgcgttttggtgctgctccttatgccccggcttatctgcaaagctgagcttataaggaagcaggctcaagagaagtttgaactctccgaaaactgtagcgagaggcctgggctgagaggagcagcgggagagcaactttcctttgcggctggactggtttattcccttagtctccttcaggcaaccctccacagatacgaacatgccctgagccagtgctcggtggacgtttacaaaaaagttggctccctttatcccgaaatgtccgcccatgagcgttctctggatttccttattgagcttctccataaagatcagttggatgaaactgtcaacgttgagccgctgaccaaagctattaaatactaccagcacctatactcaatacacctggcagagcagcccgaggactgcaccatgcagctcgcagatcatatcaaatttactcagagcgctctggattgcatgagcgtggaggtaggaaggctgagggccttccttcagggagggcaggaagccaccgatattgcccttctcctccgggatttagagacgagttgcagcgacattagacaattttgcaaaaagattcggcgccggatgcctggcacagacgctcctggaatccccgcagctctggctttcggacctcaggttagcgatacactcctggattgtagaaagcacctgacctgggttgtcgcagtcttgcaggaggttgctgcggcagccgctcaactgatcgctcctctggctgaaaacgaagggctgctagtggcagccctggaggaactggccttcaaagcttctgagcaggtgggcctcgacggatgggtggagggtgtagggagagtttctgaccagtgcggcgcctttaccagcgcattgggctcctgtcggagtatggggccccctcccgctgcccccatgtcggtatgtgccagccacgcaactagcagttctgtgccatag

SEQ ID NO: 185977 - DNA, 561 bp, synthetic construct
  misc_feature 1..561: note = Description of Artificial Sequence: Synthetic coding sequence
  source 1..561: mol_type = other DNA
atgctgatgggcctgctgcggccctacatcctgggcgagcggggcactgtgatgaccccttcaggatcacgaatgtccgccgaagccagcgcccggcccctccgagtgggttcccgcgtggaggtcatcggtaagggccacagaggtacagtagcttacgtgggtgctacactcttcgccactggaaaatgggtcggcgtaatactcgatgaggccaagggcaagaacgatggtactgtgcagggccggaagtatttcacttgcgacgagggccacggcatatttgttcgccagagccaaatccaggtgtttgaggatggtgccgacacgacctcaccggagacccctgattcttcagcctctaaggtgttaaaacgagagggcaccgatacaaccgccaaaacatctaagttgaggggactgaagccaaagaaggctcctaccgccagaaagacaacaacccgtaggcctaagcccacccggcctgctagcacaggcgtcgcgggtgccagtagctccctgggcccctcaggctccgcctctgccggcgaactcagctag

SEQ ID NO: 185978 - DNA, 3711 bp, synthetic construct
  misc_feature 1..3711: note = Description of Artificial Sequence: Synthetic coding sequence
  source 1..3711: mol_type = other DNA
atgagcgccgaggccagcgcccggcccctgcgggtgggcagccgggtggaggttatcgggaagggccatcggggaactgtggcgtacgtgggagccactctctttgcaaccggtaaatgggtgggagttattctggacgaagccaagggcaagaatgacggtactgtgcaggggcggaaatactttacttgcgacgaaggtcatggtatttttgtccgccagtctcaaatacaggtatttgaagatggggcagacaccacaagcccggagaccccggactctagtgccagcaaggtcctcaagagggaggggacggacactactgctaaaacgagcaaactgcctacaagacccgccagtaccggggtagctggtgcctcgagttccctcggaccaagcgggtccgctagcgctggggaactgtcgtcaagcgaaccctccaccccagctcaaactcccctggcagctcctataattcccacacccgttctcacctcccctggtgctgtgccccctttgccatcccccagtaaagaggaagagggtctcagggcacaggtgagggatctggaggaaaaattggagacactcaggctgaagcgagccgaggacaaagccaagctgaaggagttggagaagcacaagatccagttggagcaggtgcaggagtggaaaagtaagatgcaggagcagcaggccgaccttcagagacgtttgaaggaagccaggaaagaggccaaagaggcacttgaggccaaggagcgctacatggaggaaatggcagatacggctgatgcgatagagatggccacattggacaaagagatggccgaggagagggccgagagcttgcaacaggaggtggaagcactgaaagagagagtcgacgagctgactactgacttggagattttgaaggctgaaattgaggagaaagggagtgatggcgccgctagctcttatcaacttaaacagttagaagagcagaatgcaaggctcaaagatgcattggtgcgaatgcgcgacttatcatccagtgagaagcaggagcacgtgaaactccaaaagttaatggagaagaagaatcaggaactggaggtggtgcggcagcaacgcgagcgtctccaggaggaactttcccaagccgagagcactattgatgaactcaaagaacaggttgacgccgccctgggcgcagaggaaatggtggaaatgctgaccgatcgtaacctcaatttggaggagaaggtccgggaactgcgcgagaccgtgggcgatctggaagccatgaacgagatgaatgacgagctccaggagaatgcacgggagacagagctggagctgagagagcagctcgatatggccggggctagggtccgggaggctcaaaaacgagtagaggcagcacaggagacagtcgctgattatcaacagactataaaaaagtaccgccaactaactgctcacctgcaagatgtgaacagagaacttacgaaccaacaagaggcctcggtggagagacaacagcagcctccccccgagacctttgatttcaagattaagttcgctgagacaaaggcccatgcaaaggccattgagatggaactccgacaaatggaagtcgcccaagcgaacaggcatatgtcactattgactgcattcatgccagattccttcctgaggcctggtggggatcacgattgcgttcttgttctccttctcatgcctcgtcttatctgtaaggctgaactgattcgaaaacaggcacaggaaaaatttgagctgtccgagaactgtagcgaaaggcctggactgaggggagccgcaggcgaacagttgagttttgcggccggcctcgtgtatagtttgagcctgctgcaggcaaccctccatagatacgaacacgccctctcccagtgctctgtcgacgtttacaagaaagtgggctcgctctatcctgagatgagcgcccacgagaggtctctcgacttcctgatcgaacttctgcataaagaccagctcgatgagacggtcaacgtagagccattgactaaggccattaagtactatcaacacctgtattccatacatctggccgaacagccagaagattgcactatgcagttagctgaccacatcaagttcacgcagtccgcccttgactgcatgtcggtcgaagtaggcagattgcgcgcctttcttcagggcggacaggaggctactgatattgccctcctcctccgcgacctggagactagctgtagtgacattaggcagttctgcaagaaaatcagaagaaggatgccgggtaccgatgcacccggcattccagctgctctcgccttcgggcctcaagtatctgacactctgctggattgtaggaagcacctcacttgggtcgttgccgtactgcaggaagttgctgctgcggcagcccagttgatagctccccttgctgagaacgaggggctcctagtggcggccctggaggagcttgcttttaaggctagtgagcagatttacgggaccccctctagcagtccctacgaatgtctgcgtcagtcctgtaatattctaatctccactatgaacaaacttgcgaccgcaatgcaggagggagaatatgacgccgaaagaccgccttccaagccaccacccgtggagctccgcgcggccgcactccgtgccgagattacagatgcggaggggttgggcctcaagcttgaagaccgggaaaccgtaattaaagagttaaagaagagtcttaagattaaaggggaggagctgtctgaggctaatgttcgcctgagcctgttggagaaaaagctcgactccgccgcaaaagatgcagacgagagaatagaaaaggtgcagaccagattggaagagactcaggctctcctcagaaagaaagaaaaagagttcgaagagaccatggacgcactccaagcggatatcgatcaacttgaggccgaaaaggccgagctcaagcagcgcctgaactcccagtctaagaggacaatcgaaggcttacgcggtccgcccccctccggtatcgccactctggttagcgggatcgccgggggcgctatcccaggtcaggcaccagggagtgttccgggcccagggctagtaaaggatagtcccctcctgttgcagcagatctctgctatgcgcctgcatatctctcagcttcaacacgagaattccattctgaaaggggcccagatgaaggcgtcgctggcatccctgcctcccctacacgtggcaaaattatcgcacgagggaccaggaagtgaacttccagcgggggctctgtataggaaaacgagccagctactggaaaccctgaaccagctgtccactcacacccacgtcgtggacatcacacgcacctctccggcagccaagagcccctccgctcagctgatggaacaggtcgcccaactaaaaagcctctcagatactgttgaaaaactgaaagatgaagtcctaaaggagacagtttcccagcgtccaggtgcgaccgtgccgacagatttcgcaacatttccatcaagtgcgtttttgagagcaaaggaggagcagcaggacgacactgtttatatgggtaaagtaacattcagctgtgctgctggattcggtcagcgccacaggctcgtcttgacccaggagcagctccatcagcttcattctcgcctcatctcttag

SEQ ID NO: 185979 - DNA, 3420 bp, synthetic construct
  misc_feature 1..3420: note = Description of Artificial Sequence: Synthetic coding sequence
  source 1..3420: mol_type = other DNA
atgatgcggcaggcccccaccgcccggaagaccaccacccggcggcctaagcccaccaggccggcatcaactggcgtcgccggcgcaagtagctctctgggtcccagcggatccgccagtgccggcgaactgtcttcgtcagagccatctaccccggcacagacacccctggccgcccccattattccaacacccgtactgacttcaccaggtgctgtcccgcctcttccttctccatccaaagaggaagagggcttgcgggcgcaggtcagagatttggaggagaaattagagactttacggctcaaacgcgccgaagataaggccaaactgaaggaactcgaaaaacacaagattcagcttgaacaagtacaggagtggaagagtaaaatgcaggagcagcaggctgatctgcagaggcgcctgaaagaggctcgtaaagaagcgaaggaggctctggaggcgaaggaaagatacatggaggagatggccgacactgctgacgcaatagagatggccactttagataaggagatggccgaggagagagcagagagtctgcagcaggaagttgaggcactgaaggaaagggttgacgaactcaccacagacctggagattctcaaggctgaaatcgaggagaaaggcagcgacggcgctgcaagcagctaccagctgaagcaactcgaggagcagaacgcgcgcctgaaagatgccctagtcagaatgagagacctgagctcatccgaaaagcaagagcacgtgaaactgcagaaactgatggagaagaaaaaccaagagctcgaggtggtgcgccagcagagagagagactgcaagaggaactttctcaagccgagtcgacgatcgacgaattgaaggagcaggtcgacgctgctctgggagccgaggagatggttgagatgttaaccgaccggaacctgaatctggaggagaaagttcgcgaacttcgcgaaaccgtcggtgatcttgaggccatgaacgagatgaacgacgagctgcaggagaatgctagggaaaccgagttagaactgcgggaacagctagatatggcgggcgctagagttcgcgaagctcagaaacgagtggaggctgcacaggagacggtggctgactatcagcagactatcaagaaatataggcaacttacggcacatctgcaagatgtaaatagggaactgaccaaccagcaggaggccagtgttgagcgacagcagcagcccccgccggagacatttgactttaagatcaagtttgctgagaccaaggcacatgccaaagccattgaaatggagctccgccagatggaagtggcccaggctaaccggcatatgtccctcttaactgcctttatgcccgacagcttcttacgtcctggtggcgaccatgattgtgtgctggtgttgcttctcatgccccgactgatctgcaaggccgagctgatccgcaagcaggctcaggaaaaatttgagctgtcggagaattgcagcgaaaggcccggcctgaggggcgctgctggggaacaattgtcttttgccgctggcctggtgtactctttgtctctccttcaggcgacattgcacagatacgaacatgccctgagtcaatgcagcgtagacgtctacaaaaaggtcggatctctgtatccggagatgtcagcacatgaaagatccttggattttctaattgaactgctgcataaggatcagctggatgaaaccgtgaacgttgagccattaacaaaggcgattaagtactatcaacacctttactctattcatctggctgagcagccagaggattgtaccatgcagcttgcagatcatatcaagttcacccagagtgctctggactgcatgtcagtagaagtgggacgcctgagggcttttctccaggggggacaggaggccactgatattgctctgctgctgcgtgacttagagacttcctgctccgatatccggcagttttgtaaaaagatccgccggaggatgcccggcaccgacgcccctggcataccggctgcgctcgccttcgggccccaggtctccgacacattgcttgattgtcgaaaacaccttacttgggtggtggctgttttgcaagaggtcgccgctgccgccgctcagctaatcgcccccttagccgagaacgaagggctgttagtagccgccttggaagagttggccttcaaagctagcgagcagatctatggcaccccctcatcttcaccttacgaatgcctcagacaatcatgcaatatcctcatttccaccatgaataaactggctaccgccatgcaggagggcgagtacgatgccgaaaggccacctagcaagcccccacctgtagagctgagagctgccgccctgagagccgagatcacagacgccgaggggctcggcctgaagttggaggacagggagaccgtgatcaaggaactgaagaagagcctgaaaattaaaggtgaggaattgagcgaagctaatgtccgtttgtctctgctcgaaaagaagcttgactccgcggccaaagatgccgacgagcggattgagaaagtacagaccaggctggaggagacacaggcactcctgcgaaagaaggagaaggaattcgaggaaacaatggacgcgttacaagccgatatcgaccagctggaagccgagaaggccgaactgaaacagcggcttaacagtcagtcaaagcgaactattgaagggctacgggggccgccgccttcaggaattgctacacttgtgagtggaattgccgggggggctatccccggtcaagcccccggttcagtccccggacctgggctcgtcaaagatagccccctgctccttcagcagatctccgctatgcgtcttcatatttcacagctccagcatgagaattctattttgaagggggcccagatgaaggcatctctggcgtctcttcccccactacacgtagccaagctgagtcatgagggccccggcagtgagctccccgctggtgctttgtataggaagacttcccagctcctcgagacccttaaccagcttagcacccacacccatgtagtggacattacacggacatcccccgcagccaagtccccatcggctcaattaatggaacaggttgcccagctgaagtccctgtccgataccgtcgagaaactgaaagatgaggtgctcaaggagacggtctcccagcgccctggagcaaccgtgccaacagacttcgcgacgttcccatcctccgccttcctacgcgccaaggaggaacagcaggacgacactgtttacatgggcaaggtcaccttctcttgcgcagctggatttgggcagagacatcggttggtgctcactcaggagcaactgcaccagttgcatagtagacttatttcctag

SEQ ID NO: 185980 - DNA, 3762 bp, synthetic construct
  misc_feature 1..3762: note = Description of Artificial Sequence: Synthetic coding sequence
  source 1..3762: mol_type = other DNA
atggcccagagcaagcggcacgtgtacagccggacccccagcggctcgcgtatgtccgccgaggcatccgccagaccactacgtgtggggtctcgggtggaggttatcgggaaaggacacagggggaccgtggcatacgtcggcgcgaccctatttgccacagggaaatgggtcggcgttatcctggacgaagctaaaggcaagaacgacggtacagttcagggtagaaagtatttcacttgtgacgaaggacacggcatcttcgtaaggcagtcccaaattcaggtgtttgaagacggtgccgatacaacttcccccgagactcccgactctagtgccagtaaggtcctcaagagggaaggaacagatactaccgctaaaacctcaaaactgcccaccaggcctgcatccactggggtggccggcgcgtcctcttctctcggaccttcgggctctgccagcgccggcgaactcagtagctctgaaccatccacccctgcacagactcccttagcagctcctattataccaactcctgtcctcacaagcccaggagcggtgccacctctgccttctccatcgaaggaagaggagggcctgcgagcccaggtcagggatttggaagaaaaattggaaaccttgcgacttaagagggccgaagataaggccaaacttaaggagttagagaaacataaaattcagctggaacaggtgcaagagtggaaatccaaaatgcaagagcaacaggcagatttacagcgtcggcttaaagaagcgagaaaggaagcaaaggaggcattggaggccaaggagaggtatatggaagagatggcagataccgcagacgctatcgaaatggcaactcttgataaggagatggccgaagaacgcgcggagagcctgcagcaggaggtcgaggcgctgaaggaaagagtggacgaattaactaccgatttggaaatcctgaaagccgaaattgaagagaagggtagtgatggcgccgcgtccagttaccagctcaagcagctggaagagcaaaacgcccggctgaaagacgcactggtgagaatgagggatctctcttcaagtgaaaaacaggagcacgtgaagctgcagaaactcatggaaaagaaaaaccaagaactcgaagtagtgagacaacagcgggagcgactgcaagaagagttgtctcaggctgaatctacgatcgacgagctcaaggaacaggtggacgctgcactcggagctgaggaaatggttgaaatgctcacagatcgtaatctgaacttggaagagaaagtgagagagctgcgggagacggtgggcgacctggaggcaatgaacgagatgaacgacgaacttcaggagaatgcaagggaaacagaactggaacttagagaacagctggacatggctggcgcacgggtccgcgaagcacagaagcgagtggaagctgcgcaggagaccgtggccgactatcaacagactatcaagaaatacaggcaactcaccgcccacttgcaggacgtgaatagagagctgactaatcaacaggaggcttcggtggagcgccagcaacaacccccaccagagacattcgactttaagataaaattcgccgaaactaaggctcacgccaaagcaatcgagatggaattgcgccagatggaagtagctcaagcaaacaggcacatgtcactgctcaccgctttcatgccagatagcttccttcgcccaggtggggatcacgattgtgtgcttgtgctattgctgatgccaaggttgatctgcaaagccgagttgatccgtaagcaggcacaagagaagttcgagctgagcgagaactgttcagagcgcccgggtctccggggagcggctggggagcagctgagcttcgccgctggcctggtgtactccctgtccttgctgcaggctaccctccacagatatgagcatgccctcagccagtgttctgtggatgtgtacaagaaagtgggctccctctatcccgaaatgagcgctcacgagcggtcacttgatttcctgatcgagttgttgcataaagaccagttggatgagaccgtcaatgttgaacctctcacaaaggccattaagtactaccaacacttgtattctattcacctggccgagcagcccgaagattgcacaatgcagctcgcagatcacattaaattcacccagtccgctctggactgcatgagtgtggaagtgggcagactgcgcgccttcttacagggtgggcaggaggcaaccgatattgcgctgcttctgagggaccttgaaacttcctgcagcgatattcgacaattctgtaaaaagattaggcgacggatgccagggactgacgccccaggcattccagcagcccttgctttcgggcctcaggtatccgacacactgctggactgccggaagcatctgacgtgggtggtcgccgtcttgcaggaagtggccgcagcagccgcacagctgatagcgcctttggccgagaacgaaggactcctggtagcagctctcgaggaactggcctttaaggcctcagagcaaatatacggcactccctccagcagcccttacgaatgtttaaggcagagctgcaatatacttatcagcacaatgaataagctggccactgctatgcaagaaggagaatacgatgccgaacgtcctccatctaagcctccacccgttgagctgcgagccgctgccctgagggctgaaatcaccgatgcagagggattgggccttaaactcgaggaccgcgagactgttataaaggagctgaagaagagcctcaagatcaagggagaggagcttagcgaagccaatgtaagactgtcacttttggaaaaaaaattggatagcgccgctaaggacgctgacgaacggatcgagaaggtgcagacaagactggaagagacccaagcactcctgcgcaagaaggagaaagagtttgaggaaacaatggacgcgctacaggcggacatcgatcagctcgaagcggagaaagccgagcttaaacaacgtctaaatagccagtcgaaaaggacaatcgagggactgcggggcccaccacctagcggcattgccaccctggtaagcggcatagctggtggcgccatacccggtcaggcccccgggtcagttcccggtccaggtctcgtcaaggacagtccgttgttgctacagcagatctcagcaatgcgcttacacatcagccagctccaacacgaaaatagcatcctcaaaggggctcagatgaaagcctctttggcaagcctcccacccctgcacgtggccaagctgtctcatgagggcccgggaagcgagctccctgcaggtgccttgtaccggaaaaccagccagcttttggaaacactgaatcaactatcaactcacacccatgtggtcgatatcacacggacgtctcctgctgcgaagagtccctctgcccaactcatggagcaggtggctcagcttaagtcacttagtgacactgttgaaaaattgaaggacgaggtgctgaaagagacggtctcccagcgtcctggtgcgacagtacctacagattttgcaacttttccctctagcgccttcctgagagccaaggaagaacagcaggatgataccgtctacatgggaaaagtcacattctcttgtgccgcagggttcggacaacgtcaccggctcgtcctgacacaggaacagcttcaccagctccacagtaggctgatctcctag

SEQ ID NO: 185981 - DNA, 1221 bp, synthetic construct
  misc_feature 1..1221: note = Description of Artificial Sequence: Synthetic coding sequence
  source 1..1221: mol_type = other DNA
atggccgaccccaagtacgccgacctgcccggcatcgcccggaacgagcccgacgtctatgaaactagtgatcttccagaagacgaccaggcggaattcgatgccttcgcgcaggagctggaagaattaacttccacatctgtggaacatattatcgtcaatcctaatgcagcatatgacaagttcaaagataagagagtggggactaaaggactcgatttctctgatcgtatcggaaaaaccaagaggaccggttacgagagtggtgagtatgagatgctaggcgagggcctcggggtcaaggaaacgccgcaacagaaatatcaaagactgttacacgaggtgcaggaactgacaacagaggttgagaaaattaagacaactgtaaaggaatctgctactgaagagaagctgaccccagtgctgttagccaagcagctagcggctctcaagcagcagcttgtcgcatcccacctggagaaacttctgggtcccgatgctgccatcaatctgacggacccagatggagcgcttgccaagcgcttgctcctccagcttgaggcaacaaagaattctaagggcggatcaggaggcaagaccaccgggacacccccggatagctcattagtgacttacgaactgcacagtcgccctgagcaggataaattcagtcaggctgctaaagttgcagagcttgagaaacgcttgacagagctggaaactgccgttcggtgtgaccaggatgctcagaacccactgtcggctggattgcagggcgcctgcttaatggagacggtggaacttctgcaggccaaagtgtctgccctcgatcttgcagtcctggaccaggtggaagcacgtctccagagtgtgttaggtaaggtaaatgagattgctaagcataaggcatccgtagaagacgcagatacacagagcaaggtgcatcaactctacgaaacaatccagagatggagtcctatcgcctccacactaccagaacttgtgcagcggctagtaacaattaagcagctccacgaacaggcgatgcaattcggacagcttctgacacatctcgataccactcagcagatgattgcaaactcactgaaagacaataccacgctcctgacacaggtccagacaactatgagagaaaacctggccactgtcgaagggaatttcgctagcatagacgaacgcatgaaaaagctcggcaagtag

SEQ ID NO: 185982 - DNA, 1137 bp, synthetic construct
  misc_feature 1..1137: note = Description of Artificial Sequence: Synthetic coding sequence
  source 1..1137: mol_type = other DNA
atgtacgcccagggcaccgaggacagccggaccctggaggagctgactagcacctccgtggagcacatcatcgtgaacccaaacgccgcttacgataaatttaaagacaagagagtgggaacgaagggcctggacttcagcgacagaattggcaagacaaaacggacgggctacgagagtggagagtatgaaatgcttggagagggattgggcgtcaaggagacaccgcagcagaagtatcagcgactattgcacgaggtgcaggagcttacgactgaagtggagaaaatcaaaaccacagtgaaagagagtgcgaccgaggagaaattgaccccggttctgctcgccaagcagcttgctgccctcaaacaacagcttgtcgcatcccacttggagaagttactcggcccggatgcagccattaatctcaccgaccctgacggcgctctggcaaaacgactactgctccagctagaggctacaaaaaactcgaagggcggttcagggggcaaaaccacgggcacacctccagactcttctctggtcacatatgaactgcattcgcggcccgagcaggataagttctcccaagcagccaaagtggccgagctggagaaacgcttgaccgaactagagaccgcagtgcgctgcgaccaggatgcccagaaccctctgagcgctggcttgcagggggcctgccttatggagacagtcgagttactgcaggctaaagtcagcgctttggacctagctgtcctcgaccaggtggaagcacggctgcagtcggtattggggaaagttaatgagatagctaagcacaaagcgagtgtagaggatgcggacactcagtccaaggttcatcagctgtacgagacgatccaacgctggtcaccaatcgcatctactctacccgaacttgtacagcgtcttgtcacaatcaagcaactgcacgaacaggcaatgcaattcggacagctgcttacacacctggacactacacagcagatgattgctaactcccttaaagataatacaacactcctgacccaagtacaaactacaatgagggagaatctggctactgtcgaaggtaacttcgccagtattgatgagcggatgaagaagttgggtaaatag

SEQ ID NO: 185983 - DNA, 945 bp, synthetic construct
  misc_feature 1..945: note = Description of Artificial Sequence: Synthetic coding sequence
  source 1..945: mol_type = other DNA
atgctgggcgagggcctgggcgtgaaggagaccccccagcagaagtaccagcgattgctgcatgaagtgcaagaactaacaacagaagtggagaagatcaagacaactgtcaaagagagcgcaactgaggagaaactcactccagtgcttttagctaagcaattggcagcgctgaaacagcagttggtcgcaagtcacctggagaagctgctgggccccgacgccgccatcaatctaactgacccggacggcgccctcgcaaagcggctgctcctccaactggaggctacgaagaacagcaaaggcggaagcggcggaaaaaccacaggaacccccccagatagcagcctggtcacttatgagcttcactcccgaccagaacaagacaagttttcccaagctgccaaggtagccgagcttgaaaagaggcttacagaattagagacggccgtgagatgcgaccaggatgcccagaatcctttgtccgcagggctgcaaggcgcctgcttaatggagaccgtggagttattgcaagcaaaggtaagtgctctggacctggcggttctggaccaggtggaagccagactccagagcgtactgggcaaggtgaacgaaatagcaaaacataaggcaagcgtcgaggacgcagacacacaaagtaaggtgcaccagttgtacgaaacaatccagaggtggtcacccattgcttctactctgccagaactggtccagagactggtgacaattaagcaattacatgagcaggcaatgcagtttgggcagctgctcacgcacctggacaccacccagcagatgatcgcgaatagtctgaaggacaacacaactctgctgactcaagtccagaccacaatgcgggaaaacctggccacggtggagggaaatttcgcctcgatagatgaacggatgaagaaactgggcaaatag

SEQ ID NO: 185984 - DNA, 1221 bp, synthetic construct
  misc_feature 1..1221: note = Description of Artificial Sequence: Synthetic coding sequence
  source 1..1221: mol_type = other DNA
atggccgaccccaagtacgccgacctgcccggcatcgcccggaacgagcctgatgtgtatgaaaccagcgatctgcctgaggacgatcaagcagaattcgatgccacagtgcaacacttagaggagctaacctctacatctgtggaacacatcatagtcaaccctaacgcagcctatgataaattcaaggataagcgcgtgggaactaaagggctggactttagtgaccggattgggaaaaccaagcgcacaggttacgaatctggtgagtatgagatgctgggcgaaggactgggcgtaaaagagactcctcaacaaaaatatcagcggctccttcacgaagtgcaggaactgaccaccgaggttgagaagataaaaacgaccgtgaaggaatcggccaccgaagaaaagctgaccccagtgctcctcgccaaacaactggctgccctgaaacaacagctcgttgcgtctcatctggaaaaactgctcggtcctgatgccgctattaatctgacggatcctgacggcgctctcgccaaaagactgctgctacagctagaagccacaaagaatagtaaaggcggcagcggaggcaagacgaccggtacacctccagactcctcgctggtgacatatgagctgcatagcagaccagagcaagataaattcagtcaagccgctaaggttgccgaacttgaaaagaggctgacagagctggaaacagctgtgcgctgcgaccaggatgcacagaaccccctgagcgccggattacagggggcctgtctcatggagacagtggaactcctccaagccaaagtttccgctttagacctcgcagtcctggaccaagtggaagcccgcctgcagagcgtgcttggcaaggtgaacgagatagccaaacacaaggcctctgttgaagacgcagacacgcaatccaaggtgcatcaactgtacgagacgattcagcggtggagtcctattgccagcactcttccggagctggtgcaacggctcgtgactatcaaacagttacatgagcaggccatgcagttcgggcagctactgacacatctggacaccacccagcagatgattgccaacagtctgaaggacaacactaccctgcttacccaggttcagactacgatgcgagaaaacttggccactgtcgaaggcaactttgctagtattgacgagcgaatgaaaaaactcggtaaatag

SEQ ID NO: 185985 - DNA, 1206 bp, synthetic construct
  misc_feature 1..1206: note = Description of Artificial Sequence: Synthetic coding sequence
  source 1..1206: mol_type = other DNA
atggccgaccccaagtacgccgacctgcccggcatcgcccggaacgagcctgacgtgtacgaaacttcagatcttcccgaggacgaccaggctgagttcgatgcggaggaattgacctcgacatcagtggaacacatcatagtgaacccgaatgccgcttacgataagttcaaggataaaagggtcggtactaaaggcttggacttcagtgaccggatcggaaagacaaaacgtactggttacgaatctggcgaatacgagatgctgggtgagggcctgggagtgaaggagactccacagcagaagtaccagagactgctccatgaggtccaggagctgacaactgaggtagagaaaataaagacgaccgttaaagaatctgctaccgaggaaaaactaacccccgttttgctggcaaagcagttagcagctctgaaacagcaactcgtggcttcacacctcgaaaaactacttggtccggacgcagccataaatctgacggaccccgatggggctctggcgaaacggttactgctccagcttgaggctacaaaaaactctaaaggtggctccggagggaagactaccggaacacctcccgactcctccctcgtcacatacgaacttcattcccggcccgaacaggataaattctcacaggccgcaaaagtggccgagttggagaagcgcttgacggaactggagactgccgtgaggtgtgatcaagatgctcaaaaccccttaagtgcgggtcttcaaggggcttgtcttatggagactgtagagctgctacaagcaaaggtgagtgccctggatctggccgtgctggatcaggtggaggcccgactccagtctgtcctgggcaaagtgaatgagatcgccaagcacaaggcaagtgttgaagatgcggacacccagagcaaggttcatcagttatatgaaactatccaaaggtggagccccattgccagtaccctccctgaactggtgcagcggttagttacaattaagcagctccatgaacaggccatgcagtttggccagctactcacccatctggacactactcaacagatgatcgcaaatagtctgaaggataataccactctgttaacacaggttcagactaccatgcgcgaaaatctggctacagtcgaagggaactttgcttccatcgacgagaggatgaagaaattagggaaatag

SEQ ID NO: 185986 - DNA, 561 bp, synthetic construct
  misc_feature 1..561: note = Description of Artificial Sequence: Synthetic coding sequence
  source 1..561: mol_type = other DNA
atggccggcctgaccgacctgcagcggctgcaggcccgggtggaggaactggaacggtgggtatacggccctggaggagcgaggggttctaggaaggtcgctgatgggctggtaaaagttcaggtggcgttgggtaatatctcatcaaagagggaacgcgtaaagattctctataaaaagatcgaagacttgattaagtatctggatccagaatacatagatcggatagcgatccctgatgcttctaaattgcagttcatcctggctgaagaacaatttatcctcagtcaagtggctctgctggagcaagtcaacgccttagtgcctatgctggatagcgcccatatcaaagccgtgccagagcacgctgcccggctacagcgcctggcacagattcatattcagcagcaggaccaatgtgttgaaatcactgaggaatccaaagccctgcttgaagaatacaataagacaactatgctgctgtccaaacagttcgtgcaatgggacgaacttctatgccagcttgaagccgcgactcaagttaagcccgcagaggaatag

SEQ ID NO: 185987 - DNA, 531 bp, synthetic construct
  misc_feature 1..531: note = Description of Artificial Sequence: Synthetic coding sequence
  source 1..531: mol_type = other DNA
atggccggcctgaccgacctgcagcggctgcaggcccgggtggaggaactcgagaggtgggtatacggacctgggggagcacgaggctcccggaaggtagccgacgggctagtgaaggtgcaagtggctttgggcaacattagtagcaaaagggaacgcgtgaaaatcctgtacaagaagatcgaggatctgattaaatacttagacccagagtacattgatcgaatcgccataccagatgcgtccaagttacagttcatcctggcagaagagcagttcatcctgagtcaggtggctctgctggaacaggtaaacgcactagtgcccatgctggactctgcccacatcaaagccgtcccagagcacgccgcccgcctacaacgactagcacagatccatattcagcaacaggcaccttggggtgtaggagttagagacgaggctgggtcgctcgtggaggacgttggattcgcccagtttctatctgtcttacactttggccccacaggcccggtctgtggcaaccactag

SEQ ID NO: 185988 - DNA, 486 bp, synthetic construct
  misc_feature 1..486: note = Description of Artificial Sequence: Synthetic coding sequence
  source 1..486: mol_type = other DNA
atggccggcctgaccgacctgcagcggctgcaggcccgggtggaggagctcgagagatgggtgtacggacccggtggggctagaggttcgaggaaggttgcagatggattggtcaaggtgcaggtagccctggggaatatatcttccaaaagagagcgcgtcaaaatcctgtataagaaaatcgaggacctcatcaagtacctggaccctgaatacatagaccggattgccatccccgacgcatctaagctccagtttattctggccggaaacgccggcctacatgtgtatatgcacctgaggatgtgggtcgtaggcgaagtgaagcatcgggacggactgagtatacagtctagcggcgggtacaagccttggatgctcctgtcaggaatcgtggcctggttttgggtggaagaccccatggatccgctggtcgatatcgaatactcaatacctcttcatcagttacaggccatggtaccttag

SEQ ID NO: 185989 - DNA, 315 bp, synthetic construct
  misc_feature 1..315: note = Description of Artificial Sequence: Synthetic coding sequence
  source 1..315: mol_type = other DNA
atggccggcctgaccgacctgcagcggctgcaggcccgggtggaggagctggaaaggtgggtgtacggcccaggcggcgccagaggctcaaggaaggtggcggatggcttggttaaagtgcaagtggcattgggcaacatttcatcaaagagggagagggtgaagatcctgtataagaaaattgaggatttgatcaagtatctggatccggagtacatcgaccgtatcgccattcccgacgcatcaaaattacagttcatccttgctgagcggtcttccctgtcctttccccgcctccatagttggagtagatag

SEQ ID NO: 185990 - DNA, 477 bp, synthetic construct
  misc_feature 1..477: note = Description of Artificial Sequence: Synthetic coding sequence
  source 1..477: mol_type = other DNA
atggccggcctgaccgacctgcagcggctgcaggcccgggtggaggaattagaacgttgggtgtatggccccgggggcgctcgcgggtctagaaaggtcgcagacggtctggtgaaagtccaggttgccctcgggaatatctcctctaaacgcgaacgagtaaagatcctatataagaaaatcgaggacctcattaagtatctggatccagaatacattgaccggatcgcaatccctgacgcgagcaaactgcagtttatcttagcggcagtgcccgaacatgcagcgaggttacagcgattggcacaaatccacattcagcaacaagaccagtgtgtcgagataaccgaggagtccaaggccctgttagaagaatataacaaaactacgatgctgcttagcaagcagttcgttcaatgggatgagttgctttgtcaacttgaggcagcaacccaggtgaagccggcagaagagtag

SEQ ID NO: 185991 - DNA, 456 bp, synthetic construct
  misc_feature 1..456: note = Description of Artificial Sequence: Synthetic coding sequence
  source 1..456: mol_type = other DNA
cagcggctgcaggcccgggtggaggagctggagcggtgggtgtacggacctggcggggcgcgcgggtcaaggaaggtagccgacggtctcgtcaaggtgcaggtagcactaggcaatatctcttctaaaagggagcgcgttaaaatactgtacaagaagatcgaggatctcatcaagtaccttgatcccgaatatatcgatagaatcgctattcctgacgcctccaaactgcaatttatactggccgccgtccccgagcatgctgcaaggctccagagactcgcacagattcacattcagcagcaagaccagtgcgtcgaaatcacagaggaatcaaaagccttgctggaggagtataataaaaccacaatgttactgtctaaacagttcgtgcagtgggatgagctgctgtgccagctcgaggccgctacccaggtcaagcccgccgaagagtag

SEQ ID NO: 185992 - DNA, 519 bp, synthetic construct
  misc_feature 1..519: note = Description of Artificial Sequence: Synthetic coding sequence
  source 1..519: mol_type = other DNA
atggccggcctgaccgacctgcagcggctgcaggcccgggtggaggagctggagcggtgggtatatggccctggcggtgcccgaggttcacgtaaggtggcagacggactcgtgaaggtgcaggttgcgttagggaatattagcagtaaacgcgaacgcgtcaagatattatacaagaagattgaggacttaattaagtatctagaccctgaatatatcgataggatagctatcccagatgccagcaagctccagttcattcttgctggaaatgcaggactgcacgtgtatatgcacctgaggatgtgggtggtcggagaagtgaagcatcgagacgggttgagtattcaaagctctggaggatataaaccctggatgctgctgtctggtatagtggcctggttttgggtagaggaccccatggatccattggtcgatatagaatattctatacccctgcaccagttgcaggccatggttccggctacggtaggggccagcccagtgttctaccagtag

SEQ ID NO: 185993 - DNA, 549 bp, synthetic construct
  misc_feature 1..549: note = Description of Artificial Sequence: Synthetic coding sequence
  source 1..549: mol_type = other DNA
atggagctgggcgagctgctgtacaacaagagcgagtacatcgagacagcatccggcaataaagtctctagacagagtgttctctgcggcagtcagaacattgtgctcaacgggaagaccattgtgatgaacgactgcatcatacgtggagacctggcaaatgtgagggtgggaagacactgcgtggtgaagagccgatccgtgataagaccaccattcaagaagttcagcaagggggtagcatttttccctctgcacatcggtgatcatgtctttatcgaggaggattgtgtggtgaatgctgcccagatcggaagttatgtccacgtgggtaagaattgcgtcatagggcgcaggtgtgtgctcaaggattgctgcaagatactggacaatactgtactaccacctgaaactgtagtgcccccattcacggtattctccggctgtccaggcctgttctctggtgaattgccggagtgcacccaagaacttatgatcgatgtgaccaagtcctactatcagaagtttcttcctttaactcaggtgtag

SEQ ID NO: 185994 - DNA, 255 bp, synthetic construct
  misc_feature 1..255: note = Description of Artificial Sequence: Synthetic coding sequence
  source 1..255: mol_type = other DNA
atggagctgggcgagctgctgtacaacaagagcgagtacatcgagaccgccagcggcaacaaggtttcgaggcagtcagttctgtgcggctcacagaatatagtgctgaatggcaagaacttcgtcataagcgtcttcctgagcccctacattcgatgccattctgcctgccgggacaggaagagaagtgatgaatcggttagactgagtgtgaataaccgggagtggtggggcctcgttaactggagaatgtag

SEQ ID NO: 185995 - DNA, 1650 bp, synthetic construct
  misc_feature 1..1650: note = Description of Artificial Sequence: Synthetic coding sequence
  source 1..1650: mol_type = other DNA
atggagttcgccgagctgatcaagaccccccgggtggacaacgtggtcctacaccgcccattctatcccgcagtcgaaggcaccctgtgcttgaccggccaccatctcatactgtctagcagacaagataatactgaggaactatggctgctccactccaacattgacgcgatagataagcgattcgtgggttccctaggtactatcattatcaaatgcaaagactttagaattatccaactcgacatcccagggatggaggagtgcctgaatatcgcctcttccatcgaagctttatctaccctggatagtatcacgctgatgtacccctttttttaccgccccatgtttgaagtgatcgaggacggatggcattcctttctaccggaacaggagttcgagctgtattcctccgcaacttccgagtggcgattaagttatgtcaacaaggaattcgcagtgtgcccttcatatcctcccattgtcacagtacctaagtcgattgatgatgaggccttaagaaaagtggctactttccgtcacggggggcggtttccggtcttaagttattatcacaaaaaaaacggcatggtgattatgagatccgggcaaccactgaccggaaccaacggaagacgctgtaaagaagacgagaagcttatcaatgctactctgcgggctggaaaaaggggttatatcatagacactaggagccttaacgtggctcaacagacgcgagccaagggggggggtttcgaacaggaagcacactacccgcagtggcgaaggatccacaagtctatcgagcggtaccacatcttgcaggagagcttaattaagctggtggaagcctgtaacgatcaaactcataacatggatcgctggctttcaaaactcgaggcttcaaactggctcactcacatcaaagagatactgactacagcttgcttagcagcccagtgtatcgaccgcgagggtgcatccatactgatccatggcaccgagggaaccgattccactttgcaggtcaccagcttggcccagatcatcctggaacctagaagcaggaccatccgcggctttgaggctctcattgagcgggaatggctgcaggcaggccaccccttccagcagcggtgcgcgcagtcagcctactgtaatacgaagcagaaatgggaggcacctgtgttcctgctgtttctggactgtgtttggcagattctccgacagtttccctgttctttcgaattcaatgagaattttctcattatgctgtttgaacacgcctacgccagccagtttggtaccttcctggggaataacgaatccgaaaggtgtaaattgaagctccaacagaagactatgtcactatggtcctgggtaaaccagcccagtgagcttagtaaattcactaatcccttattcgaggctaacaaccttgtcatctggcctagcgttgcaccacaatccctgcctctgtgggaaggaatctttttacgatggaatcgctcctccaagtacctggatgaagcatatgaggagatggttaacatcatcgagtacaataaagagcttcaggcaaaagtgaacattctgcgcaggcaactagctgagctggaaactgaagacggaatgcaggagtccccatag

SEQ ID NO: 185996 - DNA, 2556 bp, synthetic construct
  misc_feature 1..2556: note = Description of Artificial Sequence: Synthetic coding sequence
  source 1..2556: mol_type = other DNA
atgggcaaccggggcatggaggacctgatccccctggtgaaccggctgcaagatgccttcagcgccattgggcagaacgccgacctggatctcccacaaatcgccgtggttggcggccagtcagccggcaaatcaagcgtgctcgaaaattttgtgggtagagactttctccccaggggcagcggcatcgtgactcgccggcctctggtcctgcaactggtgaatgctaccacagaatatgcggagtttctgcattgcaagggaaagaagtttaccgatttcgaggaggtgcgtttggagattgaggcggaaaccgaccgagtgactggcactaacaagggcatcagcccagtgccaatcaatctaagagtctactctccccacgttctgaacctaacactcgtggacctgcccggtatgaccaaagtgccagtcggcgaccagcctcctgacatcgagttccaaatcagggatatgctcatgcagttcgtcactaaagaaaattgcctaattctcgcagtgagtccagccaatagcgatttagcaaattccgacgctcttaaggtcgccaaggaagttgatccacaggggcaacgaacaatcggcgtgataactaaattggacctcatggatgaggggacagatgcccgggacgtcctggaaaacaaacttctcccgctgcgaagaggttacattggagtggtgaatagaagccagaaggacatcgatggcaagaaagatattacggcagccctcgccgctgaaaggaagttcttcctgtcacacccaagttacagacaccttgccgaccgtatgggcacaccttatctacagaaagtgctgaaccagcaactcaccaaccatatacgagacacgctgccgggactgcgtaataagcttcaaagccaacttctgtcaatcgagaaggaggttgaggagtataaaaattttcgcccagacgatcccgccagaaaaacaaaagctctgctgcagatggtccagcagtttgccgtggatttcgagaaacgtattgaaggcagcggcgaccagatcgacacctacgagctctctggcggtgcaagaatcaatcggatctttcacgaacgattcccttttgagttagttaagatggaattcgacgagaaagagcttcgtagagaaatctcctacgccattaaaaacattcacgggatccgcactggattgttcaccccggacatggccttcgagacaattgtgaaaaagcaggttaagaaaatccgggagccgtgcctaaaatgtgttgatatggtgatcagcgaactgatctctacagtgcgccagtgtacaaagaagctgcagcagtacccaaggctaagagaggaaatggagagaatagtaactactcacatcagagagagagaaggccggactaaggagcaggtaatgctgttaatcgacattgaattggcgtatatgaatacgaatcatgaagattttatcggatttgccaacgcacaacagaggtcaaaccaaatgaataagaaaaagactagtggcaatcaggacgaaatcctagtaatcaggaagggctggctgaccataaacaatataggcataatgaaaggcggctctaaagagtactggttcgtgctgactgccgagaatctctcttggtacaaggacgatgaggagaaagagaaaaagtacatgctctcagtggacaacctgaaactacgagacgttgagaaaggtttcatgagctcgaagcacatcttcgccctttttaacacggaacagcgcaacgtgtataaggattacagacaattggagttggcctgcgaaacacaggaggaggtggacagctggaaggcctccttcctgagggccggcgtgtatcccgagagagtcggagataaagagaaggcctctgaaacagaggaaaacgggtctgatagcttcatgcacagcatggatccacaactcgagcgacaggtcgagactattaggaacctcgtggattcctacatggcgatcgttaacaagacagtgagagacctgatgcctaaaactatcatgcacctgatgattaataatactaaggaatttatcttcagtgaattgctggcgaatctgtatagctgcggtgatcagaatacattgatggaggaatccgcggagcaggcccagaggagggatgaaatgttaagaatgtaccacgctctcaaagaagccttaagcatcattggggacataaataccacaaccgtcagtaccccaatgcccccgcccgtggatgacagctggttgcaggtccaatctgttccagctggacgtcggagccctacgtctagccccaccccgcaaaggcgggcccccgctgtaccccccgctaggcctggctcacggggcccagctcccggccctccaccagcaggttctgccttaggcggggccccccctgttccgagccggcctggagctagtcctgacccattcggccctcctccgcaggtaccctccaggccaaatagggctcctcccggcgtgccaagaatcacgatttcagacccctag

SEQ ID NO: 185997 - DNA, 2595 bp, synthetic construct
  misc_feature 1..2595: note = Description of Artificial Sequence: Synthetic coding sequence
  source 1..2595: mol_type = other DNA
atgggcaaccggggcatggaggacctgatccccctggtgaaccggctacaagatgcattctctgctatagggcaaaacgctgacctggacctcccgcaaatcgctgtggtcggggggcaaagtgcagggaaatccagtgtccttgaaaacttcgtagggagagactttcttcccaggggaagcggcattgtcacccgacgcccgcttgttcttcaactggtgaatgcaaccactgaatacgccgagttcctacactgcaagggcaagaaattcacagacttcgaggaggtgcggctagagatcgaagcagaaactgaccgcgtgacgggcaccaacaagggtatttctcccgtccctattaatctgagggtgtactccccccatgtgctgaatttgaccttggtggatctccctgggatgacaaaggtccccgtcggtgaccaaccaccagacatagaatttcagatccgagatatgttaatgcagtttgtcactaaggagaactgcctcatcctagccgtgagtcccgctaatagcgatttagccaacagtgacgccttgaaggtcgctaaagaagtggacccgcagggccagcggacaataggcgtcattaccaagctggatctgatggacgagggcacagatgctcgcgacgttctggagaataaactacttccccttagacgaggctacattggggtagtgaacagatctcagaaagatatcgacggcaagaaggatattaccgccgcactcgccgccgagcggaaattctttctatcccacccgagctaccggcatctggccgaccggatgggcaccccctacctgcagaaggttttgaaccaacagctgaccaaccacattagagataccctgccaggcctaaggaataaacttcagtcacagctattgagtatcgagaaggaggtggaggagtacaaaaatttccgtccagatgaccctgcacggaaaaccaaggcattgttacaaatggttcaacagttcgccgttgatttcgagaagagaatcgaaggatccggcgaccagattgatacgtacgaactgtctggaggggctagaattaaccggatatttcacgagagattccctttcgaactggtcaagatggagtttgatgaaaaagaactcaggcgggaaatttcatacgctattaaaaacatccacggcatccgaactggtctctttacgcccgacatggctttcgaaacaatcgttaaaaagcaggttaagaaaatccgcgaaccctgccttaagtgcgtggatatggtaattagcgaactgattagtactgtccgacagtgtactaaaaaactgcaacagtacccccgcctccgggaggagatggaacgcatcgtgactacccacattcgcgagcgggagggacgaaccaaggaacaagtcatgttgttaatcgacatcgagctggcttacatgaacaccaaccacgaggactttatcggctttgccaacgctcaacagaggtcaaatcagatgaataagaagaagacatctgggaaccaggatgagatactcgtcatacgcaaggggtggcttacaataaacaatatcggcataatgaaagggggtagcaaggagtactggtttgtgctcacagccgaaaacctgagctggtataaagatgacgaagaaaaggaaaagaagtacatgctatctgtggataaccttaagttaagagatgttgagaagggctttatgtcgtcaaaacatatcttcgccctattcaatactgagcagcgcaacgtgtataaagactacagacagctcgaattagcatgtgagacacaagaagaggtggactcctggaaggcgtcgtttttgcgagcaggagtgtatcctgagagagtcggtgacaaggagaaagcttcggagacagaagagaatggctctgactcatttatgcattcaatggaccctcaactggagaggcaggtggaaaccatcaggaacctggttgactcctatatggccattgtcaacaagaccgttcgggacctgatgcccaaaaccattatgcatctcatgattaataacactaaagaattcatcttctctgagctgttagccaatctttacagttgcggtgaccagaatacacttatggaggagagcgcggaacaggctcagcggcgcgatgagatgctcagaatgtatcacgcgctgaaggaggccctatctattattggagatattaacacaaccaccgtcagcactcccatgcccccccctgtggatgacagctggctccaggtacagagtgtccccgcgggaagacggtctccgacctcatctcctaccccccagcgccgcgccccagctgtgccccccgcccgtccaggttcgagaggcccagctcctggacccccgcccgctgggtctgcattgggcggagcgccacctgtcccgtccagaccaggagccagtcctgatccattcggaccacctcctcaggtccccagccgcccaaacagggcaccgcctggagtaccgtctcgttctggacaggcatccccaagccggcctgaatctcctagacctccattcgacctgtag

SEQ ID NO: 185998 - DNA, 1989 bp, synthetic construct
  misc_feature 1..1989: note = Description of Artificial Sequence: Synthetic coding sequence
  source 1..1989: mol_type = other DNA
atggaggacctgatccccctggtgaaccggctgcaggacgccttctcagcaatcggccagaacgccgacctagatctgcctcaaattgcagtggtaggcggacagagcgccggcaaatcctcagtattggaaaatttcgttggtagagactttctcccacgcggatcagggatcgtgacccgtcgcccactcgtactgcagctggtcaacgccactaccgagtatgctgaattcttacactgcaaaggcaagaagtttaccgactttgaagaagtgcgactggagatagaagccgaaacagaccgagtgactgggacaaacaaagggatctctcccgtcccaattaacctgagagtgtatagcccacatgtgctcaatctaaccctggttgatctgccagggatgacaaaggttccagttggtgatcagcctccagatattgagttccaaatcagagacatgttaatgcaattcgtgacaaaggagaattgcctcatcctggctgtctcaccagctaatagcgacttagcaaactctgacgctctaaaggtggctaaagaggtggatccacagggccagcggacaatcggagtcataaccaagctggatctcatggacgaaggtactgacgccagagacgtactggaaaacaagttattaccacttcgcagggggtacatcggcgtcgtaaaccggagccaaaaagacattgatggtaaaaaggacattactgcagcattagcggctgaaaggaagttctttctctcccatccttcatatcggcatctagccgaccgtatggggactccttacctgcaaaaagtgctgaaccagcagttgacaaatcatatccgtgataccctcccagggctcaggaataagctccagtcccagctgctcagcattgagaaagaagtcgaggaatacaagaattttcgacctgatgaccccgcacggaagacaaaggcactcctgcagatggtccaacaatttgcagtcgatttcgaaaagcgcatagaggggagcggcgaccaaatcgacacctatgagctctcgggcggtgcgaggataaaccgaatctttcacgagcggttcccctttgagttagtcaaaatggagtttgacgagaaggaacttaggcgggagatctcgtatgcgatcaaaaacatccacggaattagaactgggctatttacccccgacatggccttcgaaactatcgtgaagaagcaggtcaagaagatcagagaaccttgtttgaagtgcgtggatatggtgataagtgagttgatcagcaccgtaaggcaatgtacaaaaaagctccagcagtaccccagattgcgggaagagatggagaggatcgtgacaacacacatccgagaaagagagggccgcaccaaggagcaggtcatgctcctgattgatatcgagctggcttacatgaacacgaatcatgaggacttcatcgggttcgccaatgctcagcagaggtctaaccagatgaataagaagaaaacgtctggcaaccagattacactccaggttatccgaaaaggctggctcacaatcaacaacatcggaataatgaaggggggatctaaagagtattggttcgttcttacggccgaaaacctctcatggtacaaggacgacgaggaaaaggaaaagaaatatatgctaagcgtcgataacttgaaactgcgtgacgttgagaagggattcatgtcttcaaaacacatctttgccttgtttaataccgaacagcggaatgtctacaaggactataggcagctggagctggcttgcgagacacaagaggaggtggactcctggaaggcctcatttctacgcgctggggtataccccgagagggtcggagacaaggagaaagtgagtgtccctttttcgtgcctgctaccgggcatctgcagcctagcccccgcccctgcgcggtttagctccaaaggacctggagatgtgctgttctag

SEQ ID NO: 185999 - DNA, 2556 bp, synthetic construct
  misc_feature 1..2556: note = Description of Artificial Sequence: Synthetic coding sequence
  source 1..2556: mol_type = other DNA
atgggcaaccggggcatggaggacctgatccccctggtgaaccggctgcaggacgcgttctcagctatagggcagaacgcagacctggatctgccccagattgcggtggtgggaggccagtccgcaggcaagtcttctgtgctcgagaattttgtggggagggacttcctacctcgcggctcaggtattgtcacccgccggccgctggttttacagctagtcaacgcaacaacggagtacgccgagttcttacactgtaaaggaaaaaagttcaccgactttgaagaggtgcgccttgaaattgaagctgaaactgacagggtgacaggtaccaacaagggtatcagccctgtgcccatcaatctgcgcgtctatagtccccatgttttgaatctgacactcgtggatcttcctggcatgacaaaagtgccggtgggcgatcagccacctgatatcgaatttcagatccgcgatatgttgatgcagttcgtgacaaaagagaattgtctgattttggctgtctccccagccaacagtgatctagcgaattccgatgcactgaaagtggccaaggaagtggatccgcagggacagcggacaatcggcgtcattacaaaattggatctgatggatgagggaaccgacgctcgggatgtcctggagaacaaactattgccattgaggcgcgggtatataggcgtcgtgaatagaagccagaaggatatcgatggaaagaaggacattacagctgcgctggcagctgagcggaagttctttctaagtcacccttcttacaggcacctcgcagacagaatgggaacaccctacctgcagaaggtgcttaaccagcagttgactaatcatatccgcgatacgctccctggcctcagaaacaaactgcaatcccagttattgtccatagagaaagaggtcgaagagtataaaaatttcaggccagatgatcctgcgcgtaaaacaaaggccctgttacagatggtgcagcagttcgccgtagattttgagaagcggattgaaggcagcggcgaccagattgacacttatgagttgtccggaggcgcccgcatcaatagaatcttccacgagcggttcccttttgaattagttaagatggagttcgacgagaaagaactgcgtcgggaaatctcttatgcaatcaagaatattcacggaatacgcaccgggcttttcacccccgacctggcttttgaagctaccgttaagaagcaagtccagaagttgaaggaaccatccattaagtgcgtagatatggtggtgtctgaattgaccgcgacaatccggaagtgttctgagaaactacagcagtacccacgcttacgggaggaaatggagcggattgttaccacgcacattcgagaaagagaaggacgcacaaaggaacaggtgatgttgcttatcgacatcgaactggcgtacatgaatacgaaccacgaggactttattgggttcgcgaatgcgcagcaacgctctaaccaaatgaacaagaaaaagaccagtggtaatcaagacgaaattcttgtgattcgtaaaggctggctgacaatcaataacatagggattatgaaaggggggtccaaagagtactggtttgtcttgacggccgaaaacctcagctggtacaaggacgatgaggagaaggaaaagaagtatatgctgagcgtggataatctgaaactaagggacgttgagaaggggtttatgtcctctaagcacatatttgccttatttaatactgaacagagaaatgtttacaaagactatcggcagttggaactagcctgtgagacgcaggaggaggtggacagttggaaggcaagcttcctacgggcgggtgtgtaccctgagagagtgggtgacaaagaaaaggcctccgagacagaggagaacggatcggatagcttcatgcattcaatggacccccaattggagaggcaggttgagacaattcgcaacctcgttgactcttacatggctattgtgaacaagactgtgagggatctgatgcctaaaactatcatgcaccttatgatcaacaataccaaagaattcatctttagtgaactcctcgctaatctgtactcttgtggggaccagaacaccctcatggaggagtccgccgaacaggcccagcgcagggatgaaatgttgaggatgtaccacgccctgaaagaagccctgtccattatcggtgacatcaacactacaacagtttccaccccgatgccccccccagtggatgactcatggctacaggtgcagagtgtgcctgccgggcgtagatctccaacgagcagcccaacgccccagcggagagcccccgcagtccctcccgctagacctgggtctcggggaccagcacctggtccacctcctgcaggctctgctttgggcggcgcccctccggtgccctcacggcctggggccagcccggatccgtttggtcccccaccacaggtacccagccggcctaaccgcgccccccctggagtgccacgcattacgatttctgacccatag

SEQ ID NO: 186000 - DNA, 2556 bp, synthetic construct
  misc_feature 1..2556: note = Description of Artificial Sequence: Synthetic coding sequence
  source 1..2556: mol_type = other DNA
atgggcaaccggggcatggaggacctgatccccctggtgaaccggttgcaggacgcttttagcgccatcggccagaatgccgacctggacctcccccagattgccgtggtcggtgggcagagtgcgggcaagagctcagttctagagaatttcgtcggccgcgacttcttgcccagaggttccgggattgtcacacgcaggccactggtgctgcaactggtgaacgcaactacagaatatgcagaattcctgcattgtaagggcaagaagtttaccgactttgaggaagtacgactcgagatcgaagccgaaaccgatcgtgtaactgggacaaataaaggaatctcaccagtgcccattaacctgcgagtctacagtccacatgttctaaacctgaccctagtggacctccctggtatgaccaaagtgcccgtcggagaccaaccaccggacatcgaatttcagatcagagacatgcttatgcaatttgttaccaaggagaattgcctcatcctggccgtgagccctgcaaatagtgatctcgcgaacagtgacgcgctgaaggtggccaaggaagtcgaccctcaagggcagcggaccatcggggtcataactaaactggacctaatggacgagggaactgacgcaagagacgttctggagaacaagctcctcccactccggagaggctacatcggggtcgtgaacagatctcagaaagatatcgacggcaagaaggatattacagctgccctggcagctgaaagaaagttcttcttgagccatcccagttaccgccatttagccgaccgaatggggaccccgtacctccagaaggtgctcaaccagcagctcactaaccatatcagagacacgctgcccggcctccgcaacaaactgcagtctcagctgttgagcatcgaaaaagaggttgaagagtataagaattttcgacctgatgatcctgccagaaagaccaaagccttactccagatggtgcagcagttcgcagtggacttcgaaaagagaatagagggatccggggatcagatcgacacatatgagctcagtggaggagctcgcattaataggatctttcatgagaggtttccttttgaactggtaaagatggagtttgacgaaaaggaactacggcgagagatttcctacgccattaaaaatattcacggaattaggacagggctctttactcccgacctggcttttgaggccaccgtaaaaaaacaggtgcagaagcttaaggagccttcaattaagtgcgtggatatggtggtaagtgagttaactgccacaatcaggaagtgctccgagaagctgcagcagtaccccaggctccgcgaggagatggaacggatcgtgacaacacatatcagggagcgagaagggcgcacaaaggagcaagtaatgctgctgattgatattgagctcgcatatatgaataccaatcatgaagattttatcggatttgccaatgcccaacagcggtccaaccagatgaacaaaaaaaaaactagcgggaaccaggacgaaattctagttataaggaaaggctggctgactatcaacaacatcggaatcatgaaaggtggctcgaaagagtattggtttgtcctgacggctgagaatctgagttggtacaaagacgacgaagagaaggaaaagaagtacatgctgtcagtggataacctcaaattaagagatgtcgagaagggattcatgtcctcaaaacatatcttcgctctcttcaacaccgaacagagaaacgtatacaaagactacagacagctggaactggcatgtgagacgcaggaggaggtagactcttggaaggcgtcttttctaagggcaggcgtataccccgagcgcgtgggcgacaaggaaaaagcctcagagacggaggaaaacggaagtgatagctttatgcattccatggatccccaactggaaaggcaggtggagacaatcaggaaccttgtcgattcctacatggctatcgtcaataaaactgtgagagatctcatgcctaagaccatcatgcacctaatgatcaacaacaccaaggagttcattttttccgagctgctcgccaacctgtatagttgtggagatcaaaacaccctcatggaggaatctgctgagcaggcccaaagaagggatgagatgctcagaatgtaccacgccctgaaagaggccctcagtatcataggtgacattaatacaaccactgtgagcacaccaatgcctccccctgttgatgatagttggctccaggtgcagtcagttccggccggcagaaggtcaccgacttcatctcctaccccccaacggcgggcccctgcagtaccccccgcaagaccagggtctcggggtcccgctccaggaccgccacccgcgggttcggccttgggcggagccccgcccgtgcccagcaggccgggagcctctcccgaccccttcggtccaccgccacaggttccttcccgaccaaacagagccccaccgggagtgcctcgaatcacaatttctgatccttag

SEQ ID NO: 186001 - DNA, 2595 bp, synthetic construct
  misc_feature 1..2595: note = Description of Artificial Sequence: Synthetic coding sequence
  source 1..2595: mol_type = other DNA
atgggcaaccggggcatggaggacctgatccccctggtgaaccggttgcaagacgcattttcggccatcggtcagaacgccgatcttgatctgccccaaatcgccgtcgtgggtgggcaatccgcaggaaaatcatctgttcttgagaatttcgttggtcgggacttcttgcctaggggttctggaattgtgacccggcgtccactcgtgctgcagctggtgaatgccaccacggagtatgctgagttcctacactgtaagggtaagaaattcactgattttgaggaagtcagacttgaaatagaggccgagactgatcgagtaactggaaccaataaaggtatttctccagtcccaattaatctgcgagtctatagccctcacgtgctgaatttgaccctagtagatctgccaggtatgactaaggttcctgtgggcgatcaacctcctgatatcgaatttcagattagggacatgctgatgcagtttgtgactaaggaaaattgcctgatcctcgcagtgtctccagccaactcagatttagctaatagcgatgccctcaaggtcgcgaaggaagtggatccacaggggcaacgcactattggcgtcatcacgaagctggatctgatggacgagggcacggacgcaagggacgttctggagaataagctcctacctctccgtcgcggctacataggcgtggtcaataggtcccaaaaggatattgacggcaagaaagatatcactgccgcactcgctgccgaacgtaagttttttctctcccatcctagctaccggcacctggccgatcggatggggacaccttacttgcagaaagtcttgaatcagcaactcaccaaccacatcagggacacgctgccaggcctgcgaaataagcttcagagccaactgttgtccattgagaaagaggtcgaggagtacaaaaacttcagacctgacgatcccgctcggaagactaaggccttgttacagatggttcagcagttcgccgttgacttcgagaagagaattgaaggcagcggggatcagatagatacttatgaactctccggaggcgcaagaatcaaccgcatatttcacgagagattccccttcgagttagtgaagatggagtttgacgaaaaggaattgcggagggaaatcagctacgccattaagaatatccacgggatcaggaccggcctgtttacccctgatctggcatttgaggcgactgtgaagaagcaggtccagaaattgaaagaaccaagcataaaatgtgtcgacatggttgtgtcagagttaaccgctacaatcagaaaatgctctgaaaaactccagcagtatccccgtctgagggaagagatggagaggattgtgacaactcatatacgggaaagggaaggccggacaaaggagcaagtgatgttgctcattgatatcgagttagcctacatgaataccaatcacgaggatttcatcggattcgccaacgcccagcagcgcagcaatcagatgaataagaagaagactagcgggaatcaggacgaaattttggtgatccgcaaaggctggctaacaatcaataatatcggtatcatgaaaggtggtagtaaggagtactggtttgtgctgacagcggaaaacttatcctggtacaaggacgacgaggaaaaagaaaaaaaatatatgcttagtgtggacaatctcaagctacgtgacgtggagaagggttttatgtcatctaagcacatttttgcactcttcaacacagaacagcggaatgtgtataaggactatagacagctggagttagcgtgtgagacacaggaagaagtcgattcctggaaagctagcttcctccgggcgggggtctaccctgagcgtgtgggcgacaaagagaaagcctctgagactgaagaaaatggaagcgattcattcatgcactccatggacccacagctggagcggcaggtcgaaaccatcaggaatctggtggactcctatatggccatagtcaataaaacagtaagggacctgatgcctaagacgatcatgcatctgatgattaacaacacaaaggaatttatcttctccgagctcctggccaatctctactcttgcggggaccagaacacactcatggaggagtcagcggagcaggctcaacgtcgtgatgaaatgttgcgtatgtatcatgcccttaaagaggccctgtcaatcattggtgatatcaacaccactaccgtgtcaacaccaatgcccccccccgttgatgacagctggctccaagtgcagagcgttcctgccggaagaagatctcctacctcatcacccacaccacagcggagggcccctgctgtaccgccggccaggcccgggtcaaggggtcccgcaccgggccctcccccagccggtagcgcacttggcggcgcgcctcccgtccccagtcgccctggggcaagcccagatccttttggcccccccccccaggtaccctcacggcccaatcgagcccctccaggcgtgccaagtaggtctggccaggcctcaccctcaagaccggagtccccccgtcccccgtttgatctgtag

SEQ ID NO: 186002 - DNA, 1191 bp, synthetic construct
  misc_feature 1..1191: note = Description of Artificial Sequence: Synthetic coding sequence
  source 1..1191: mol_type = other DNA
atggagcggatcgtgaccacccacatccgggagcgggagggccggacaaaagagcaggttatgctccttatcgacatagaattggcgtacatgaacacgaaccacgaggatttcatagggtttgctaatgcgcagcagaggagtaaccagatgaataaaaaaaaaacctctggcaatcaggatgaaattctggtaattaggaagggctggctgacaatcaataatatcggcattatgaagggcggatctaaagagtactggtttgtgctgaccgcggagaacctgtcttggtataaggacgacgaggaaaaggagaagaaatatatgctgtcggtcgacaacctaaaacttagggatgtggaaaagggctttatgtcttcgaagcacatctttgctctgttcaacacagagcagcggaatgtgtacaaagattaccgacagttggaacttgcttgcgaaacccaagaggaggtagattcctggaaggcttcattcctgcgcgcaggggtttaccctgagcgagtgggtgacaaggagaaggcgtcagagaccgaggagaatgggtctgactcattcatgcactctatggatccccagctagagcgccaggtggagaccatccggaatctggtggattcctacatggcaatcgtcaataagaccgtgcgagatctgatgcccaagaccatcatgcatttgatgatcaacaacaccaaggagttcatcttctcagagctgctggcaaacctgtatagctgtggtgatcaaaacaccctcatggaggagtcggccgaacaggcacagcgcagggatgaaatgctccgcatgtaccacgcactgaaggaggctttatcaattatcggagacattaacaccacgacagtttccaccccaatgcctccccctgtcgacgatagctggctacaggtccagtcagtccccgccggccggcggtctcctacctcaagcccgacccctcaaaggcgagctccagccgtgccacccgcccgcccaggtagcagggggccagcccccggccccccccctgctggcagcgccctggggggggcccccccggtgccctcccgtccgggcgcctctccggatcctttcggaccaccaccccaggtgcctagtcgcccaaatagggctccaccgggggtccctcgcatcactatatctgatccctag

SEQ ID NO: 186003 - DNA, 1728 bp, synthetic construct
  misc_feature 1..1728: note = Description of Artificial Sequence: Synthetic coding sequence
  source 1..1728: mol_type = other DNA
atggaggccctgatccccgtgatcaacaagctgcaggacgtgttcaacaccgtgggagccgatataatccagctgcctcagatcgtggttgtcggcacccagtccagcgggaagtccagtgtactcgagagcctggttggccgggacttattgccgcgcggcactggcattgtcacacgacgcccactgatcctccagttggtccacgtgagccaggaggataaacgcaaaacaacaggagaggaaaatggtgtcgaggccgaagaatggggcaaatttctgcatactaaaaacaagctttacaccgactttgatgagatacggcaggaaattgaaaatgagaccgaacgcatttcaggaaacaataagggggtgtcccccgaacccatccaccttaagatcttctcaccaaatgtggtaaacctcacgctcgtcgacctaccaggaatgactaaagtgcctgtgggtgatcagcccaaggacatagagctacagatacgggaattgattttacggttcatcagtaatcctaactctataatacttgccgtaaccgccgccaacaccgatatggccacctctgaggctctgaagattagtcgggaggtcgaccccgacggccgacgcaccctggcagtgattactaagttagatctcatggatgcagggaccgacgccatggacgtactgatgggccgcgtgatccccgtgaaactgggaattatcggcgtggtcaacagatctcaactggacatcaataacaagaaaagcgttacggattccattagagacgagtacgccttcctccagaaaaagtaccccagcctggccaaccggaacggaactaaatacctggcccgaaccctgaacaggttgttgatgcaccatatacgcgactgcctaccagagttaaaaacccggatcaacgttttggcagcacaataccagtctttgctgaattcctatggggagcccgtcgatgataaaagtgccacccttctgcaactcattacaaaattcgcaaccgaatattgtaatactatcgaaggtactgctaagtatatagagacatctgaactgtgtggaggcgcgagaatttgctacattttccacgagacatttggccggaccctggaatccgttgacccactggggggccttaacacaatcgacattttaactgctattagaaatgccactggcccacgccccgccttatttgtgccagaggttagttttgaattgcttgttaagagacagataaaacggctggaagaaccttcactcagatgcgtagagctggtccacgaggaaatgcagcggattatccagcattgtagtaattatagcacacaggagcttctgaggtttccaaagcttcacgatgccatagtcgaggtagttacttgcctgctccgtaaacgtctcccagtcaccaacgaaatggtccataacctcgttgccattgagctggcttatattaataccaagcacccagatttcgccgacgcatgtggactgatgaataacaatatcgaagaacagcggcgtaataggctggctagagaactaccaagtgcagtctccagagataaagtagcctctggtgggggcggggttggcgatggcgtacaggagcctacaaccggaaactggcggggaatgctgaagaccagcaaagccgaggaactcctggccgagaagaaaaagaagaaaaaaaaaaaatag

SEQ ID NO: 186004 - DNA, 2100 bp, synthetic construct
  misc_feature 1..2100: note = Description of Artificial Sequence: Synthetic coding sequence
  source 1..2100: mol_type = other DNA
atggaggccctgatccccgtgatcaacaagctgcaggacgtgttcaatacagtgggtgcagatattattcaactcccacagattgtggtggttgggactcagagctccggaaaatcctctgtgctggagtcactagtggggagggacttgttgccacgtggcacaggtatcgtgactaggcgacctttgattttacagctggtccacgtgagtcaggaggataaacgcaaaacgacaggagaggaaaacggtgtggaggccgaggagtggggcaagtttctccatacgaagaacaagctttacaccgattttgacgaaatacgacaggagattgaaaatgagactgaaaggatctccggaaataataagggggtgtcccccgaacctatccacttgaaaatcttctccccaaacgtggtgaatttaacattggtggatctgccgggaatgaccaaagtgcccgttggagaccaacccaaggacatcgaactgcaaattcgcgaactgatcttgcggtttatcagcaatcccaattctataatcctcgccgtcactgccgccaacacagacatggccacatctgaggcacttaagatcagcagggaggtcgaccccgatggacgccgaaccctggcggtaattacaaaattggatctcatggacgcgggcactgacgccatggacgtgctcatgggccgagtgattcccgttaaactaggcatcattggcgttgttaacagatctcagctcgatattaataataaaaagagcgttactgactccatccgagacgagtacgccttcctccagaagaaatacccaagtctggccaatcgcaacggaacaaagtatctcgcccgtacccttaacagactgcttatgcaccacatcagagactgtctcccagagcttaaaactcgcatcaacgtgctggctgctcagtaccaatctctgttgaactcctacggcgagcccgtggatgataaatcggccactctcctgcagttgattacaaagtttgccactgagtactgcaacaccatcgaaggaaccgctaagtatatagaaactagtgaactctgcggcggagccaggatctgttatatattccacgaaaccttcggcaggaccctggagagtgttgatcctctgggaggactaaataccattgacatcctcactgcaatcagaaacgcgacgggcccccggcccgccctgttcgtcccagaggttagctttgaactgctggtgaaaaggcagatcaagcgcctagaggaaccctccctgaggtgcgttgagttggtccacgaagagatgcagagaataatccagcattgctcaaattacagtacacaggagcttctgcgcttccctaagcttcacgatgctattgtggaggttgttacctgcttactacgaaaaaggctgcctgttaccaatgaaatggtccacaacctcgtggccatagagcttgcctatatcaacaccaagcatccggacttcgccgacgcatgcggcttaatgaacaataatatcgaagaacagagaaggaatagacttgctcgagagctcccgtctgcagtgtcccgagataaagtagcctcaggtggcgggggagtgggggacggcgtccaagagccaaccaccggcaactggcgcggcatgcttaagacaagcaaggctgaggaattgctagccgaggagaagagcaaacctattccaatcatgcccgcttcaccacagaaaggccacgcggtcaatcttttggacgtacccgtgcccgtggcccggaaactgagcgcccgggagcagcgcgattgcgaggtgatcgagcgcctgataaaatcctatttcttgatcgtgcgcaagaatatacaggactccgtgcctaaagccgttatgcactttctcgttaaccacgttaaagacactctgcaaagcgagctggtagggcagttatacaagtcatcgctgctggatgacctcttgaccgagtccgaggatatggctcagcggcggaaggaagccgccgacatgctgaaagccttacaaggcgcttctcaaatcatcgctgagattcgcgaaacgcacctctggtag

SEQ ID NO: 186005 - DNA, 2376 bp, synthetic construct
  misc_feature 1..2376: note = Description of Artificial Sequence: Synthetic coding sequence
  source 1..2376: mol_type = other DNA
atggcctgccgggagggcgccggcagccggcgggcccggagcaacggctgccggcttcctcgcagagggcgtagacggggcggcagaagaaggaccgtcgggcctggacccatccattgtcgggggcggcgggctctgggcccaagggtgttccgggtcatggaggcactgatacccgtgatcaataagcttcaggacgtgtttaatacagtcggggccgacattattcaactgccccagatagttgtggttggaacccagtcatctgggaagtcttctgtcttggaaagcttagtagggcgggatctcctgccgcggggaacaggcattgtgactcgtcgtcccctgatactgcagctggtgcacgtaagccaggaagacaagaggaagaccaccggcgaggagaatgatccagcaacgtggaaaaacagtcggcacctcagcaaaggcgtggaggcagaggagtggggcaaatttctccacacaaaaaacaagctctataccgactttgacgagataagacaggagatcgagaacgagaccgagagaataagtggaaacaacaaaggggtgagtccagaacctatccatcttaagatcttcagccccaacgtggtcaacctgactctggtcgacctgccaggaatgaccaaggtgcccgtgggtgaccagcccaaagatatagaattgcagattcgggaacttattcttagattcatctcaaacccaaatagcataatactggcggtgacagcggccaacacagatatggctacaagtgaggcccttaagatcagcagggaggtggatcccgacggtcgaagaaccttggcagttatcacaaaactggatctgatggatgcaggcaccgacgcaatggatgtgctgatgggccgggtcattccagtgaagctggggattataggagtggttaaccggtcacagcttgatatcaataacaaaaaatctgtcaccgacagcattagggacgagtacgcatttcttcaaaaaaaatatccctcgcttgccaacagaaatggaaccaaatatctggctcgcaccctgaatagacttctgatgcatcatatacgcgactgtttgccagaactaaagaccaggatcaacgtcttagctgcacagtaccagagcttactcaacagttatggcgaacccgtggacgataagtccgccaccctgctgcaattgatcacaaaattcgcaactgaatattgtaacacgattgaaggcacggccaagtacattgagaccagcgaattgtgtggtggagccagaatatgctacattttccatgagacattcggcaggaccctggaatcagtggatccacttggaggactgaacactatcgatatcctgacggctatccgcaacgccacagggccccgccccgcactgttcgtgcctgaagtctctttcgagctcctcgtaaagcgccaaattaaacggttggaagaacctagcttgcgatgtgtggagctggtacacgaggaaatgcaaaggatcattcagcactgttccaattatagcactcaggagctgttgcgctttcctaagttgcacgacgcaattgtcgaggtggtaacgtgtctgttgagaaagcgattgcctgtcacaaacgaaatggtccacaatctcgtggcgatcgagctcgcatatattaacactaaacatcccgactttgcggatgcctgtggactgatgaataataacatagaagaacagcggaggaaccgcctcgcccgcgagcttccctccgccgtctccagggataaaagctccaaagtgcccagtgccctggcacctgcaagtcaggagcctagtcctgctgcgtcggcggaggcagacggtaaagtggcctcgggaggaggaggtgtgggtgacggtgtacaggagcccaccactggcaactggcgtgggatgctcaaaactagcaaagcagaggagctgcttgccgaagagaaaagcaaacctattcctataatgccagcgtctccccagaaggggcatgccgtgaacctgctggatgtacctgtgcccgtagcccgcaagctgtctgcccgtgagcagcgagactgtgaagtgattgagcggttaatcaagtcttatttcctgattgtacggaaaaatatacaggacagtgtcccaaaagccgtcatgcatttcctcgttaaccatgttaaagatactctgcagtctgaactggtcggccaactgtacaaatctagtctgttggatgacctgttgactgagagtgaagacatggctcaaagacgaaaggaagcagctgacatgctgaaggctttgcagggcgcctcgcagatcattgctgaaatacgggaaacgcatctgtggtag

SEQ ID NO: 186006 - DNA, 1602 bp, synthetic construct
  misc_feature 1..1602: note = Description of Artificial Sequence: Synthetic coding sequence
  source 1..1602: mol_type = other DNA
atgttccacaagaagatcaacggcaagcagcaggagaagaagatgacattactgcacgggaagactcaggatacattcctcaaaggatggaagcagaagaatggggttaacttcttcacaccgaaaatccggtcccaattggatatcaacaacaagaagagcgtgactgactctatccgagatgagtatgcatttctccagaagaagtaccctagccttgccaatcggaatggaaccaaatatttagcgagaactctgaatcgcttgctgatgcatcacatccgtgattgtctgccggaactgaaaacacggattaatgttttggcggcacagtaccagtctctcctgaactcctacggcgagccagttgacgataaatctgccactctgctacagctgataaccaagtttgcaacagagtattgtaacacaattgaaggaaccgccaagtatattgagactagcgaattatgcggaggagctcggatatgctatatctttcatgaaacctttgggcgcaccctggagagcgtggaccctctcgggggcctgaatacaatcgacatcctcaccgctattagaaatgccacagggcctcggccagccctctttgtgcccgaagttagctttgagctcttggtcaaacgtcagataaaacgtctggaagaaccatccctccggtgcgtggaactcgtgcacgaagagatgcagcgaatcatccagcactgcagtaattattcaacccaggaattactgagatttcccaagctgcatgatgccatagtggaggtagttacgtgccttttgcgaaagaggctgcctgtgacaaacgaaatggtgcacaatctggtcgccattgaactggcttacatcaatactaagcatcccgactttgcggacgcatgcggcttaatgaataataatatcgaggaacagcgtcggaacaggctggctcgcgaactgccctcagctgtttcccgggacaagtcttcgaaagtgcccagcgctcttgctccagcgtctcaggagcctagcccagcagcttcagccgaggctgacggtaagcttattcaagatagccgtcgggaaaccaaaaatgtagctagcggcggaggaggtgtgggagacggtgttcaagaacctacgacagggaactggcgaggcatgctgaaaacatctaaagccgaggagctactggccgaagaaaaatcaaaacccatccccatcatgcccgcgtcacctcaaaagggccacgccgtgaacctgcttgatgtgcctgtcccagtggcacgaaaactgtccgccagggaacagcgggattgcgaggtgatcgaacgtctgataaagtcctattttttgatcgtgagaaagaacatccaagattccgtgcccaaggccgttatgcattttctcgtaaaccatgtgaaggatactttgcagagtgaactcgtgggacagctatacaagtcatcactcctggatgacctcctgaccgaaagtgaggacatggcacagcgccgcaaagaagcagctgatatgcttaaggctctacagggagcttctcaaatcattgcagagattcgggagactcatctctggtag

SEQ ID NO: 186007 - DNA, 2133 bp, synthetic construct
  misc_feature 1..2133: note = Description of Artificial Sequence: Synthetic coding sequence
  source 1..2133: mol_type = other DNA
atggaggccctgatccccgtgatcaacaagctgcaggacgtgttcaacaccgtcggcgccgacatcatccaattacctcaaatcgtggtagttggcacccagtcctcagggaagtcctcagtcctggagagcctagtcggccgtgacttgctgccccgcgggactggcatcgtcacacggcgtccactgatcttgcaacttgttcatgtgtctcaggaggacaagaggaagacaacaggagaagaaaatggagtggaagccgaggaatgggggaagtttctgcacacaaagaataaactctacaccgatttcgacgagattcgtcaggagatagagaacgaaaccgagagaatatctggtaataataaaggcgtgtcgcccgagcctattcacctgaaaatcttttcgcctaatgttgtgaacctgactcttgtggacctgccaggcatgaccaaagtgcccgtgggggatcagccaaaggatatcgaattgcagattagagaattaatcctccgcttcatttctaatcccaactccatcatcctcgccgtcactgctgccaataccgacatggccacctcagaggccctaaagattagtagagaggtggaccctgacggacggcgtaccctcgctgtgatcactaagcttgaccttatggacgctggcaccgatgctatggacgtgctgatgggtcgtgtgatacctgtgaagctgggcatcattggggtggtcaacagatctcaactcgatatcaataataaaaaatcagttaccgactctataagggatgagtatgctttccttcagaaaaagtatccctccttggcaaatagaaatggcacgaagtatcttgccagaacgctaaaccggctccttatgcaccatatacgcgattgccttcccgagttgaagacacgtataaacgtgttggcggctcagtaccaaagcctattgaactcatacggtgagcctgtggatgataaaagtgctactctcctgcagctcattacaaagttcgccacagagtattgtaacaccatcgaaggcactgctaagtatatcgaaacgtccgagctgtgtggaggagctcgcatatgctatattttccacgaaaccttcggccgaactttggaaagtgtcgaccccctgggcggactaaatactattgatattcttaccgctattcggaacgcaaccgggccaaggcctgcattgtttgtgccggaagtctccttcgaactgctggtgaaacggcaaatcaaacggttagaagaaccatctctacggtgtgtggaacttgttcatgaggaaatgcagcggatcattcagcactgtagtaactacagtacacaggaactcctgagattcccgaaactccatgatgccatcgtcgaggtggtcacctgtctgctgagaaaaagactcccggtcactaacgaaatggtccacaacctggtggcgattgagctcgcgtacattaatactaaacacccagactttgccgacgcatgcgggctcatgaataacaacattgaagagcagcgccgcaatcgcttagccagggagctgccatccgcagtatcacgggacaagcttatccaggactctcgcagagagacgaagaatgtagcctccgggggaggaggtgtaggagacggagtacaggagccaaccaccgggaattggaggggaatgttaaagacttctaaggccgaggaactgctggcagaggaaaaaagcaaacccataccaattatgcctgccagtcctcagaaggggcacgcagtaaacctgcttgatgtaccagtccctgtcgcccgaaaattaagcgcccgtgagcagagagactgtgaagtgattgaacgactgataaaatcctacttcttgatagtgagaaagaacatccaagactctgttcctaaggccgttatgcatttcctggtcaaccacgtgaaggacactctccagagcgagctggtgggacagttgtataagagttcccttttggacgaccttttgacggaaagcgaggacatggcccagagacgcaaggaggctgcagacatgttaaaggccctgcagggggctagccagattatcgctgagataagagagacccacctgtggtag

SEQ ID NO: 186008 - DNA, 2178 bp, synthetic construct
  misc_feature 1..2178: note = Description of Artificial Sequence: Synthetic coding sequence
  source 1..2178: mol_type = other DNA
atggaggccctgatccccgtgatcaacaagctgcaggacgtgttcaacacagtgggagcagatattatccagcttcctcagatagtggtggtgggtacccaatcgagcgggaaatcctccgtcttggaaagcctcgttggccgggatctcctccctcgagggacaggaatcgtgacccgcaggcccctgatcctccagcttgtgcatgtaagtcaggaggacaagcgcaaaacaaccggcgaggagaacggcgtggaagctgaggaatggggcaagttcctacacaccaagaacaagctttacactgactttgatgaaataaggcaggaaattgagaacgagacagaacggatctctggcaataataagggcgtgtcaccagagccaatacacttaaaaatctttagtccaaacgttgtgaatcttactctagtggatctgccggggatgacaaaagtgcccgtcggcgatcagcctaaggatatcgaactccaaatcagggagctcattctgaggtttatttccaaccctaacagtatcatcctggcagtgacagcagccaatacagacatggcaacctctgaagccctgaaaattagcagagaggtggaccccgatgggcgccgtacgctggctgtaattacaaagctagatttgatggacgccggtacagatgcaatggatgtccttatgggcagggtgatccccgtaaaactgggtatcataggcgtggtgaaccgatcccagctcgatattaacaataaaaagagcgtaactgattcaatccgcgacgagtacgccttcctccagaagaaatatccaagtctcgctaaccgcaacggcaccaaatacctggcaaggactctgaaccggttactgatgcatcatatcagggattgcctgcccgagttgaagactcggatcaatgtactggccgctcaatatcagtcactgctcaatagctatggggaacctgttgacgataagtccgccactctcctgcagctgataactaaattcgccaccgaatattgtaatacaatagagggaacagccaaatatatcgaaacatccgaactgtgtggcggcgcgagaatatgttatatttttcacgagaccttcgggcgcaccctggagagcgttgatcccctgggcggcctgaacactatcgacatcctcacagctatccggaacgccactggtcccaggcctgcgttatttgtgccagaggtctcttttgaactgctggttaaacggcagatcaaaaggcttgaggaacccagcttgcggtgtgtcgagctggttcacgaggagatgcagagaattatccagcattgttctaactattctacacaggagttgctgaggtttcccaagttgcacgacgctattgttgaggtggtaacctgtctgctgagaaagcgtctacctgttactaacgagatggtccacaaccttgtggctatcgaattagcctatattaacactaaacatccagatttcgccgatgcctgtggactcatgaacaataacatcgaagaacaaaggcgcaaccggctggccagggaactgcccagcgcagttagtagggataaatcctctaaagtcccaagtgctctagctcccgcctcccaggaaccttctcccgccgccagcgcagaggccgatgggaaggtggcatccggcggtggtggagttggagatggagtgcaagagcccacaacaggtaattggaggggcatgttgaagacctctaaagccgaggagctgctggctgaagagaaaagcaagcctatccctattatgcccgccagccctcagaaggggcatgcggtcaacttgttagatgtaccggtccctgtcgcccggaaactttccgcccgagagcagcgagactgcgaggttatcgagcgcctcattaaatcttattttctcatagttagaaagaatatacaggattcagttcctaaggcagtgatgcacttccttgtgaatcacgtgaaagacaccctccagtccgaactcgtaggtcaactgtataaatcatccttactagacgatttactgacggagtcagaggatatggcacagagacgaaaggaggccgcagatatgctgaaggcactacagggggccagccagattatcgcagagatccgcgagacccatctctggtag

SEQ ID NO: 186009 - DNA, 2211 bp, synthetic construct
  misc_feature 1..2211: note = Description of Artificial Sequence: Synthetic coding sequence
  source 1..2211: mol_type = other DNA
atggaggccctgatccccgtgatcaacaagctgcaggacgtgttcaataccgtgggcgctgatattatccagcttccacagattgtagtcgtcggcactcagtcttcgggcaaaagctcagtgctagagagtctcgtcggccgcgacctgttgccacgcggaaccggcattgtgacgagaagacccttaatcctgcaactagtgcacgtatcccaggaggataagcggaaaacaaccggtgaggagaatggggtggaagctgaggagtgggggaagtttctccacaccaagaacaaactgtatacggattttgacgagattagacaggagatagaaaatgaaacggaaaggatcagtggcaacaataagggcgtgtcgcccgagcccatccacctcaagattttttccccaaacgtggtgaacctgacacttgtcgatctcccagggatgaccaaagtaccagtgggcgaccagcccaaagatatagaattgcagatcagagagctcatcttgaggttcatctccaaccccaattcaatcattctcgctgtcacggccgccaataccgacatggcgacttccgaagctctgaagatatctcgcgaggtggaccccgatggacgacggaccctggcggtcatcaccaagctggatcttatggacgccggcactgacgctatggacgtactgatggggagggtgatccctgttaagctcggcatcattggcgtggtgaaccggagccagctggatattaacaataaaaagtcagtcacagattcaattagagacgaatatgcgttcctgcagaaaaaataccccagtctcgctaatcgcaatgggactaagtatctcgctcgtacacttaatcgcctcctcatgcatcacatcagggactgcttacctgagctcaaaactcggatcaatgtcttggcagctcagtatcagtcactgctcaatagttacggtgaaccagtcgatgacaagtctgcaaccctactgcagctaatcacaaaattcgcgacggaatattgcaacacgattgagggtaccgccaagtatattgaaacatccgagctgtgtgggggagctcgcatttgctacattttccacgaaacattcggtagaacactcgaatctgtagacccacttgggggactgaataccattgatatactgaccgccatccggaacgcaacaggtccgcggccggctctgtttgtgcccgaggtgagcttcgagctgttagtgaagaggcagataaaacggctggaggaacctagcttacggtgtgtcgagctggtccatgaggaaatgcagagaatcattcagcattgttccaactattccacccaggagctgcttcgatttccaaagctgcacgatgctattgtggaggtggtgacctgcttattgcgcaagaggcttcccgtcactaacgagatggtgcataatctggttgctattgagctggcttacatcaacacaaagcaccctgatttcgcggacgcctgtgggctcatgaataacaacattgaagagcaacgtagaaatcgccttgctcgggagctcccatccgccgtctcccgagacaagtcatcgaaagtaccatctgcactggcacccgctagccaggaaccctctcccgctgcttcggctgaggccgatggaaagttgattcaggattcccgccgagagaccaaaaatgtggcaagcggaggggggggtgtgggtgacggagtacaggaaccaacaacaggcaactggcgcggtatgctgaaaacaagcaaggccgaagagctgctggccgaagagaaaagcaagcccataccgatcatgcccgcgtcccctcaaaaagggcatgcggtgaacttactggacgtcccagtaccggtggccagaaagctctctgcacgcgaacagcgcgactgtgaggttatcgagcgcttgattaagtcttactttctgattgtgcgcaagaacattcaggattccgtacccaaagccgtaatgcacttcttggttaaccacgtgaaagatactctgcaaagcgagctcgtcggccaactctacaagtcatctctactggacgacctgctgaccgaatctgaggatatggcccaacggcgtaaggaagccgcagatatgctgaaggcactgcagggggcgtctcagattatagccgagatcagagaaacacatctttggtag

SEQ ID NO: 186010 - DNA, 2250 bp, synthetic construct
  misc_feature 1..2250: note = Description of Artificial Sequence: Synthetic coding sequence
  source 1..2250: mol_type = other DNA
atggaggccctgatccccgtgatcaacaagctgcaggacgtgttcaacacagtgggggcagacattattcagttgccccagatcgtggtggtggggactcagagcagtggaaagtcctcagtgctggaatctcttgtgggtcgcgatttgctgccacgcggcactggaatcgtgactcgcagacccctgatactgcagctggtccacgtgagccaagaggacaagcggaaaactacgggcgaggagaacgaccctgcgacctggaagaatagccgtcatctcagcaagggggtcgaagccgaggagtggggaaagtttctgcacactaaaaacaaactgtacactgactttgacgagattaggcaagagattgagaacgaaacagaacgaatttcaggaaacaacaaaggcgtctcgccggaacccatccacttgaagatcttttctcctaacgtggttaatctgacactggtggacctgccaggcatgaccaaagtgcccgtgggcgatcagcccaaagacattgaactgcaaattcgggagctcattctgaggttcatttctaaccccaatagcattatcctcgccgtgaccgcagctaacaccgacatggcaactagcgaagctctgaaaatctcccgcgaggtggaccctgacgggcggagaacgctggccgtgataactaaactcgacctgatggacgccgggactgacgctatggatgtgcttatgggccgagtgatcccagtgaaactgggtattataggagttgtgaatagaagccaattggacatcaataacaaaaagagcgtaacggactcaattcgcgatgaatacgctttcttgcagaagaaatatcccagcctggccaaccggaatggcacaaaatatctggcccgcactcttaatcgcctccttatgcatcacatccgtgactgccttcctgaattaaaaacgcgcattaacgttcttgctgctcaataccagtctctcttaaactcttatggtgagccggtggatgataaaagcgccacacttctccaactgattactaaattcgcgaccgaatattgcaacacaattgaggggacagccaagtacatagagacgtccgaactctgtgggggtgccagaatttgttatatctttcatgaaacatttggtagaactctagagagcgtcgatccgctcggcggcttgaacaccattgatattttgacggcgattcggaatgctaccgggcctcggccagcactgtttgttccagaagttagtttcgaactgctggtcaagcgacaaattaaacggctcgaggaacccagcctgagatgtgttgagctggtgcacgaggagatgcagaggattattcagcattgcagcaactattctactcaagagctccttcgcttccccaagctccatgatgccatcgtagaggtggtcacttgtctgctccgaaagcgcttgccagtcactaacgagatggttcacaatttggttgctatcgaactcgcatacatcaacactaagcacccggacttcgctgacgcctgtggccttatgaacaacaacatcgaagaacagcgccgtaatcggctcgccagagaattgcctagcgctgtttccagggataagagtagtaaagtgccctcagccttagcccccgcttcacaagagccttctccggcagctagcgccgaagccgacggcaaattaatccaggactcacgacgagagacaaagaacgtggcctctggggggggcggagtaggtgacggtgtccaggaacctacaacggggaattggagagggatgctcaaaacatcaaaggccgaggagctgctcgccgaagaaaagagtaagcccatcccgatcatgccagcatctcctcaaaaggggcatgccgtcaatctgttggatgtcccagtgcccgtcgcaagaaagctctctgccagggaacagagggactgtgaggtcattgaacgcttgattaagtcctactttttgatcgtccggaagaacatccaggatagtgtgcccaaggcggtcatgcactttctcgtgaaccacgttaaggatactttgcagtccgagctggtgggtcagctctacaaaagttctctgcttgatgatctgctcaccgagtctgaggacatggctcaaaggcggaaagaagccgctgatatgctgaaggccctgcagggcgctagtcagatcatcgccgagatccgagagactcacttatggtag

SEQ ID NO: 186011 - DNA, 2613 bp, synthetic construct
  misc_feature 1..2613: note = Description of Artificial Sequence: Synthetic coding sequence
  source 1..2613: mol_type = other DNA
atgggcaaccggggcatggaggagctgatccccctggtgaacaagttacaggacgccttttcctccatcgggcagagctgtcatttggacctcccccagatcgccgttgtgggaggacagagcgccggcaagtcttccgtcctggagaattttgttggaagagacttcctcccgcgggggagcggcatcgtgaccaggcgccctctcatacttcagcttatttttagcaagacagaacacgccgagtttttgcactgtaaaagcaaaaagttcactgactttgacgaagttagacaggagatcgaggccgagaccgatcgcgttaccgggacaaataagggtatttcacctgtacccatcaatctgcgcgtgtactcacctcacgtactgaacctgactctcatcgatcttcctggaataacgaaagttccagttggcgaccaaccacccgacattgaataccagattaaggacatgattttgcagttcattagtcgcgagtcatcactgatattggccgttacccctgcaaatatggatctggctaacagcgacgcactgaaactggccaaagaggtcgatccacagggccttaggactattggagtgattactaaactggatctcatggatgaaggcacagacgcacgggatgtacttgaaaacaaattactgcccctgaggcggggatatatcggcgtggtgaaccgctcccagaaagacatcgaaggaaagaaggacatccgcgcagcactggcagccgaacgcaaatttttcctcagtcaccccgcttaccgacatatggccgatagaatgggtacacctcacctgcagaagacgctgaaccaacaactgaccaatcacatccgagagagcttaccggccttaaggtctaaactgcaatcgcaactacttagcttggaaaaggaagtagaagagtataagaatttcaggccagacgaccctacccgcaaaacaaaggcgcttctgcaaatggtgcagcaatttggcgtcgatttcgaaaaaagaatagaaggctctggcgatcaggtagatactctggagttgtccggtggcgcccgaatcaaccggatattccacgagcgtttcccatttgaactggtgaaaatggagttcgacgaaaaggatttgcgacgcgagatttcttacgccattaaaaatatacacggggttaggacaggactgttcacccccgacatggcctttgaggccatagtgaagaagcaaatcgtcaaactgaaggaaccatccctgaaatgcgtcgaccttgtcgtgtctgagctggccaccgtgatcaagaaatgtgcagaaaagctaagttcttacccgcgactcagggaggagaccgaacgaatagtgactacatacatcagggagcgagagggtagaacgaaggaccagattctgctgctcattgacatcgagcagtcttatataaataccaatcatgaggacttcatcggctttgctaacgctcagcagaggagtacacaactgaacaaaaagcgtgctatcccaaaccaaccagagacattggtcatccgtcgcgggtggctgaccattaacaatatctcgttaatgaagggtgggagtaaggaatactggttcgtactaacagcagaatctctgtcttggtacaaagatgaagaggaaaaggaaaaaaaatatatgctgccacttgataacctcaagatacgcgatgtggagaagggatttatgagcaataagcacgtgtttgcaatctttaacacagagcaaagaaacgtatataaggatctgaggcagatcgagcttgcatgcgacagccaggaagatgtggattcttggaaggcctcctttctcagagccggcgtgtacccagagaaggatcaggctgaaaacgaagatggtgcccaggaaaataccttttccatggatcctcagcttgagcgccaagttgagactatcaggaacctggttgattcttacgtggcgatcatcaacaagagcatccgcgacctgatgccgaagaccattatgcacctgatgattaacaatactaaggcatttatccatcacgagcttcttgcttacttgtattcttctgcagaccagtcctcacttatggaggaaagtgccgaccaagcccagcgccgggatgatatgctgcgtatgtatcacgcactaaaggaagccctcaacataatcggagacataagcacctctacagtcagcacacctgtccccccaccagtcgatgatacctggctgcagtccgcatcctcccacagccccacacctcaacgccggccagttagtagtatccacccccctggaagacctccagccgtccgtggacccactccagggcctccgctgattccagtgcccgtgggggctgctgcctcttttagtgccccccctatacccagtcgccccggaccacagagcgtttttgccaatagtgatcttttcccagctcctccgcagattccctctcgcccagtgcggataccaccaggaatacctccaggcgtcccctcaagacgcccaccagctgccccctctcggcctacaattatccgccccgcagaaccatccctacttgattag

SEQ ID NO: 186012 - DNA, 2601 bp, synthetic construct
  misc_feature 1..2601: note = Description of Artificial Sequence: Synthetic coding sequence
  source 1..2601: mol_type = other DNA
atgggcaaccggggcatggaggagctgatccccctggtgaacaagctgcaggacgccttctcctcaatcggacagtcctgccacttggatctgcctcagatcgcggtagtgggcggacagagtgctggaaagagttccgtgctggaaaattttgtcggccgtgacttcttgccaagaggcagcgggatagttacccggaggccactcatcctgcagctgatctttagcaaaaccgagcatgctgagtttctgcattgtaaaagtaagaaatttacagacttcgatgaggtgaggcaggagatcgaggcagaaacagacagagtgactgggaccaataaaggcatctctcctgtgcccattaacctccgtgtgtacagtccacacgtgctcaacttgacactaattgatctgccaggcatcaccaaagtgcccgtcggcgatcaaccaccagatattgagtatcaaatcaaagacatgatcttacagtttataagccgcgagtctagcctgattcttgcagtgactcccgcaaacatggatttagctaactctgatgctctgaagctggcaaaggaggtggatccacagggattgcgaacaataggcgtcattacaaagctggatctcatggatgaggggacagatgcacgggacgtattggagaacaaactgctgcccctccgtagggggtacattggagtggtcaacaggagtcaaaaagacattgaagggaagaaagatattcgagccgctctggctgccgaaagaaaattttttctgagccacccggcgtacagacatatggccgaccgtatgggtacacctcaccttcagaagaccctgaaccagcagctaacgaatcacatcagggagtccctgcccgcactgaggagtaaactgcagtcgcagcttctgtcgctggaaaaggaggtcgaggaatataagaatttcaggcctgatgaccctacaaggaaaaccaaggccctgctgcagatggtccagcagtttggggtggattttgaaaagagaatcgagggttctggcgaccaggttgacacgctggaactcagcggcggtgctcggattaatcgcatttttcacgaaaggttcccgttcgaactggtgaaaatggagttcgatgagaaagatctgcgacgggaaatttcctacgccatcaagaacatccacggcgtgaggactgggttgttcacccccgatttagcatttgaagccattgtaaagaaacaggtagtgaagctcaaggagccatgtctgaagtgcgttgacctggtgattcaagagctaatcaacaccgtccggcaatgcacttctaagctgagcagttatcctagactaagagaagagacagagcggatagtcacaacttacatccgcgaaagagaggggagaactaaagaccagatcctcctgctcatcgatattgaacagtcctacattaacaccaatcatgaggacttcattgggttcgcaaatgcccagcagcgttcgacccaactgaacaaaaaacgcgccatccccaaccaagtaattagaagaggatggctaaccattaataatatttcgctgatgaagggggggagcaaagaatattggtttgtgctgacagctgagtcactgagttggtacaaagacgaggaggaaaaagaaaagaaatacatgctccctctggataatctgaaaatcagagacgttgaaaaaggctttatgagcaacaagcatgtctttgcaatctttaatacagaacagcggaacgtctataaagatctcaggcagatagaactagcatgtgactcccaagaggatgtggacagttggaaggcctcctttctcagagcaggcgtgtaccctgagaaagaccaggccgagaatgaagacggcgctcaggagaatacattcagcatggatccccagctcgagaggcaggtcgaaacaattcgcaaccttgtggattcctacgtggctatcatcaataagtctatccgggatctaatgcccaaaacaatcatgcacctgatgattaataatacaaaagcctttatacaccatgagctgctggcctacttgtactccagcgcggatcagtccagtctgatggaagagagtgccgaccaagcccagcggcgagacgatatgttacgaatgtatcacgctcttaaggaagcgttaaacattatcggggacatctctacgtctaccgtgtcaaccccggtacccccccccgtggacgatacttggctccagagcgcttccagccacagtccaacaccgcaacgtagacctgtatcttccatccaccccccggggcgtcctcccgctgtgcgcggcccaacaccgggaccgccccttattccggtcccagtgggagctgcagcttcattctccgcgcctcccatccctagccgtcccggacctcagagtgtattcgcgaatagtgacctgttccccgccccgcctcagatcccttcccgccccgtcaggatcccccccggtatcccccccggggtgcccagtcggcgaccacccgccgctcctagccgaccaaccattattcggccagccgagccttccctcctcgattag

SEQ ID NO: 186013 - DNA, 2613 bp, synthetic construct
  misc_feature 1..2613: note = Description of Artificial Sequence: Synthetic coding sequence
  source 1..2613: mol_type = other DNA
atgggcaaccggggcatggaggagctgatccccctggtgaacaagcttcaggatgccttctcatctattggccagtcttgtcatttggacttaccccagatagccgtcgtaggaggccagagcgccggtaagagctcggtgctggaaaattttgtgggccgcgattttttgcctcgcggcagtggtatagtcacccgaaggcctcttatactgcaactaattttttcgaaaactgagcacgcagaatttctgcactgtaaaagcaagaagtttaccgactttgacgaagtacggcaagagattgaagctgagacagatagagtgacgggtactaataaaggcatttcccctgtccccattaacctaagagtgtactcacctcacgtgcttaatcttaccctcattgaccttcccgggattaccaaagtgcccgtgggcgaccaacctccggatatcgagtaccagattaaggatatgatcttgcaattcatctcccgggagtcaagcctcattctggccgtgaccccggcgaacatggatttggcaaacagcgatgcactcaaactggcaaaggaagtcgatccccagggtctgcgcaccataggcgtgattactaaactggatctgatggacgagggcacggacgctagagacgtgctcgaaaataaactcctaccactcagacgtggatatattggtgtggttaatagaagccaaaaggacatcgaaggtaagaaggacatcagggcggcccttgcagcagaacgcaagttttttctgtcacaccccgcttacaggcatatggcagaccgcatgggtactccgcacctgcagaagacactgaaccagcagctcacgaatcacattagggaaagcctgcccgccctgagatccaaactccagtctcagctgctgtctctggagaaggaagttgaagagtataagaactttcgtccagacgacccgacccgcaaaaccaaggccttgcttcagatggtgcagcaatttggggtggactttgagaagagaatagaaggttcaggcgaccaggtggataccttggagctctccggaggggccagaatcaatcgcatattccatgagagattcccattcgagctggtgaaaatggaattcgatgagaaggatctgcgacgcgaaatcagctacgcaattaaaaacattcacggagtgcggaccggactgtttacacccgacctggctttcgaagccattgtgaaaaagcaggttgtgaagttaaaagagccttgcctgaagtgtgtggacctggtcatccaggaactgattaatacagtccgtcagtgcacctctaagttgtcctcttacccccggcttcgcgaagaaactgaaaggattgtgacaacatacattagagaacgagagggacgcaccaaagatcagatcctcttgctgatagatattgagcagagctacattaatactaatcacgaggatttcattggctttgccaatgcccaacagcggagcacccagctcaataaaaaacgcgcgataccaaaccagggggagatcctggttattcgcagagggtggctgaccataaataatatttccctcatgaaaggcggctccaaggagtattggttcgtgttaacagctgaatctctgtcctggtataaggatgaggaagaaaaggaaaagaagtacatgcttccgctcgataatctgaagattcgggacgtggaaaaaggattcatgtcgaacaaacacgtctttgcaatattcaataccgaacaacgcaacgtctacaaggacttgagacagatcgaactcgcatgtgacagtcaggaagatgtagatagctggaaggctagttttctgagagctggggtgtaccctgagaaggaccaggcggagaacgaagacggcgcgcaggaaaatactttctccatggatccccagctggagagacaagtcgaaacaattagaaatctggtggactcttacgtggctatcatcaataagtctatccgggacctgatgcctaagactatcatgcatttaatgatcaacaataccaaagccttcattcatcatgaactgcttgcgtacctgtactcctctgccgaccagagctccttgatggaagaaagcgctgatcaggcccaacggcgagacgacatgctgcggatgtaccatgccttgaaagaagctctcaacataatcggggacatctccactagcacagtcagcacaccggtgcccccgcctgtggacgatacatggctccagtctgcgagtagccactctccaactccccagagacgtcccgtgagttccatacacccaccggggaggcccccagcagtacgagggcccacacccgggccacctctgatacccgtacctgtcggcgccgctgcatcattttctgcgccccctatcccctctagacccgggcctcagagtgtatttgcgaattccgacctgtttccagctcctccccagattcctagccgtcctgtacggatcccacctggcatccccccaggggtcccttcccgccgccccccagcagcgccttctcggcctaccatcatcaggcccgctgaaccctctctgctcgattag

SEQ ID NO: 186014 - DNA, 1461 bp, synthetic construct
  misc_feature 1..1461: note = Description of Artificial Sequence: Synthetic coding sequence
  source 1..1461: mol_type = other DNA
cacgtgaccgtggccgccgccgacagctggaagccccccgccagcgcacagcacgtaggacgcgcacctagggccggggccgcaacttgtttcctggggccccggccacccagtcatctggggggcagggacttcctgcccaggggctccggaatcgtcactcgtagaccgctgattctgcagctcatattcagcaagacggagcacgcggaattcctccactgtaagagtaagaaattcaccgacttcgacgaggttaggcaagagatcgaagccgagacagacagagtcaccggaactaacaaaggtatcagccccgtgccaataaacctgagggtgtattcaccacacgtgttgaaccttactctgatagatcttccaggcataaccaaggtgcccgtaggcgaccagcccccggatatcgaataccagatcaaggatatgatactgcagttcatcagtcgcgagtcttccctgatcttagccgtcacgccggcgaacatggatttggccaactcagacgccctgaagctggctaaagaggtcgacccccagggactgagaaccatcggagtgataaccaaactggatcttatggacgaggggacagacgcccgcgatgtgctggagaacaaactccttcctctcagacgtggctatatcggtgttgtgaaccgttcccagaaagatattgaaggaaaaaaagacatacgggcagccctagccgctgagaggaagttttttctttcccatcccgcttatcgccatatggcagatcggatgggcacaccccatcttcagaagaccctgaaccaacagctgacaaaccacatccgtgagtccctgccagcactccggtcaaagctgcaaagtcagcttttgtcattggaaaaagaggttgaggagtacaagaactttcgccccgatgatccaacacgaaagacaaaggcacttctgcagatggtccagcaatttggtgttgatttcgagaagagaatcgaggggtctggagatcaagtcgacactctcgagctgagtggcggcgctaggatcaacaggattttccatgagcgcttcccttttgagctggtgaagatggagtttgatgaaaaggacctgagacgggagatctcatacgccatcaaaaatatacacggcgtgagaacaggcctattcacacccgatatggcgtttgaagcaatagtgaaaaaacaaatcgtgaagcttaaggaaccgtctctgaaatgtgtggaccttgttgtgagcgaacttgccaccgtcattaaaaagtgcgccgagaagctgtcctcctatccccgtcttcgcgaagaaacagagaggatcgtcacaacttatatccgagagagagaagggcgcacaaaagaccagattttactgttaatcgatatagagcagagctacattaacactaaccacgaggattttatcgggtttgcatag

SEQ ID NO: 186015 - DNA, 2613 bp, synthetic construct
  misc_feature 1..2613: note = Description of Artificial Sequence: Synthetic coding sequence
  source 1..2613: mol_type = other DNA
atgggcaaccggggcatggaggagctgatccccctggtgaacaagttacaggacgccttcagctctattgggcaatcatgtcacttagatcttccgcagatcgccgttgtgggcggccagtccgctggaaaatcctcagtcttagaaaactttgtgggcagagatttccttccgcggggctccgggatcgttaccaggagacccctgattttacagctgatattttcgaagacagagcatgcagagtttttacactgtaagtcgaagaagttcaccgatttcgatgaagtccggcaggaaattgaggctgaaacggacagggtcaccgggaccaataagggcataagcccggtgcccattaatctgcgggtttacagtccccacgtgttaaacctcaccctgattgatctcccaggcataactaaggtgccagtcggtgaccagccgccagacatcgagtaccagatcaaagatatgatcctccagttcattagccgggagtcatccttgatcctcgcagtgacccctgcgaatatggacctcgccaacagcgacgctcttaagctggcaaaggaagtagacccacaggggctcaggacaattggagtaattactaaacttgacttgatggacgaagggacggatgcccgggatgtactggagaacaaactgctacccctccgccgcggctacattggcgtggtgaataggtcccaaaaagatatcgagggcaagaaggacattcgggccgcacttgcggctgagcgcaaattctttttgagccaccccgcttatagacatatggctgatagaatggggacccctcacctccagaaaacgctcaatcaacagcttactaatcatattcgagagagcctccctgcccttcgaagcaaattgcagtcccagttgctgtctctagagaaggaagtcgaagaatacaagaactttaggcccgacgaccctacacggaagacaaaggcccttctgcaaatggtgcagcagttcggcgtggactttgagaagcgcatagagggatctggcgatcaggttgatactctggagctttctgggggagctagaattaaccggatcttccacgagagatttcctttcgagttggtcaaaatggaattcgatgagaaagacctgcggcgtgagatctcctacgccatcaaaaatatccatggagtaaggacaggccttttcacaccagacatggctttcgaggctattgttaagaagcaaatcgtgaagctgaaagagcctagtctcaagtgtgtcgacctagtggtcagcgaactcgccactgtgatcaagaaatgcgcggaaaagctgagcagttacccaagactgagggaggagacagaacggattgtgaccacatacataagagagcgcgagggcagaactaaggaccagatcctcctgctaatcgatattgagcagagctatattaacacaaatcacgaagatttcatcggattcgcaaatgctcaacagaggtcaactcagctgaacaagaagagagctatcccgaaccagggcgaaattctcgtgatacggagaggatggctcaccatcaacaatatttcgctgatgaagggcgggagcaaagaatattggtttgtccttacagcggagagcctgagttggtataaagacgaggaggagaaagaaaagaagtatatgctcccactggacaatctgaagattcgtgacgtagagaaaggcttcatgtctaataaacacgtgttcgccatcttcaataccgagcagcgcaacgtgtataaagacctgcgccaaattgaactggcttgcgacagtcaagaggacgtagacagctggaaagcgtctttcctccgggccggagtgtacccagaaaaggatcaggctgaaaatgaggatggcgctcaggagaacactttttcaatggaccctcaactggagaggcaggtggaaacaatcagaaatctggtagactcctatgtggcaataatcaataaaagtatcagggatctgatgcccaaaacaattatgcatttgatgatcaacaatactaaagcttttatacaccacgagcttctggcatacctctactcttcagctgatcagtcatccctcatggaagagagtgctgaccaggcgcagagacgtgacgatatgctcagaatgtatcacgccttgaaggaggccctgaacattattggggatatttctactagcacagtgtcgacccctgtaccaccacccgttgacgacacttggctgcagtccgctagcagccactctccgacaccccagaggaggcccgtttcttcgattcaccctccaggtagacctcccgccgtaagaggcccaactcccgggcccccccttattccagtgccagtgggagccgctgctagttttagcgcccctcccataccatcgcgccctggacctcagagcgtgttcgcaaactcagatttgtttccagcaccccctcagatcccttcacgacccgttagaattccgcctgggatccctccaggcgtgccgtcacgccgcccacctgcggcgccgtcccgtcccactattatacgacctgcggagccctccctgcttgattag

SEQ ID NO: 186016 - DNA, 2601 bp, synthetic construct
  misc_feature 1..2601: note = Description of Artificial Sequence: Synthetic coding sequence
  source 1..2601: mol_type = other DNA
atgggcaaccggggcatggaggagctgatccccctggtgaacaagctgcaggatgcctttagctccatcgggcaaagttgtcacctcgacctcccacagatcgctgttgtggggggccagagcgcaggtaaatcatcggtcctggaaaacttcgtggggcgggacttcctaccccggggatcgggaatcgtgactcgacgcccacttattttgcagctcattttttccaaaaccgagcatgcagaattcttacattgcaagtcgaagaagtttaccgacttcgatgaggtaaggcaggaaattgaagccgagaccgatagagtcacaggaacgaataagggaatcagcccagtgcccattaacctgagggtgtactctcctcacgtgctaaacctgacactcatagatctccccgggattacgaaggtccctgttggtgatcagcctccagatattgagtaccagatcaaggacatgatcctccagttcatttcaagagaatcgagcctgatcctggccgtcactcccgcaaacatggatttggccaactccgacgctctgaagctggccaaagaagtagaccctcagggactgcggacaatcggcgtcattactaagctggatctcatggatgaggggacagatgctcgggacgtacttgagaacaaactactcccactgcggcgaggatacattggagttgtcaaccgctctcaaaaagacatcgagggcaagaaagatattagagcggccctcgcggccgagcgcaaattctttttgtcacacccagcctatagacacatggccgacaggatgggaaccccgcatctccagaaaaccctcaatcaacaactaactaaccatattcgtgaaagcttgcccgccctgcgatccaagctgcagagccagctgctctccctggagaaagaggtggaagaatacaagaactttcgaccagacgatcctacacgaaaaactaaggctctgctgcagatggtccagcagtttggcgtggacttcgaaaaacgaatcgagggaagtggtgatcaggttgacactttagaactatcgggcggcgcccgcattaatcgtattttccatgagaggttcccatttgaacttgtgaaaatggaattcgatgaaaaagatctgcgccgagaaatcagctacgccattaagaacatccacggtgtccggacagggctctttacacctgatatggccttcgaagcgattgttaagaagcagattgtgaaacttaaggagccgtccctcaagtgtgtggaccttgtggtgtctgaactcgccacagtgataaaaaaatgcgccgagaagctgagcagctatcccaggctgcgcgaggaaacagaacgcattgtgaccacgtacatcagggagagggagggacgcactaaggatcaaattctgctcctaattgatattgagcagtcctacataaacacgaatcacgaggattttataggttttgcaaatgctcagcagcgttccacgcagctcaacaaaaagagggccataccgaatcaggtgatcagacgtggctggctcactattaacaacatttctctaatgaagggaggctccaaagagtactggtttgtcctgaccgctgagtctcttagctggtacaaggacgaagaggagaaagaaaaaaagtatatgctccctttggacaacttaaagatccgcgacgtggagaagggattcatgtcgaataagcacgtgtttgccatattcaataccgagcagcgtaacgtgtacaaagacctcagacagattgagctagcttgtgactctcaggaggacgtggatagctggaaggcttccttcttgcgtgcaggggtttatccagaaaaggaccaagcggagaacgaagacggggcgcaggagaatactttttccatggacccccagctagagagacaggttgaaacgattcggaacctcgtagacagctatgtggccatcatcaataaatctatcagggatctaatgcccaaaaccatcatgcacctgatgatcaacaacaccaaagcatttatccatcatgagctactggcctatctgtactcttctgctgaccaatcctccctgatggaggaatcagcagaccaggcacagcgacgagatgatatgctacgcatgtaccacgcattaaaggaggccttgaacatcataggcgatatctctacatccaccgtgtccacccccgtgccgcctcctgtcgatgatacctggcttcagtcagcttcctcccacagccccactccacagaggagacctgtgtcgagcattcacccgcccgggaggccccctgcggtgagaggacccacaccaggtcccccccttattccagttccagtgggagcggcagcatcatttagcgctcctccaatcccatcacggcccggtccacaaagtgttttcgccaactccgacctgtttccagccccacctcagatcccctctagaccagtgcgcatcccaccaggcattcctccgggcgtgccatccaggcgcccgccagcagcgccttctaggccaacaatcatcaggccagcggaaccctcccttctcgactag

SEQ ID NO: 186017 - DNA, 1200 bp, synthetic construct
  misc_feature 1..1200: note = Description of Artificial Sequence: Synthetic coding sequence
  source 1..1200: mol_type = other DNA
atgctgcccctggagccctacctgacccagaccagcgccgtgccccaaatgtcccattttatgtgccattctccgacacataaaccccaggggctactgccatgggcaccttttcaccaagcgtctgtctctctgtatccgatctctccatggcccagtgagtctgtatgtcctccaacatgtccaggtggagcctcttgctggtttcccgccggaaacgcctgggatagggttgaacttggcttcctgggctttggagctgggggggtgtctattgctgtacctggctttccacttagttgcggtcagggatgttgtgcaggcggttggctggggcacggtgcccgattccctgccaagcttcgcgccttcccccaagtgatcagacgcgggtggctaaccattaacaacatcagcctgatgaaggggggctcaaaagagtactggtttgtgctgactgcagaaagtctgtcttggtataaagacgaagaagagaaagagaaaaaatatatgctgccattggacaatcttaaaattcgtgatgtggagaaaggcttcatgagcaataagcatgtatttgctattttcaatactgagcagaggaacgtgtataaggacctgaggcagatcgagctcgcctgtgatagccaggaagacgttgacagctggaaggcatcattccttcgcgctggagtctacccggagaaagatcaggccgagaacgaggacggcgcccaagagaacactttttccatggacccccaattggagaggcaagtggagaccatcagaaacttggtggactcatacgtcgcgattatcaacaagtccatcagggatctgatgccgaaaacgatcatgcacctcatgataaataataccaaggccttcattcaccacgagctgcttgcatatctgtatagttcggcagaccagtcgtcactgatggaggagtctgccgatcaggctcagagaagagacgacatgctccgtatgtatcatgccctgaaagaggccctgaatatcatcggcgacatttctacctctaccgtgagcacaccagtgcctccaccggttgacgacacctggttgcagtccgcaagctcccattctcctacgccccagaggcgccctgtgtcatccatccatccaccaggcagaccaccagcagtgcgaggaccaactcccggccctccctag

SEQ ID NO: 186018 - DNA, 13284 bp, synthetic construct
  misc_feature 1..13284: note = Description of Artificial Sequence: Synthetic coding sequence
  source 1..13284: mol_type = other DNA
atgagcagcaaggccgagaagaagcagcggctgagcggccggggctcctcacaggccagctggtctggtcgggcaaccagggctgcagtcgccacacaggaacagggcaatgcgccggccgttagcgagcccgaattacaggctgaactcccaaaggaggagccggaaccccggctggagggaccacaggcccagtcggaggaaagcgtcgagccggaggctgatgtgaaaccgttgttcctttctagagctgccctgaccggactcgccgacgcagtgtggacacaagaacacgacgccatcctcgaacattttgcccaggatcctaccgaatcgatactaactatcttcattgacccttgttttggtcttaaactcgagcttggcatgccagtccaaacacagaaccaactagtgtactttattcggcaagctcctgtccctattacttgggaaaatttcgaagccaccgttcagttcggtacagtcaggggcccgtatattccagccttattgcggctcctcggaggcgtattcgccccccagatattcgcaaacacaggctggcccgagtccattagaaatcactttgcgagccacttgcacaagttcctcgcatgcctcactgacacccggtacaaacttgaagggcacaccgtcctctatatcccagcagaggccatgaatatgaaacctgagatggtcattaaggacaaagaactcgtccagcgcctggaaacatccatgattcactggaccaggcagataaaagagatgttgtccgcacaggagaccgtggagaccggggagaatctgggaccactggaggaaatcgaattttggagaaacaggtgcatggacctgtccggcatcagtaagcagctcgtaaaaaaaggcgtcaagcacgtggagagtattctgcatctcgcgaagagttcctacttggcaccatttatgaagctggcccaacagattcaggacgggtctcggcaagcccagagcaatctgactttcctgtctatcctcaaagagccttatcaggaactcgcgttcatgaagcccaaggatatatcctctaagttgcctaaattaataagtctgataagaattatatgggtgaatagtccgcattacaacacgagagagcgcttaacttctctttttcgcaaagtgtgtgactgccagtaccacttcgcccgatgggaggatggaaaacagggtcccctgccttgtttctttggggcccaggggccacaaattactcgaaacctcctcgaaattgaggacatctttcacaagaatttgcacacgcttagagccgtgagggggggaattctagacgtcaaaaacacttgctggcacgaagattataacaagttcagagccggcattaaagatctggaggttatgacacagaatctgattaccagcgcttttgaactggttcgggatgttcctcatggcgttttgcttctggatacttttcatcgcctggcctcacgggaggcgattaaacgcacctacgataagaaagcagtggacctgtatatgttatttaattctgagctagccctggtgaacagagaaaggaacaaaaaatggcccgacctggaaccatacgtcgctcagtattctgggaaggccagatgggtccacatcctccgaaggcggatcgatcgcgtgatgacgtgcctggccggagcacactttctcccacgaatcggaactggtaaagaatcggtgcacacctatcagcaaatggtgcaggccatcgacgagctcgttcgaaaaacattccaggaatggacctcgagtctcgataaagattgtatccgcaggctcgatactccactcttacgaatcagtcaggagaaggcgggcatgttagatgtgaactttgataagtccttgcttattttgtttgccgagattgactactgggagagactgctcttcgagactccacattatgttgtgaacgttgccgagcgtgcagaggaccttagaattcttagggaaaaccttctgctcgtggcaagagactacaaccgaatcatcgcgatgctgtctcctgacgagcaggcactctttaaagaaaggatcaggttattagacaaaaagatccatccaggactgaagaagcttcactgggcgctaaaaggagcaagcgcctttttcattactgaatgtaggattcatgccagtaaggtgcagatgattgttaatgagttcaaggcatccaccttgactatcggatggcgggcacaggaaatgtccgaaaaactgctcgttcggatttcggggaaacgtgtttaccgcgatctcgagtttgaagaagaccagagagaacatcgtgccgctgtgcagcagaagctgatgaacctccaccaagacgtagtgacaatcatgacgaattcgtacgaggtgtttaaaaacgacggtcccgagatccagcaacagtggatgctgtatatgatccggctggacaggatgatggaagacgcattacgcctgaacgtgaagtggagtctgctcgagttgtccaaagcaatcaacggcgatggcaaaacttcacccaatccgctatttcaggtactggttattcttaaaaatgacctccaggggtctgtggctcaagtggaatttagtcccaccctccagactctcgcgggggtcgtaaatgatatcggaaatcacttattttctactatttctgtgttttgccatctgcctgacatattgacaaaacgtaaactgcaccgggagcccatacagactgtcgtggagcaggatgaggatatcaagaagatccaaactcagattagttctggaatgaccaacaatgcatctctgttgcaaaactacctcaagacatgggacatgtacagggagatctgggagatcaacaaggactcttttatccacaggtatcagagacttaatcctcctgtcagctccttcgttgccgatatcgctaggtacactgaggtggcaaacaatgtccagaaagaagagacggtaacaaatatacagtttgtgctcctggactgttctcacctcaagttttctctggttcagcactgcaatgagtggcagaacaagtttgcaaccctgctgcgggaaatggcagcaggcaggctgctggagctccacacttatctgaaggaaaacgccgagaaaatctcccgccccccccagacgttagaggagctcggggtttccctccagctggttgacgcgctgaaacacgaccttgcaaacgtggagactcaaataccacccattcacgaacaattcgcaatacttgaaaagtacgaagtgccagtggaagactcagttcttgagatgttggactcattgaatggggaatgggtggtgtttcagcagaccctgctcgactccaaacagatgctgaaaaaacataaggagaagtttaaaaccggcttaattcacagcgctgatgacttcaagaagaaggcacataccctcctggaggacttcgagtttaaaggtcatttcactagtaacgttggctacatgagcgcactcgaccagatcacgcaggtgcgagccatgctgatggctatgcgagaagaagagaattccctccgggccaatctcgggatttttaagattgagcagcctcccagcaaggatctccagaatctggagaaggaactcgatgctcttcagcaaatttgggaaattgccagagactgggaggagaactggaacgagtggaagaccggtcgcttccttattctgcaaactgagactatggaaacaacagcccatgggttgttcagaagactgactaagttggccaaagagtacaaggataggaactgggaaattatagaaactactagaagtaaaattgaacagtttaaacgtactatgccattgatctccgacctgagaaatcccgctctccgcgagaggcactgggaccaggtaagagacgaaatccagagagaatttgaccaggagtccgaatcttttactctggagcagatcgttgagctaggcatggatcagcacgttgagaaaatcggcgagatttccgcgagcgctacgaaggagctggctattgaagtcgcccttcagaacattgccaaaacctgggatgtgacccaattggacatcgtgccttacaaggacaaagggcaccatcgattgcgcggaaccgaagaggtgttccaggccctcgaagataatcaagtcgcactttccacaatgaaggcttctcgtttcgtcaaagcatttgaaaaagacgtagaccactgggaaagatgcctatccctcattttggaggtcatcgagatgatcctcaccgtgcagagacaatggatgtacttggagaacatctttttaggcgaggatatcaggaaacagctgccgaatgagtctaccctgttcgaccaggtcaatagcaattggaaagccattatggacaggatgaacaaggacaataatgccctccgctctacccaccaccccggactgctcgacactttgattgaaatgaacaccatcctggaagatatacaaaagagtttagatatgtacttggaaaccaaacgccacatattccctcgattctactttttgagtaatgacgacctgctggaaatccttggacaaagtaggaatcccgaagccgtgcagccacatctcaagaagtgcttcgacaatatcaaattattgagaattcaaaaggtggggggccctagcagcaagtgggaagcagtcggaatgttctctggtgatggtgagtatatcgattttttgcacagtgtgtttctggaaggacccgtggaaagctggctaggcgacgtcgaacagacaatgcgcgtgaccctccgagatctcttgaggaactgtcatttggcccttagaaagtttctgaataagcgcgacaagtgggtgaaagaatgggcagggcaggtcgtgattacggccagccaaatccagtggactgccgatgtgacgaaatgtctgcttaccgcaaaagagcgcgccgataaaaagattcttaaagtgatgaagaaaaaccaggtttccatattgaacaagtacagcgaagccatccgggggaatctgacaaaaattatgagactgaagatcgttgccctagtaacaatcgaaattcatgcccgtgatgttttagaaaaactgtacaagtctggactgatggatgtaaattcattcgattggcttagccagctgaggttctattgggagaaggatctggatgactgcgtgattcggcagaccaacacccaattccagtataactacgagtacctgggcaacagtggacggctagtcatcaccccattgaccgacagatgttatatgacgcttaccaccgctctccaccttcaccgtggcggatcaccaaaagggccggcaggcacaggcaagacggagaccgtgaaagatctgggaaaagctcttgggatttacgtgattgtggtgaactgttcagaaggtttggactataaaagcatgggaagaatgtatagcggcctggctcagacgggagcttggggatgttttgacgagttcaaccgtattaatattgaggtgctcagcgttgtagcacaccaaatcctgtgtattctgtcggctttggcggcgggactgacccactttcacttcgatggatttgaaatcaacttggtgtggagctgcgggatcttcatcactatgaatccaggatacgctggccggacagagctgcctgagaacctgaagagtatgttcaggccaatcgcaatggtagttcccgattccacacttattgctgaaattatcctgttcggtgagggcttcggcaattgcaagattctcgccaagaaagtctacacactttattctctggctgttcaacaattatcgcgtcaagaccattatgacttcggcttacgcgccctgacttccctcctgaggtatgcgggcaagaaaagacgtctccagccagatctgactgatgaagaagtactcctgctcagtatgagagatatgaacatcgctaagctgacctccgtggatgctcccctcttcaatgctattgtgcaggacctctttccaaacattgagcttccagtgattgattatggaaaacttcgcgagaccgtggaacaggagataagggacatgggtctacaaagtacgcctttcacacttaccaaggtgtttcaattgtatgaaacaaagaactcacggcacagcacaatgatcgtgggctgcacgggcagcggcaaaacagcatcttggaggatcttacaagcaagtctctcaagcctgtgccgcgcaggggatccgaatttcaatattgtgagggaattcccccttaaccccaaagcgctgtcactgggagagttgtacggcgaatacgatctgtctactaacgagtggaccgacggaatcttatcgtctgtgatgaggaccgcctgcgccgacgaaaagccagatgaaaagtggatccttttcgatgggccagtcgacacattgtggattgagaacatgaactccgtcatggatgacaacaaagtacttacgctcattaatggcgaacgcatagctatgcccgagcaggtgtcacttctattcgaggttgaggacctcgctatggcatcccccgccacggtgtcacgctgtggtatggtctataccgattatgccgacctgggctggaaaccttatgtgcaaagctggctcgagaaaaggccaaaagcggaagtggagcccctgcagcggatgtttgagaagttaattaacaagatgttagccttcaagaaggataattgtaaagaactggttcctctcccagagtacagcggaatcactagcctttgtaagctgtacagcgcactcgcaactccagagaacggcgtgaatcccgctgacggggaaaattacgtcaccatggtcgaaatgacctttgtcttttccatgatctggtccgtgtgtgctagcgttgacgaagaaggcaggaaacgcatcgatagctatctgagggagattgagggatctttccccaataaggacacagtctacgaatattttgtggacccaaagattagatcgtggacatcattcgaggataaacttcccaaatcctggcgatatcctcctaacgcaccattctataagataatggtgccaactgttgataccgtgagatataattacttagtttcgtcgctggtggccaatcaaaatcctattttgctggtgggacctgtggggacggggaagacatcgatcgctcagagcgtgctgcaatctctgccttcttcccaatggtctgtgctggtagttaatatgagcgcacaaaccacctctaacaatgtgcagtccattatcgagtcaagagtcgaaaagcggactaaaggcgtgtacgttccgtttggcggcaaatcaatgattacctttatggacgacctaaatatgcccgccaaagacatgttcgggtctcagcccccactagagctcattcgactttggatcgactacggcttttggtatgataggactaagcaaactatcaagtatattagagagatgttcctgatggccgcgatggggccaccgggtggaggcagaactgtaatctccccccggctacgcagtcggtttaatataattaatatgacattccctaccaagtctcagattatcagaatctttggaaccatgatcaatcagaaactgcaagactttgaagaagaagttaagcccatcggcaacgtggtcaccgaggcaactctcgacatgtacaatactgtggtccagcgatttctgccaacacctacaaagatgcactatttgtttaatcttagagatatatcaaaagtattccaggggatgttacgcgctaataaggattttcatgatacgaagagttcaattacccgtttgtggatccatgagtgctttagagttttttcggataggcttgttgacgcagctgacaccgaggcctttatgggcattatctcggacaagctgggtagcttcttcgacctgacttttcaccatctgtgtcctagcaagcgccccccgatcttcggtgattttctgaaggagcctaaagtatacgaggaccttaccgaccttacggttctcaagaccgttatggaaaccgcactgaatgagtacaacttgagccctagcgtggttccaatgcagctagtgttattccgcgaagctatagaacacatcacgaggatcgtcagagtgataggacagccccgcggaaatatgctcctggtggggatcggtggaagcgggaggcagtcactcgcgcgtctggcttcaagcatttgtgattacacgacattccaaattgaggttacgaaacattaccggaagcaggagtttcgcgatgacataaagcgcttatatcggcaggcaggtgtcgaactgaagaccacaagcttcatattcgttgacactcaaatcgccgacgagagcttcctggaggatattaacaacatcctgtctagtggagaagtacctaacctgtataagcccgacgaatttgaagaaattcagagtcatatcatagatcaggctagggttgaacaagtgcctgagtcttccgacagcttgtttgcatatctgattgagagagtgcagaataatcttcacattgtgctgtgcctttctccaatgggggaccctttccgtaactggatccggcagtacccagccttggttaattgcacaaccattaactggttttccgagtggcctcaagaggccctgttagaggtagccgaaaaatgcttgatcggggtcgacctcgggacgcaggagaacattcataggaaggtggcccagatctttgtcactatgcactggagcgttgcccagtattcacaaaaaatgcttttagagctgaggcgtcacaactatgtgaccccgacaaagtacttggagctgctctccggatataagaagctcctgggcgagaaacggcaggagctacttgcacaggcgaacaagctcagaactggactgtttaaaatcgatgaaacccgagagaaagtgcaggtgatgagcctggagctcgaggatgccaaaaagaaggtagctgagtttcagaaacagtgtgaagaatatttagtcatcatagttcaacagaaaagagaggcagacgaacaacaaaaagctgtcaccgccaacagcgagaagattgctgttgaggagattaagtgccaagcgctagccgacaatgctcagaaagatctcgaggaagcactgccagccctggaggaagccatgcgggccctggagtctctgaacaagaaagatatcggcgagatcaaaagttacggtcggcctccagcgcaggtggaaattgtgatgcaggccgtgatgatcctgcggggaaatgagcctacatgggcagaagccaagaggcagctgggagaacagaatttcattaaatccctgatcaatttcgacaaggataatatttcagacaaggtcctcaagaaaattggtgcgtactgcgcccagcctgactttcaacctgacatcattggccgtgtatctttggccgctaagtccctgtgtatgtgggttcgggcaatggagctatacggccgtctgtaccgcgttgtcgagcccaaaaggatcaggatgaatgccgcactcgcccagcttagagagaagcaggcagccctggccgaggctcaggagaagctgcgggaagtggcggagaagctcgagatgctgaagaaacagtatgacgaaaagctcgctcagaaagaggaattaaggaagaaatctgaagagatggaattgaagctcgagagagccggaatgttggtgagcggacttgccggagaaaaggccaggtgggaggaaacagtccaagggctcgaagaggacttagggtacctggtgggagattgcctgttggccgctgcctttttaagctatatgggcccctttctcactaattacagggatgagatagtgaatcagatctggatcggtaagatctgggagctccaggtgccgtgctcgccctcctttgcgattgacaattttctgtgcaatcctactaaagtgcgcgactggaacatccaggggctgccaagcgatgcattctcaactgagaacgggatcatagtgaccagggggaaccgatgggcgctcatgatcgatcctcaggcgcaggcactcaaatggatcaagaacatggagggcgggcaggggctgaagatcattgacctgcagatgagtgattacctccggatcctggaacatgcaattcactttgggtacccggtgttgctccagaatgtgcaggaatatttagatcccaccctcaacccgatgctgaacaagagcgtggcccggattggcggcaggctgttaatgcggatcggtgataaggaagttgagtacaacaccaactttagattctacatcaccaccaaactctcaaaccctcattattctcccgagacaagtgcgaaaaccacgattgtgaactttgctgtgaaagaacagggactcgaggcccaattgctggggatcgttgtgaggaaagagagacccgagctggaggagcagaaggattctctggtcatcaatattgctgccgggaagcgaaagctgaaggaactagaagacgaaatcctccggctattgaatgaagcaacaggatccctactagacgatgtgcagctggtgaatacactccacacctcgaagatcacagccacagaggtgacagagcaacttgaaacctccgagaccaccgaaattaacactgatctggcccgggaagcatatagaccttgtgcacagagagcctcaattctgttcttcgtgttgaacgacatgggttgtatagaccccatgtatcaattttctctggatgcgtatatcagtctcttcatcctcagcatagataaatcccaccgttcaaataagcttgaggataggatcgactaccttaatgactatcatacctatgctgtgtaccgctatacatgccggaccctgttcgaaagacacaagctgcttttctcatttcacatgtgtgccaagattctagagacctctgggaagctgaacatggatgagtataacttctttctgaggggaggagtagtgctcgatcgagagggccagatggacaatccgtgcagttcctggctagccgacgcttactgggacaatatcaccgaacttgataagctgacaaattttcacgggttgatgaatagttttgagcaatatccaagagattggcatctgtggtacacaaatgcggcaccagaaaaggcgatgttaccaggagagtgggaaaatgcatgcaacgagatgcaacgcatgcttatagtacgcagccttaggcaggatcgcgtggctttctgtgtcacctctttcatcattactaacctgggaagtcgtttcatcgagcctcctgtgctaaacatgaagtcagtactggaggacagtactccaagaagcccccttgtgttcatactttcacccggggttgatcccacttctgccttgctccagctggcggaacatatgggcatggcccagcgctttcatgcgctgagtctgggccagggccaggctccaattgctgctcgcctcctgcgcgagggcgttacccaggggcactgggtgtttctcgctaactgtcacctgtctcttagttggatgccaaatcttgataaattagtcgagcagctgcaagtagaggacccccacccctcattccggctttggctcagctctatccctcatccagatttccccatcagtatcctgcaagtaagcatcaagatgaccacggagcccccgaagggcctgaaggcaaacatgacacgactctaccagctgatgtctgaaccacagttttctaggtgtagcaaacccgctaagtacaagaagttgttgttctcactgtgcttcttccatagcgtgctgttggagaggaagaaatttctgcagctcggatggaatattatttacggctttaacgacagtgatttcgaggtctctgagaatctgctttctctgtatctcgatgagtatgaagagaccccctgggacgctctgaagtatttgattgctggtataaattacggcggacatgtgacggacgactgggatcgcagactgctgaccacttatattaacgattacttttgtgaccagagtttatctaccccattccaccgactttctgccctggaaacatatttcatacccaaggacggaagtcttgccagctataaagaatacatctctctgctacccggtatggacccccccgaggcattcggccagcacccaaacgcagacgttgccagccagattaccgaagctcagacactctttgatactcttctgtccctacagccccaaatcaccccaactcgcgccggtggccaaacaagggaagaaaaagtgctagagctggccgccgatgtgaaacaaaaaattccagagatgatcgattacgagggcacacagaagcttctggctctggatcccagcccgttgaatgttgtgctgttacaggaaatacagcgctataacactcttatgcaaaccattttgttctccctgactgatctggaaaagggtattcagggactaatcgttatgagtactagtctcgaggaaatctttaactgtatttttgatgcacatgtgccaccactgtggggcaaggcttaccccagtcaaaaaccccttgctgcatggaccagggatctggctatgagagtggaacagttcgagctgtgggcttcccgggctcgcccgcccgtaattttttggctgtccggtttcacctttccgactggcttcctgactgccgttctgcagtcctccgcccgccagaataacgtcagtgttgattcactaagttgggaatttattgttagtacagttgacgactcaaatcttgtgtaccctccgaaggatggcgtgtgggtgcgcgggttatatctggaaggtgcagggtgggataggaaaaactcatgcttggtggaggcagaacccatgcagttagtctgtctcatgcccaccattcacttccgccctgcagagagcaggaagaaatctgcgaaaggaatgtactcctgcccctgctattattaccctaatagagctggctccagcgaccgggcgtcctttgtaattggtattgatctgaggagcggggcaatgacacctgaccattggatcaagagaggaacagctctgttgatgtccctggacagctag

SEQ ID NO: 186019 - DNA, 1782 bp, synthetic construct
  misc_feature 1..1782: note = Description of Artificial Sequence: Synthetic coding sequence
  source 1..1782: mol_type = other DNA
atggagatcgtgtacgtgtacgtgaagaagcggagcgagttcggcaagcagtgcaacttcagcgacagacaggccgagctgaatatagatatcatgccaaatcccgaattagcagagcagttcgtagagcgaaaccccgtggacacgggaattcaatgctctatttcaatgtctgagcacgaagctaattccgaacgcttcgaaatggagaccagaggcgtgaatcatgtggagggagggtggccgaaggacgtgaaccctctggagctggagcagacaatccgcttcaggaagaaggtggagaaggatgagaattatgtgaatgccatcatgcagcttggctctattatggagcattgcataaagcaaaacaacgcaatcgacatctatgaagaatattttaacgacgaagaagccatggaagtgatggaggaggacccatccgctaagaccatcaacgtgttccgggaccctcaggagatcaagcgagccgctactcatctgtcatggcacccggatggcaacagaaaactagccgttgcctattcttgcctggactttcaacgtgcccctgtgggcatgagttctgacagctacatctgggacctggaaaaccccaataagccggagcttgctctcaaacctagttctccacttgtaacattggagtttaatcccaaagatagccacgtgctcctgggcggctgctacaacgggcagatcgcatgttgggatactcgcaagggatctctggtggccgaactcagcactatagagtcctcccaccgggaccctgtctatggcacaatatggctgcagtcgaagaccgggacagaatgcttcagcgcttccacagatggtcaagtgatgtggtgggacatccggaagatgtcggagcctacagaggtggtgatcctcgatataacaaagaaagagcagctggaaaatgcactcggagccatctccttggaatttgaaagcacgctacccacgaagttcatggtggggaccgagcaaggcatagtgatttcctgtaaccgtaaggctaaaacttcggcagaaaagatcgtgtgtacttttcccggtcatcacgggccaatctatgcgcttcagagaaatccgttctaccctaaaaattttctcacggtgggcgactggactgcccgaatctggtctgaggactcgcgagagtctagtattatgtggaccaaataccatatggcatatttgacagatgctgcatggagtccagtgcggcccaccgttttctttaccacccgtatggatgggactctcgatatttgggattttatgtttgagcagtgtgatcccactctaagcctgaaggacaatggatgcctcattgcgtgtggttcgcagttagggacaacaacactgttggaggtcagccccgggctgtcaactctgcaaaggaacgagaagaatgtagctagctccatgtttgagagagaaactagaagggagaagatcctcgaggcccgacaccgtgaaatgaggctgaaagagaaggggaaggccgaaggtcgggatgaggagcaaactgatgaagagctcgccgtagatctggaagccttagtgagcaaggccgaggaggaattcttcgacataatctttgccgaacttaaaaagaaagaagcagatgccattaagctgactcccgtgccccagcagccttcacccgaggaggatcaggttgtggaggagggtgaggaggccgcaggggaggagggtgatgaggaggtggaggaggaccttgcctag

SEQ ID NO: 186020 - DNA, 2676 bp, synthetic construct
  misc_feature 1..2676: note = Description of Artificial Sequence: Synthetic coding sequence
  source 1..2676: mol_type = other DNA
gagaaggacaacggcctggacgtgttcaagctgagcgaccgggacttcctgagatctatggagaacgccatacgatttgggaagccttgcctgctagaaaacgtaggggaagaattagatccggcccttgaaccagtcctactgaagcagacttataagcagcagggaaacacagtgctcaagctgggagatactgtcattccctatcatgaagactttaggatgtatataaccaccaaacttcccaacccgcattacactccagagatttctaccaagctgacattgatcaacttcacccttagccctagcggccttgaagaccagctgttaggacaggtcgttgctgaggagcgccctgacctggaagaagcgaagaatcagttaataatatcaaacgcaaaaatgaggcaagagctgaaagacatcgaagatcagattttatatcgcttgtcttcatcggaaggcaacccagtggatgatatggagcttattaaggtgctggaggcctctaaaatgaaagccgcggaaattcaggcaaaagtccgaatcgccgaacagacggagaaggacattgacttgacaaggatggaatatatccctgtcgccattaggacccagatcttgttcttttgcgtgtccgatctcgctaacgtggatcccatgtatcagtatagcctggagtggtttttgaacattttcttatccgggatagctaacagtgagcgcgccgacaacctgaagaagcgcatttctaacataaaccgatacctgacttacagtttgtattccaacgtgtgtagaagcctcttcgagaagcacaagctcatgtttgcattcctcctctgcgttagaataatgatgaatgagggcaagatcaatcagagtgagtggaggtacttactgagcggaggatccatctctataatgaccgaaaatccggcccctgattggttatcagaccgggcttggcgcgacatcctggccctgtccaatctcccgacattttcttcattttcctccgacttcgtgaagcatctgtccgaatttagagtaatcttcgactccctggagccgcatcgagaacccttaccgggaatctgggaccaatatttagaccaatttcaaaaattgctggtgctgagatgcttgcgaggcgataaggttactaacgccatgcaagacttcgtagctacaaatctggagccacgcttcatcgagcctcagactgctaacctctcggtcgttttcaaggactccaacagcaccacccctttaatttttgtattatcgcctggtacagatccggccgccgatctttataagttcgcagaggagatgaagtttagcaagaagctgtcagccatcagtctcggacaggggcagggtccccgagccgaggccatgatgcgctcctcaattgaacggggcaagtgggtgtttttccagaactgtcatctcgcacccagttggatgcctgccctggagcgcctgatcgagcacatcaatcccgacaaagtccatagagatttccgtttgtggctgacttctctcccctctaataaattccctgtgtctatactgcagaatggtagcaagatgaccattgaaccccctcgtggagtcagggccaacctgctgaagtcttattcatctctgggagaggacttcctcaacagctgccataaggtgatggaatttaaatcactgttgctttctctttgtctgtttcatggaaacgcactggagcggcataagttcgggccacttggattcaacattccgtatgagttcactgacggagatctccgcatctgcatttctcagcttaagatgttcctggacgaatacgacgacattccatacaaggtgctcaagtataccgccggagagatcaactacggaggcagggttacagacgactgggataggcgatgtattatgaatattctggaagatttctataaccccgatgtcctaagccccgagcattcttatagtgcttccgggatctaccaccaaattccaccaacgtacgacctgcatggctacctgtcctatattaagtcgctccccctcaatgatatgccagaaatttttggactgcacgacaatgccaatattacatttgcccagaacgagacgtttgcgttgttgggaacaatcattcagttacaaccaaagtcttccagcgccggatctcagggaagggaagaaattgttgaggacgtgacacaaaacatcctgctgaaggtgccagaaccaattaatctgcagtgggtgatggccaaataccccgtgctgtacgaggagtcaatgaataccgtgcttgttcaggaggttatcaggtataatcgtctactgcaggtgattacccaaacccttcaggacctgctgaaggctcttaagggtctcgttgtgatgtcctcccagctggaactcatggctgcatcactatacaacaacacggtgcccgagctctggtccgctaaggcctaccctagtttaaagcctctgagctcttgggtgatggacctgttacagcggcttgacttcctgcaggcatggatccaagacggcatccctgctgtgttttggatcagcggattttttttccctcaggccttcaatcggcattccgctgaattttgcccacagatctgtcatcttcattag

SEQ ID NO: 186021 - DNA, 12798 bp, synthetic construct
  misc_feature 1..12798: note = Description of Artificial Sequence: Synthetic coding sequence
  source 1..12798: mol_type = other DNA
atggagcagcccaacagcaagggctacagcctgggccggaccccccaaggccctgagtgcagtagcgctccagccgtgcaggtggggacccatcgtggactggagtacaaccccgggaagattctccccggttctgactacggactggggaacccacccgctctcgacccgaaactcccccacctcccactcccccccgctccacctaccctctcggatctggggcaacctcggaagtcacccctgacaggaacagacaagaaatatcccctgatgaagcagcggggtttctactctgacatactgtcacccgggactctcgaccagttaggggaggtgtgtaggggcccacgcatgagtcagaacctgctccgtcaagcagatctcgacaagtttacccctcgggtaggttccttcgaagtcccagaggattttcaggaacgaatggaacagcaatgtattggttccaccacaagactacttgcacaaaccgatttcccgctacaagcatacgaaccaaagatgcaggtcccgttccaggtgctgcctggacagcaccctagaaagatcgaaatcgagcggagaaaacaacagtacctgtccttagatattgaacaactcctgttcagccagggtattgatagtaacaagctaatgcctcggcacctcgatcatcaacatccccagaccatagaacaaggccacgatccaatctttccaatctacctgcctttgaaggtcttcgataacgaggactttgactgtaggactccacgagaatggatcaacatgggtctggaaccaggcagcctcgataggaaaccagtgcccgggaaggccctgcttccaactgacgattttctgggtcacgaggatcccaaaagtcaaaaactcaagtataaatggtgcgaagtgggagtgcttgactatgacgaggagaaaaaattatatctggtgcataaaaccgatgagaaaggactggttcgtgacgagatgggcagaccaatcttaaatgcgggcgtgaccaccgaaggaagacctcccctccaagtttgccagtattgggttccccgaatccagctgctcttctgcgctgaggacccctgtatgtttgcccagagggtagttcaggcgaacgctttacgcaaaaataccgaggcattgctattgtataacttgtatgtggattgtatgccctccgacggccagcatgtgataagcgagcagtctctctccaagatcaagcagtgggcactttcgaccccacgcatgcggaaaggaccctctgtactggagcacctgagtagcctagcccgggaggtgtctctggattacgagagaagtatgaataagattaacttcgaccatgtggttagctccaagcctgagacattcagttatgttaccctgccgaagaaggaggaggagcaggtacccgaaagaggattggtgagcgtcccaaagtatcacttctgggagcagaaagaggactttactttcgtgagcctcctgactaggccagaggtcattactgctcttagtaaagtgcgggctgaatgtaataaagtaacagctatgagcctgttccacagcagtctgtctaagtacagccaccttgaagaatttgagcagatccagagccagacgttctcccaggtgcagatgttcctgaaggacagctggatctcatcattgaaggtagctatgaggtcaagcctccgggatatgagcaagggatggtacaatctctacgaaactaactgggaagtctatttgatgagcaagctgcggaaacttatggaactcgtcaagtacatgctgcaggatactctgagattccttgtgcaagacagcttggcctccttcagtcagttcattagtgatacttgctgttcagtgctcaattgtacggatgacatggtttggggcgatgatttgatcaattcaccttaccggccgcgcaagaacccgcttttcatcatggatcttgttctggactcttctggagtccattatagcactcccctggaacagtttgaggcgtctctccttaatctttttgacaaagggattctcgctactcacgccgttccccagctggagaaattggtgatggaggacatctttatttccggagatccactccttgaatcggtggggctgcatgagccattggttgaagaattgagagcaaccattgcttccgcagtatccaaagcgatgataccactgcaggcctacgcgaaagagtataggaagtacttggagctgaacaataatgatatcgcctcattcctaaagacttaccagacgcagggcttgctggcccaagaagtgagggaggtggtactcactcacctgcgggaaaaagagatcctcgatagctctttgcccagtagcattatcatcggccccttctatataaacacagataacgtgaaacagtcactgtctaaaaagcggaaggcgctcgcgacttctgtgttggacattcttgctaaaaacctgcacaaagaagtggacagcatttgcgaggagtttagaagcatctcccgcaagatttatgagaaaccgaacagcattgaggagctggctgaactccgggagtggatgaagggcattccagaaagactggtagggctggaagaaaggatagtcaaagtcatggacgactaccaagtgatggacgagttcctgtacaacctgtcgtctgacgatttcaacgataagtggatcgccagtaactggccttccaagatccttgggcaaatcgagcttgttcaacagcagcacgtggaggatgaggaaaaatttagaaagattcaaatcatggaccagaacaacttccaggagaagctggagggactgcagttggtcgttgctggattttcgatccacgttgagatttcccgcgctcatgaaattgcaaatgaggtccgcagagtgaagaaacaactgaaagattgccagcagcttgcgatgctatacaacaaccgagaaagaatcttctccttacctattactaactacgataaactgagcaggatggttaaggagttccagccctacttagacctgtggacaaccgcatctgactggcttaggtggtctgaatcctggatgaacgatcccttgtccgctattgatgccgaacagcttgagaaaaatgtggttgaggcctttaaaaccatgcataagtgcgtaaagcagtttaaggatatgcctgcatgtcaggaagtggctctcgacatacgggctcgcatcgaggaattcaagccttatattcctctaatccagggactgagaaaccctgggatgagaatccgccactgggagaccctgtccaatcagattaatatcaatgtcagacctaaagccaatctcactttcgctcgctgtctggagatgaatctgcaggaccacatcgaaagtatctctaaagtggctgaggtcgctggaaaggagtacgccattgagcaggccttagacaagatggaaaaggaatggagcaccatcctctttaacgtcttaccttataaggctaccgatacatacatactgaagagccctgatgaggcttctcagctattggacgatcatatcgtcatgacgcagaatatgtcatttagcccctacaaaaagccattcgagcaaaggatcaatagctgggaaaacaagcttaaactgacacaggaagtgctggaagaatggctgaattgccagcgcagctggttatacctggaaccaatattcagcagcgaggatatcaaccagcagttgcctgttgaaagcaagagataccagacgatggaacgaatttggaagaagataatgaaaaatgcatacgaaaaccgggaagtgattaatgtgtgctctgatctgagaatgctcgactccctcagagattgtaacaagatactggacctggttcagaagggactttcagagtatctggagaccaagcgctccgcatttcctcgattctatttcttgagcgatgacgagctcttggaaatacttagccaaacgaaggaccctacagctgttcagcctcacctgcgaaagtgtttcgagaatattgctcggctgctgtttcaggaagacttggaaatcactcatatgtattccgctgagggcgaggaggtacagttatgcttttcaatatatccatcttccaatgtggaagactggctgagggaagtcgagcgaagcatgaaggcatccgtgcatgacatcatcgaaaaagcaattagggcttatcctacaatgccccgtacccagtgggttcttaactggcctggtcaagttacgatagctggatgccaaacttattggacaatggaggtagccgaggctctggaagctggtaacctccggtcccagctcttcccacaactgtgccagcagttgagcgatctggtagcactagtccgaggcaaactgagtaggatgcagcgggcggtgctctccgcgctcatcgtgattgaggtccatgcaaaggacgtggtgagtaagctgattcaggaaaatgtcgtcagtgtgaacgacttccagtggatctctcaactgcggtactattggactaataacgacttgtatatccgggcggtaaacgcagagttcatttatggctacgaatatcttgggaactcagggcggctggtcattaccccccttactgatcgttgttacctgacactcacaggggcattgcacctgaagttcggaggagctccggccgggcccgctggtactggcaaaacagaaacaaccaaagacttaggaaaagccctggccatccagacagtggtgtttaattgctccgaccagcttgactttatggccatggggaagtttttcaaagggctggcatcagccggagcctgggcatgctttgacgaattcaatagaattgacatcgaggttctctccgtggtagcgcagcagattactacgatccagaaagcccagcagcagcgagttgagaggttcatgtttgaaggcgtcgaaattccactcgtgccatcttgtgccgtgtttattacaatgaaccccggctacgcagggcgcacagagctgccggataatctaaaggctttgtttcgtcccgtcgccatgatggtgcctgattatgcaatgattacagagattagcctctactccttcgggtttaatgaggcaagtgtgctcgcgaagaaaattactaccactttcaagctctcatctgagcagctgtcctcccaagatcattacgacttcggaatgcgcgctgtgaagacagtgatctcagccgctgggaatctaaagagagagaacccctccatgaacgaagaactgatatgtctacgtgccatccgggatgtgaacgtaccgaaatttctacaggaggatcttaagctctttagtgggattgtgtctgatctcttccctactatcaaagaggaggataccgactatggcatcctggacgaggctatcagagaggcctgccggaattctaatttaaaggatgtagaaggttttcttacaaaatgcatccagctgtacgaaaccaccgtggtccgacacggcctcatgctggtaggccctacggggtccggcaagtcaacatgctatagagtgctggcagccgctatgaccagcctgaagggtcagccgtcaatttccggtggtatgtatgaagctgtgaattattatgtgctgaatccaaagtccatcaccatgggccagctctatggggaattcgatctgctgacccacgagtggacggatgggatatttagttctttcattcgggcaggtgccatcaccagcgatactaataaaaaatggtacatgtttgatggccctgtcgatgctatctggatagagaatatgaacaccgtcttggatgacaataagaagctctgccttagctccggcgagatcattaaactcaccgaagccatgacaatgatgttcgaggttcaggacctggcggtggcttcacccgcgactgtgagccggtgcgggatggtttacctggaacctagcatcctgggactgatgccctttatcgaatgctggctgcggaagctgccccctttactcaagccatacgaggagcacttcaaggcccttttcgtgagctttttagaagaaagcatatccttcgtgcggtccagtgtgaaggaggttatagcctcgaccaactgcaacctgacaatgagtctgcttaaactgctggattgttttttcaagccattcctgcctagagaaggccttaaaaaaataccaagcgagaagctgtcccgcattgtagagctgatcgaaccatggtttatcttctctttgatttggagtgttggggccaccggcgattccagtggaaggacgtccttcagtcattggctaagactcaagatggagaacgagcagctgaccctgctttttcccgaggaaggtcttgtttttgattataggttagaggatgctggcatatccggcactaatgattcagaggatgaagaggaggaatacaaacaggtggcctgggtgaagtggatggactcaagcgctccgttcaccatggtgccggatacaaattactgtaacattattgttcccacaatggacacggttcagatgtcacacctgcttgatatgctcctcacaaataagaaacctgtactgtgtatcggccccacaggtaccggcaaaactctgaccatttccgacaagttacttaagaatctcgcattggattatatatcacacttcctgacctttagtgcccggacttcagctaaccagactcaggacttcatcgatagcaagctggacaagagacggaaaggcgtgtttggaccccccctggggagaaactttattttttttatcgacgacttgaatatgccggccctggagacctatggggctcagccccccatagaactcctcagacaatggatggaccacggtgggtggtacgaccgcaagatcattggggcctttaagaatctagtcgacatcaactttgtttgtgctatgggcccccccggagggggtcgaaacaccgtgacaccccgccttatgcgccacttcaactatttaagttttgcggaaatggatgaggtctccaagaagcggatcttttccacgattctggggaactggctggacggtctgcttggagaaaagtcataccgcgagagagtgcccggggcccctcacatcgcccacttcactgaaccattggttgaggctaccatcatggtgtacgctactatcactagccagctcttgcctacacccgcaaagtcccattacacattcaacctgcgcgatctcagcaaagtgtttcagggcatgctaatggccgaccccgcaaaggtggaggatcaggtccaactgctgcgactctggtaccacgaaaattgtagggtctttcgggaccggctagtgaacgaggaggaccggagctggtttgatcagttactcaagagatgtatggaacagtgggaggtgacctttaacaaggtctgtccttttcagccaattttgtacggcgacttcatgtccccaggaagtgatgtgaagtcctacgaactgattacatctgaatcaaaaatgatgcaagtgatcgaagagtacattgaagactacaatcagatcaacacagccaaactaaagttggttctatttatggacgcaatgtcacatatctgccgtatcagtcgaacgctcaggcaggcacttggcaacgccctgctactgggcgttggtggctcagggcgctcatccctgacccgactggcaagtcacatggcagagtatgaatgcttccagattgagctgtctaagaactacggaatgagcgaatggagggacgacgttaagaaggttctactgaaggcgggcctgcagaatctacccattacgttcctcttttctgatacccagataaagaatgagtctttcctcgaggacataaacaatgtcctgaatagcggagatatccccaatctgtatactgccgacgagcaggaccagatcgttagcacaatgcggccatatattcaggaacagggcttgcagcccaccaaagccaatttgatggcggcctatacaggccgggtgagatccaatatccatatggtgctctgcatgagccccatcggagaagtattcagggcaagactccgtcagtttccatccctggtcaattgttgtaccattgattggtttaacgagtggcccgcggaggctttaaagagtgtcgctacggtcttcttgaatgagattccagagctggaaagttcccaggaggaaattcaaggcctcatacaggtctgtgtgtatatccaccagagcgtctcaaaaaaatgcattgaatatctggccgaactgacacgccacaactatgtcacccctaagtcctaccttgaattactgcatatctttagcattttaattggccagaaaaaactcgagctaaaaaccgccaagaacagaatgaaatctggtttggacaagctgttgagaaccagtgaagacgtggctaagatgcaggaggacctggaatccatgcacccgctgctcgaagaagctgccaaagacaccatgctgaccatggaacaaattaaggtggatacagcaatcgcagaagaaactcgaaactcagtgcagacagaggaaattaaagcaaatgaaaaggctaagaaagctcaggccatcgcagatgatgcccagaaggacctcgacgaagctctgcctgcactggatgcggccctggcctcattaaggaaccttaataagaatgatgtcactgaagtgcgagctatgcagcgaccaccaccaggggtcaaactggttattgaggccgtctgcattatgaagggcattaaaccaaagaaggtaccgggcgagaagcctggtaccaaggtggacgactattgggagccaggaaagggtttgctgcaggatccaggccacttcctggagagtctatttaagtttgataaggacaacattggagatgttgtgattaaagcaatccagccatacattgataacgaggagtttcagccagccactatcgccaaggtgtcaaaagcgtgtacctcaatttgccaatgggtgcgagctatgcacaagtaccatttcgtggccaaggccgtggagcccaagcgccaggctctgctggaggcacaagacgatctcggagtaacacagcggattttggacgaggcaaagcagcggctgagggaggtggaggatggaatcgccaccatgcaagcaaagtatcgcgaatgtataactaagaaagaggagctggagcttaagtgtgaacaatgcgaacagcgcctgggtcgcgccggtaaactgatcaatggcttgtccgacgagaaagtccggtggcaggagactgtagaaaatctacagtatatgctcaacaacatttcgggggacgtgcttgtcgccgcgggtttcgtagcctatctcggccctttcaccggacagtatagaacagtcttgtatgacagttgggtcaagcaactgagatctcacaatgtcccccacacaagtgaacctacacttatcgggacattagggaatccagtcaagatccgcagctggcaaattgccggcctaccaaacgatactttgagtgttgaaaatggcgttatcaatcagttttcacagcgatggacacacttcatcgatcctcaatcccaggctaacaagtggataaagaacatggaaaaggacaatggcctggatgtcttcaagctgtctgatagggacttcctcagatctatggagaacgctatccgcttcggaaagccctgccttctagagaatgtgggtgaggaactggaccctgcgcttgagcccgttctgctgaagcagacttacaagcagcagggaaataccgtgctgaaactcggcgatactgtgataccgtaccatgaagacttccgcatgtatatcactacaaagctcccaaatccccattacactccagaaatcagcacaaaactgaccttaataaactttactctgtcgccaagtggcctggaggatcagctgctaggacaagttgttgctgaagagagaccggacctggaggaggccaagaaccagcttatcatcagtaatgcgaagatgcgccaagagctcaaggatatcgaagatcaaatcctgtataggctgagttctagcgagggtaatccagttgatgacatggaattgattaaagtcctggaagccagtaagatgaaagcagccgaaatccaggctaaggtgcgcatagctgagcagacagagaaggatatagatctgaccagaatggagtacatcccggtggccataagaacccagattctattcttctgtgtgagcgacctcgctaatgtggaccctatgtatcagtacagtctggagtggttcttgaatattttcctgtctggaatcgccaatagtgagcgggctgataatcttaaaaagagaatatcaaacataaaccggtatcttacgtacagcctctattccaatgtgtgtagaagcctgttcgagaaacacaaactaatgtttgctttcctcctctgtgtgcgcattatgatgaatgagggcaaaatcaaccagagcgaatggagatacctactgagtggaggctctatctcaatcatgaccgagaatcctgcccctgactggctgagcgatagggcttggcgggatattcttgcactaagcaacctacccacctttagtagcttcagttctgattttgtgaagcatctgagtgagtttcgggtcatttttgatagcttggagcctcaccgggagccgctgcccggaatctgggatcagtacctggatcagttccaaaaactgctggtgcttcgctgcctgcggggtgacaaggtcaccaacgctatgcaggacttcgtcgcgaccaacctggaacctagattcattgaaccacagacagcaaatctatccgtcgtgttcaaagattctaattccactacaccactgatctttgtgctatcacccggcacagaccccgctgccgatctttataagtttgccgaagagatgaaattttcgaaaaaactgagtgccatttccctcggacagggccaaggcccgcgtgccgaggctatgatgaggtctagcattgagcgcggcaagtgggtcttctttcaaaattgccatcttgcaccctcttggatgccagcactggagcgcttaattgaacacatcaacccagataaagtacaccgagactttagactttggcttacatctttaccaagcaacaagttccccgtgtccatacttcagaacggttcaaaaatgactatcgaacctccacggggcgtcagagccaacctccttaagtcctacagttccctgggcgaggacttcctgaacagttgtcataaggtgatggagttcaagtccttgctgctctccctgtgcttgttccatggaaatgctctggaaagacacaaattcgggcctctgggatttaacattccatatgagttcactgatggtgatctgaggatctgtatttctcagctgaagatgttcctggacgaatacgatgatattccttacaaggttctcaaatatactgctggggaaatcaactacggaggacgggtcacggatgactgggatcgaaggtgtattatgaacattctcgaagacttttataatcccgacgtgctgtctcccgagcattcatacagcgcaagtggaatataccaccaaatccctcctacatacgatctccacggttatttatcatacatcaaaagtttgccactgaacgacatgccagagattttcgggctacacgataatgctaatattacctttgcacagaacgagacatttgcactactcggcactatcattcaactacagcctaagtcatcttctgcagggtctcagggtagagaagagatagtggaggacgtgacgcaaaatattctgttaaaggttcccgagcccattaatcttcagtgggtgatggccaaataccccgtgttgtatgaagagagcatgaacaccgtgctggtccaggaggtgatacgttacaacaggctcttgcaagttattacgcagacattgcaggacttactcaaggccctgaagggattggtcgtgatgtcctcgcagctggaactaatggcagcttctctgtacaataataccgtccccgagctctggtctgccaaagcctacccctcgcttaagcctctgagcagctgggtgatggacctcctccagcggctggatttccttcaggcgtggatccaggacggaattcccgcagttttttggatatctggattcttttttcctcaagcctttctaactgggactctccagaactttgccaggaagttcgtgatatcaattgacaccatctccttcgacttcaaagtgatgtttgaagcaccctcagagctgactcagcggccccaggtagggtgttatatacacggtctgttcttggagggagcacgctgggatccagaagcgtttcagcttgctgagtcccagcccaaagagttgtacactgagatggcagtgatttggctcctccctacgcctaacagaaaagcccaggatcaagatttctacctgtgcccaatttataagactctgactagagcaggtacccttagcaccaccgggcactctacaaattacgtgatcgcagtggaaatcccaacccatcagcctcaacgtcactggatcaaacgaggtgtagccctaatttgcgctttggattactag

SEQ ID NO: 186022 - DNA, 13416 bp, synthetic construct
  misc_feature 1..13416: note = Description of Artificial Sequence: Synthetic coding sequence
  source 1..13416: mol_type = other DNA
atggtgcccgaggaggtggaggtggagatcgacgagatccccgtgcttagtgaggagggtgaggaagaggaggagacatatagccagaaagtggagtcagtcgataaagtgagggcaaagagagtgtcacttcggacagagtcactggggcagccactgaaccgagaggatgaagagatggataaggagatttccgaaaagctcccatcgaagcggaccgccaaacacatcatggagaagatgcacttgcacatgttatgtacccctttgccagaagagtttctcgaccagaatgtggtcttctttctgaggaacacgaaagaggcaatttccgaagccactgatatgaaggaagccatggaaatcatgcccgagacactggagtatggaatcatcaatgccaatgtgttgcacttcctgaagaatatcatctgccaggtgttcctgcccgcactcagctttaaccaacatagaacttcgacaaccgttggcgtcacaagcggcgaagtttccaatagttcggagcatgaatccgacctgcccccaatgcctggcgaagctgttgagtaccatagcattcagcttatccgagacgagttcctcatgaatgtgcagaagttcgcctccaatattcagcggacaatgcagcagcttgaaggagaaatcaaactggaaatgcctatcattagcgtggagggagaggtgtccgatctcgcagcagatccagagactgtggacatattggagcagtgcgttatcaactggctgaaccagattagcaccgctgtggaagcccaactgaaaaaaacgccccaaggaaagggccccttggctgagattgaattttggcgtgagcgcaacgccacactgtccgctctacacgaacagactaaactgcccattgtgcggaaagtgttggacgtaatcaaggagtccgacagtatgttagttgccaatctgcagcctgtctttacagaactgttcaagtttcacacagaggcctctgacaatgtacgcttcctgtccacggtggagagatatttcaaaaatatcacccacggctccggctttcacgtggtgttagatactattcccgccatgatgagtgcactccggatggtctggattattagtcggcactataataaagacgagaggatgatacccctcatggaaagaattgcatgggaaatagccgagcgggtgtgcagggtcgtgaatctgcgcacacttttcaaggagaacagggcctcggcgcagagtaagaccctggaggctcgaaacaccctgcgactgtggaagaaggcttacttcgacacccgcgctaagatagaagcaagtgggagggaagacagatgggaattcgacaggaagcggttgttcgaaagaaccgactacatggccaccatttgccaggatctgtccgacgtgctccagattctagaggagttctacaacattttcgggcctgaacttaaggccgttaccggcgaccccaaacgaattgatgacgtgctctgcagagtcgacggtcttgtgaccccaatggagaatttgacattcgatccctttagcatcaagtcttcccagttttggaagtatgtgatggacgaattcaaaatcgaggttttgatagatattatcaacaaaatattcgttcagaatttggaaaacccacctctatacaagaaccacccacctgtggccggagcaatctattgggaacggtccctcttcttccgtatcaagcacaccatcttgcggtttcaggaagtccaggaaattctggatagcgataggggccaggaggtcaagcagaagtacctcgaagtggggagaaccatgaaggagtacgaggaccggaaatatgaacagtggatggaggtaactgagcaggtactgccggcactgatgaaaaagtccctgctcacaaaaagtagcatagccactgaggagccatcgaccctcgagcgcggcgcagttttcgcaataaactttagtccggcacttcgcgaaatcattaacgaaaccaaatacttagaacagttaggtttcaccgttccagaactcgcccgcaatgtcgcccttcaggaagataaattcctcagatacaccgcaggaatccagcggatgttagaccactaccatatgctcattgggaccctcaatgacgccgagagtgttctgctgaaggatcactctcaggagttgttgagggtcttccgctccggatacaaacgacttaactggaacagcctcggcataggggactatatcacgggatgcaagcaagcaatcggaaagttcgaaagcttggtacatcagatacacaagaacgctgacgacatctccagtcggctgaccttaatcgaagctataaatttgtttaaatatcccgctgcgaaatccgaggaagagctgcccggagttaaggagttctttgagcatatcgagagggagagggcttccgatgtagatcacatggtgcgctggtaccttgccatcggccctttgctgactaaggtcgagggcctggtggtccacacgaatacaggaaaggctccaaaactggcctcttactacaagtattgggaaaagaaaatttacgaggtgctcacgaagctgattctcaagaacctgcagtcgtttaactctctgatactcggcaatgtccctctgttccacaccgaaaccattcttaccgccccggaaatcattctacacccaaatacgaacgaaatcgacaagatgtgcttccactgcgttcgtaactgcgtggagataaccaagcactttgtgagatggatgaatggttcatgtatcgaatgtccgccccagaagggcgaggaagaagaggtggtcatcattaacttttataacgatattagcctgaatcctcagatcatcgaacaggccgtaatgattccacagaacgtgcaccgcatattaatcaatctgatgaaatatttacagaaatggaagcgctatcgaccactgtggaaactcgataaagccattgttatggaaaaattcgctgctaaaaagcctccttgtgtcgcctatgacgaaaaactacagttttactccaagatcgcctacgaagtcatgaggcatccactgattaaggatgaacattgtattcgattgcaattgcggcacctcgcaaacacagttcaagaaaatgcgaagtcctgggtcatctccctaggcaagttattaaacgagagtgctaaagaagagctctataaccttcatgaggagatggagcatttggccaagaatttgcgtaagatcccaaacaccctcgaggacctgaaattcgtgctggccacaatcgcagaaatccgcagtaagtccttggttatggaattgaggtacagggacgtgcaggagaggtacaggaccatggcaatgtacaacctgtttcccccggatgctgagaaggagctggtggacaagatcgaaagtatttggtccaatctgttcaacgactcagtcaatgtcgagcatgcactgggggatattaagcgtaccttcacagagttgacccgcggggagattatgaactacagagtgcagattgaagagtttgctaagaggttctactctgagggcccggggagcgtgggcgatgacctcgataaaggcgtggaactgttaggagtgtacgaaagagagcttgcccgccacgagaagtctcgtcaggagctcgctaacgccgaaaaactgtttgatctgcccataactatgtaccccgagttgctgaaggtccagaaggagatgagcggtctgcgtatgatctacgaactttacgagggacttaaagtggctaaagaggagtggagccagacgttgtggatcaacttgaacgttcaaatcctacaagagggaatcgagggattcctgagagccctcaggaagttgccaagaccagtcagaggattgtctgtcacttactatctcgaggctaaaatgaaggcatttaaagactccattcctctgctcttagaccttaaaaatgaggctctgagggacaggcactggaaagaactgatggaaaagacctctgtgttttttgaaatgaccgagacattcactctagagaacatgttcgcaatggaactgcacaaacatacagatgtgcttaacgaaatcgtaactgccgccatcaaggaggttgcaatagaaaaagctgtgaaggagatcctggatacttgggagaatatgaaattcaccgtcgtcaagtattgtaagggaacacaggaaaggggatacattctgggttcagtggacgaaattattcagagtctcgacgacaacacatttaatctccagtctatctcaggctcccgatttgtcggcccattccttcaaaccgtccataagtgggagaagacattaagcctgataggggaagtgattgaaatctggatgctggtacaaagaaaatggatgtatctggagagtattttcataggcggcgatatcagatcccaactaccagaggaagctaagaaatttgataacatcgacaaagtgtttaagagaataatgggtgaaacactgaaagatccggtgatcaagcgatgctgtgaggcccctaaccgcctctcagatctacagaacgtgtccgagggtctggagaagtgccagaaatctctgaatgattacttggactcaaagagaaacgccttccctcggttcttttttatatcagatgacgaactcctgagcattctggggtctagcgatccgttgtgcgtgcaagaacatatgattaagatgtacgacaacattgcttctctccgcttcaatgacggggacagcggagagaagctggtctctgctatgatttcagccgagggcgaagttatggaatttaggaagattctgagggcagagggccgtgtggaggactggatgactgctgttctgaatgaaatgcgtcgcacaaatcgcttgatcacaaaggaagccatattccggtactgcgaggataggtcacgggtggattggatgttattgtaccaagggatggtggttctcgcagcgtcccaggtgtggtggacctgggaggttgaggacgtctttcataaagcacaaaagggtgaaaaacaggccatgaagaattacgggcgtaaaatgcataggcagattgacgagctcgtgaccagaatcacaatgcctctgtccaagaacgatcggaagaagtacaataccgtattaatcatcgatgtgcacgcccgcgatattgtagacagttttattcggggctcaatccttgaggcgagagagttcgactgggagagccagctgagattctactgggaccgcgaacccgatgaactgaacatcagacagtgcaccggaacattcgggtacggatatgagtacatgggcctcaatggacgactggtcatcacacctctcaccgaccgtatttatctcactctgacgcaggccctgtcgatgtatctgggcggcgctcccgccggccctgccggcacaggaaaaacagagactacaaaggatcttgcaaaagccctggggttactctgcgttgttacaaattgtggggaaggaatggactaccgcgccgtaggcaagatcttctcgggtctcgcccagtgtggggcctggggttgctttgacgaatttaacagaattgacgcctcggtgttgagtgtcatttccagtcagatacagaccatccgaaacgctctgattcatcagcttaccacttttcagtttgaaggacaggagatctctttagattcacgtatgggcattttcatcacaatgaaccccgggtatgcagggcggacagaattgcccgagtctgtaaaagctctcttccgcccagtggtggtcattgtgccagatctgcaacagatctgcgagattatgttgttctccgagggctttcttgaggctaagaccttagccaagaaaatgacagtgctctacaagttggcccgagagcaactaagcaaacagtaccactatgattttggcctgcgggcactcaagagcgtattggtaatggccggtgaactcaaaaggggctcctctgacctacgcgaagatgtcgtactgatgcgggctctccgcgacatgaaccttcctaagttcgtcttcgaagacgtgcccttgtttttgggtctgatctctgacctcttccccggactcgactgtccccgggtgcggtaccccgactttaacgatgccgtcgaacaagtgctggaagagaatggctacgcagtcctgccgattcaagtcgataaggtggtgcagatgtttgagactatgctgacaagacatactactatggtagttggtcctacccgtggcggaaagagcgtcgtgatcaacacgctgtgtcaggcgcagacaaaactagggttaaccactaagttgtacatcctaaaccccaaggcggtgagtgttatcgagttgtatggaatactggatcccaccacgcgagactggaccgacggggtcctttccaacatctttagggagatcaacaaacccacggacaagaaagagaggaagtatatactgtttgatggagacgtcgacgcactgtgggtcgaaaacatgaattctgtcatggatgacaatcggcttctgaccttggcaaatggagagcgaatcagactccaggcgcactgcgccctgctcttcgaggtgggggacctccagtatgcatcacctgccaccgtgtctcgttgcggaatggtgtacgtcgatcctaaaaatctgaaatataggccttactggaaaaaatgggtcaaccagatccccaataaagtggaacaatataatttgaacagtctttttgagaagtatgttccctacttgatggacgttatcgtggagggaatcgtggacggtcgccaggccgagaagctaaagacaattgtccctcagaccgacctcaacatggttacacagctggccaaaatgcttgacgcccttctggaaggcgaaatcgaagatctggacctcctggaatgttatttcctggaagccttgtactgtagtcttggggcttccctcctagaagacggtcgcatgaaatttgatgaatacatcaagaggctggcatcactatctacggtcgatacggagggtgtgtgggcaaaccctggggagctccctggccagctaccaacactatacgatttccacttcgataataagcgaaatcagtgggtgccttggagcaaacttgtacctgagtacattcacgcaccagagcgaaaatttatcaatatactggttcatactgtcgacactacacggaccacatggattcttgagcagatggtcaagatcaagcagcccgtcatattcgtgggtgagtccggcacctcaaaaaccgcaactacccagaattttctcaagaacctctcggaggagaccaatatcgtcttgatggttaacttctccagccgtacaacgtcaatggatatccagcgcaatctggaagccaacgttgagaagaggactaaggatacgtatggccccccgatgggcaaacgactgcttgtgtttatggacgatatgaacatgcccagagtggacgagtacggaacacagcagcctatcgccctactgaaattactgttggagaagggctacctgtatgacagaggcaaagagctgaattgcaaatcaatccgggatctcgggtttatcgcggcaatgggaaaagcaggcggagggcggaatgaggtggatccaaggttcatctcgttgttcagcgttttcaacgtgccctttccttccgaggaatcattacacctcatttattcctccattcttaagggtcacacctccacctttcatgagtctatcgtagcagtatctggtaaactcaccttctgtactctggctctttataagaacattgtccaggacttgccaccaacccccagcaagttccactatatttttaatctgcgggacttatcacgcgtgttcaatggcctggtactcacgaaccccgagcgtttccagacggtcgcgcagatggttcgggtttggcggaacgagtgtctcagagttttccacgaccgcttgatatctgagacggataaacagttggtacagcagcacatcggctctctggtggtggagcacttcaaagatgacgtggaagtggtgatgcgagatccgatactgtttggtgacttccagatggccctgcacgagggcgaacctcggatctatgaggacatccaggattacgaggccgcaaaggccctctttcaggagatcctggaggaatacaacgagagcaacacaaagatgaacctggtgctctttgatgatgcgcttgagcacctcaccagggtccataggatcattaggatggatcgtggccacgcactgctcgttggcgtcggtggctctgggaaacagagcctgagtcgtttggcggcattcacggcatcctgtgaggttttcgagatcctgctctctagaggttatagcgaaaacagtttcagagaggatctgaagtccctgtacctgaagttgggcatcgagaacaaagcaatgatattcctgtttacagacgcgcatgtggccgaggaggggttcctcgagctcataaacaatatgctaacatccggtattgtgcccgccctcttctccgaagaggaaaaggaaagtatcctttctcaaattggtcaagaagcactgaaacagggtatgggacctgcaaaggagtcagtgtggcaatacttcgtaaataagtcggccaacaacctgcacatcgtgctcggaatgagcccagtgggcgacacacttcgcacatggtgtcggaatttccccgggatggtgaataatacaggcatcgattggtttatgccatggcctcctcaggcgctccacgccgttgcaaagtcttttctggggtataaccccatgattcccgccgagaacattgaaaacgttgttaagcatgtggtgctcgtacatcaatccgtggaccattatagtcagcagtttcttcagaagctgcgccggtcaaattacgtgacgcccaaaaattatcttgacttcattaacacatattctaagctgctggacgaaaagacccagtgcaatattgctcagtgtaagcgtctcgacgggggtctggacaagcttaaggaggccaccatccagctggacgaactcaatcagaagctcgccgagcagaagatcgtgctggcagaaaagagcgccgcttgcgaagccctgctggaagaaattgccgtcaataccgccgtggccgaggaaaagaagaagctcgctgaagaaaaggcgatggagatcgaggagcagaataaggtcatcgccatggagaaggccgaagccgagaccactttggccgaagtgatgcccatcctggaagcagcaaagctcgagttgcagaagcttgacaaatctgacgtgactgaaattaggtctttcgcgaaacccccgaagcaggtccagacagtttgcgaatgcatcctcattatgaaggggtacaaggagcttaattggaaaaccgccaaaggagttatgagcgaccctaacttcttaagatcactcatggaaatcgacttcgactcgatcacacaatctcaggtgaagaatataaaagggctcctcaagacacttaatacaactaccgaagaaatggaggcagtgtccaaggcgggccttggcatgttgaagttcgtagaggcggtcatgggttattgtgacgtcttccgggagataaagccaaaaagagagaaggttgcccgtctggagaggaacttttatctcactaagagggagctggagcggattcaaaatgaacttgcggcaatccagaaagaattggagaccttgggtgccaaatacgaagctgcgatcctggaaaagcagaaactgcaggaggaggctgagatcatggagagacgcttgattgctgctgacaagcttatctctggactggggagcgagaacattaggtggttaaatgacctggacgagttaatgcatcgaagagtaaagctgcttggggactgcctcctgtgtgccgcattcttgagctacgagggtgccttcacctgggaattccgcgatgaaatggtgaacaggatctggcagaacgacatacttgaaagggaaattcctctctctcagcctttcaggttggagtccctactcaccgatgacgtggagatatctcgatgggggtcacagggcctgcctcccgacgaactgtctgtgcagaatgggattctcaccacacgcgcgtctcgatttccactgtgtatcgacccccagcagcaagcattaaactggatcaaacgaaaggaggagaagaacaatttaagggtcgccagctttaacgaccctgattttttgaaacagctcgaaatgtccattaagtatggtactcctttcttgttccgggacgtcgatgaatatatcgatcctgtaattgataatgtcctcgagaaaaacatcaaggtaagccagggtaggcaattcataattctcggcgataaggaggttgattacgacagcaattttcgcctatatttgaacaccaagcttgcaaacccacgctactctccttccgtgttcggcaaggctatggtcattaattacaccgttacactgaagggcctagaagaccagttgctcagcgtcctggtggcctacgagaggagagagctggaggagcaaagggagcatctgatacaggagacttctgaaaataagaacctgttgaaagatctggaagactctttgttaagggaattggccaccagcactgggaacatgctggacaatgtggatttagtccacaccctcgaagagacgaagagcaaagccacagaagtgtccgaaaaactaaaactggcagagaaaaccgcgttagacattgacaggctgagagacggttaccgtcccgctgcaagacggggagctatcctctttttcgtgctgagcgaaatggcccttgtcaacagcatgtaccaatactcccttatagccttccttgaggtatttcggctaagtcttaaaaagtccctgccggatagtattctgatgaagcgacttagaaacataatggataccttgacattcagcatatacaatcacggctgcaccgggctcttcgagagacataagctattgttcagcttcaacatgaccattaagattgaacaggcagaaggacgcgtgccacaagaggagctggactttttcctcaagggtaacatctcccttgaaaaaagcaaaaggaaaaaaccttgcgcatggctctccgatcaaggctgggaagatattattcttctgtccgaaatgttttctgacaatttcggacagctccccgatgacgtcgaaaataaccagactgtctggcaggagtggtatgacctcgacagcttggagcaattccccgtacccctggggtatgataacaatattaccccctttcaaaaactcctgattctccgctgcttccgagtcgatcgggtgtacagagcggtaactgattatgtgaccgttactatgggcgaaaagtacgtgcagccccctatgattagcttcgaggctatttttgaacagtctacaccccatagccctatagttttcatcctcagccctggttcagatcccgccacagacctcatgaagctggcagaacggtcaggattcggtggaaataggttgaagttcctggccatgggccaggggcaggagaaggttgcccttcaactacttgaaactgctgtcgcacggggtcagtggctaatgcttcagaattgccatcttctggtgaagtggctgaaggaccttgaaaagtcactcgagaggatcactaagccccatccagattttcggttgtggctgactaccgacccaacgaagggattccccataggcatcctacagaagtccctcaaggtggtgaccgagcctcccaatgggctgaagctcaatatgcgcgcaacgtactttaagattagtcacgagatgctggaccagtgtcctcaccccgctttcaagcctctggtgtatgtacttgcatttttccacgccgtcgtgcaggaacgcagaaaattcgggaagatagggtggaatgtgtactacgattttaatgagtcggactttcaggtgtgtatggaaattttgaacacctacctcacaaaagcgttccagcaacgtgatccaagaattccttggggcagcttgaagtacctaatcggtgaagtcatgtacggcgggagagcaatcgacagcttcgaccggcgcatcctgacaatatacatggatgagtacttaggagactttattttcgatacatttcagccattccacttctttcggaacaaagaggtagattataaaatccctgttggcgatgagaaggaaaaattcgtcgaggcgatagaggccctgcccttggcaaacactccagaggtctttggcctgcacccaaacgctgagattggatactatacgcaggctgcgcgcgatatgtgggcccacctcctagaactccaaccgcagacgggcgaaagttcctctgggatctccagagacgattacatcggtcaggtggccaaggaaattgagaacaagatgcccaaggtttttgacctcgaccaggtaaggaagaggcttggaactgggctgtcaccaacttccgtcgtcttgctccaggagctggagcggtttaacaaactggttgtacgaatgactaagagcttagctgaactgcagagagcgctggctggcgaggtgggcatgtctaacgagctggatgatgtggcccgctccctgtttataggccatattccaaatatatggcgacggctcgcacctgatacactaaagagcctgggcaattggatggtttatttccttaggcgcttctcacagtatatgctctgggtgacggagagcgagccatcagtaatgtggctgagtggcttgcacattcctgaatcatacctgacagccctcgtccaggccacttgccggaagaacggttggcccctggatcgatccaccctctttacgcaggtgacaaagttccaagatgctgacgaagttaatgagcgagccggccagggatgttttgtgtctggtctgtatctggagggggccgactgggacatcgaaaaagggtgtctgattaaaagcaaaccaaaggtgttggtcgttgatctccccatccttaagattatcccaattgaagcacatcggctcaaacttcagaacaccttcaggacacccgtgtacaccaccagcatgagacgaaacgccatgggtgtggggctggtgtttgaagcggacctgttcaccaccaggcacattagccattgggtcctgcagggtgtatgcttaacactcaattctgattag

SEQ ID NO: 186023 - DNA, 13572 bp, synthetic construct
  misc_feature 1..13572: note = Description of Artificial Sequence: Synthetic coding sequence
  source 1..13572: mol_type = other DNA
atggccgcccaggtggccgcccgggaggcccgggacttccgggaggcccctactttgaggctgacgtctggcgctggactcgaggccgtgggcgccgtcgaacttgaagaagaggaagagaatgaagaggaggctgcagcccggcgagcgagaagcttcgcccaagatgcgcgcgtccggtttttaggaggccgcttagctatgatgctggggtttactgaagagaagtggtcccagtacctcgaatccgaggataaccgacaggtgctgggagaatttctggagagcactagtccggcctgtttggtattctcatttgctgcctctggcagacttgccgccagccaggagataccccgcgatgctaatcacaagctcgtgtttatctctaagaagatcaccgaaagtatcggtgtcaatgacttcagccaagtagttctttttggtgaattgcctgcgttgtccctgggccatgtcagcgcattcctcgacgagattctggtcccagtactctcaaataagaacaaccacaagagctggagctgtttcaccagccaggacatggaataccacatcgaggttatgaaaaagaagatgtatatctttagggggaagatgtcacggcgcaccctgttaccgatcccaaccgtcgctggaaaaatggacttagatcaaaactgttctgagaacaagcccccgtccaatgagcgcattatcttacatgccatcgagtctgttgttatcgagtggtcccaccagatccaggagatcatcgagagggattcagtacagcgcctacttaacggactccacctgagcccccaagccgagctggatttttggatgatgagaagggaaaatctgtcctgtatctacgaccagctgcaggcacctgttgtgctcaagatggtcaaaatccttaccactaaacaatcatcatatttccccacgttgaaagatatctttctggccgtggaaaatgccttgctggaagcccaggatgtggagctgtacttgcgacctcttcggaggcacatccaatgtctacaggagacggagtttccgcaaacgagaatcctcattgcacccctatttcatacaatttgtctgatatggtcacatagcaagttttataacacccccgcgagggtcatcgtcttacttcaagagttttgcaacctgttcataaatcaggctaccgcatacctttcgcctgaggatcttctcaggggggaaatcgaggaaagcctggaaaaggtgcaggtggccgtgaatatactgaaaacctttaaaaactcctttttcaactacagaaagaaacttgcttcatacttcatgggacgcaaactgcggccatgggatttccaatctcacctcgtgttttgccggttcgacaaatttttagaccggctgatcaagattgaagatatttttgccaccacactcgagtttgagaagctggaacgcctcgaattcggcggtaccaagggggctattctgaacgggcaagtgcacgagatgtctgaggagcttatggagctgtgcaaattattcaagcagagcacctacgaccccagcgactgcacgaacatggagttcgagtctgattatgtggcctttaagtctaagacgcttgagttcgatcgccgcttagggaccattatctgcgaggccttttttaactgtaacggcctggaagcggcttttaagctgctcacgatctttggaaattttttggaaaagcccgttgttatggagattttttcccttcactactccaccttagtgcacatgtttaatactgagttggacgtgtgcaagcagctatataacgaacatatgaagcagatcgagtgtggccatgtcgtccttaacaagaatatgccctttacctctggaaacatgaaatgggctcagcaggtgctccaacgacttcaaatgttctggagtaatttcgccagtctgagatatctgttcttaggcaatccggaccatgctctggtgtaccagaaatacgtcgagatgaccaccctactggaccaattcgaaagcagaatttataacgagtggaagagcaatgtagatgaaatttgtgaattcaatctcaatcagccactggtgaagttctcagccattaacgggctgttgtgtgtgaacttcgaccctaaattagtggctgtcctgcgagaggtcaagtatctgctcatgctgaagaagcaggacatacccgactctgctctggctatcttcaaaaaacgcaataccatcttgaaatacatcggcaacctagacctgcttgtacaggggtataacaaactcaaacagacactcctcgaagtggagtatccactgatcgaagatgaattgcgcgctatcgacgagcaattaacagctgccacaacatggcttacctggcaggacgattgttggggatacatagagagggtccgagccgcaacatccgaactggagcaccgggtggaacggacacagaagaatgtgaaggtaatccaacagactatgcgaggatgggcccgatgcgtgcttcccccgcgccgagagcatcggcgggaggccgccttcacactagaagacaaaggcgacctattcacaaaaaaatataaacttatacagggcgacgggtgtaaaattcataatctggtcgaggaaaataggaagttgtttaaagcaaatccctccctggacacctggaagatttatgtcgagtttatcgatgacatagtggtggagggcttcttccaggccattatgcacgacttggacttcttccttaagaatacggagaagcagctcaaaccggctccatttttccaggcgcagatgatacttctgcctcctgaaatcgtctttaaaccttccctggacagggaagccggggatggtttttacgatctggtggaagaaatgctttgcaatagctttcggatgagcgcgcagatgaatcgcattgccacacatctggagattaaaaattaccagaatgatatggataatatgctcggtctagccgaagtgcggcaggaaattatgaaccgagtcgtgaatgttattaacaaagtgttagacttcagaaatacacttgagactcacacatatctctgggtcgacgaccgtgcggagtttatgaagcatttcttactctatggtcatgccgtgtcctccgatgaaatggacgctcatgccaatgaggaaattccggagcagcctcctaccttggagcagtttaaagagcagatcgacatctatgaagctctgtacgtacaaatgtcgaaatttgaggattttagagttttcgacagctggtttaaagtcgacatgaagcctttcaaagtctctctcctgactatcattaaaaagtggtcctggatgttccaggagcatcttctgaggttcgtgatcgacagcttgaatgaattgcaggaattcattaaggagacggactcggggctccagcgggaacttaacgaaggcgaccacgatggtctggtcgatatcatggtccacctcctggccgtgagatctagacaacgcgctaccgatgaattgtttgagcctctgaaagagacaatcaccctgctcgaaagttacgggcagaaaatgccagagcaagtgtatattcagctagaagaactaccagaaagatgggagaccacgaagaagatcgcagccaccgtgcggcacgaggtcagcccccttcacaatgcggaagtgacactcataagaaaaaaatgtatcctctttgacgcaaagcaggccgagtttcgcgagcgctttaggcactatgctcctctgggtttcaatgctgaaaacccctacactgctctggacaaggctaacgaagagctggaagcactggaggaggaaatgttgcagatgcaggagagcactagactctttgaggtcgcccttcctgagtacaagcagatgaagcagtgcaggaaagaaataaagctgctcaaaggactgtgggacgtgattatttacgtccggcggtccatagacaactggactaaaacacagtggagacaaattcacgttgagcagatggatgtcgaattgaggagattcgcaaaggctagtagtattacagaaatttggagcctaaacaaagaagtgagagtgtgggacgcatacactggcctggaaggaacagtgaaggatatgaccgctagtctgcgtgccataaccgaactacagagcccagccttacgcgaccggcactggcaccaattaatgaaggccatcggagttaagtttctgatcaacgaggccaccaccttagctgaccttctggccctcagactgcacagagttgaggacgatgtgcggcggatcgttgacaaagccgtgaaggagctggggacagagaaggtcatcactgaaatctctcaaacttgggccactatgaagttctcttacgaggtgcattaccggaccggaatccctctgcttaagtcagacgaacagcttttcgaaacactcgaacacaaccaggtccagctccagaccctgttacagagtaagtacgtcgagtatttcattgagcaggtcctatcctggcagaacaaacttaatatcgcggatttagtaatctttacttggatggaggtccagcggacctggtcccacttggagtccatctttgtgtgctcagaagatattcgaatccaacttgtcaaggatgcaagaaggttcgacggggtggatgccgagtttaaggagcttatgttcaagaccgccaaagtggagaacgtattggaggctacctgtagacctaatttatatgaaaagttgaaagacctgcagtcaagactgtctttgtgcgagaaagccctggcggagtacttagagaccaagcgcatcgctttccctagattttacttcgtaagctcagcagacctgttagacattttgtctaagggggcccagccaaagcaggtcacctgccacttggccaaacttttcgactccatcgctgatctgcagtttgaggataaccaggacgtttccgctcatcgggctgtgggaatgtatagtaaggagaaagagtacgtgccattccaagccgagtgtgagtgcgtgggccatgtagaaacatggttgcttcagctggagcagaccatgcaggagaccgtgagacattccatcaccgaggccatcgtggcctacgaggaaaaaccccgggagctttggatattcgacttcccagcgcaggtggctctaactagtagtcagatctggtggactactgatgtggggattgccttctccagattagaagaaggatatgagaccgctctgaaggatttccataagaagcagatcagtcagctcaacaccctcatcacactcctgttaggcgaactcccacctggggacaggcaaaagatcatgacaatatgtacaatcgatgttcacgccagagatgtagtagcaaagctcatcagccagaaacaggtggtcgtgagtccacaggcgtttacttggctctcacagctccggcacagatgggaggacactcagaaacattgctttgtaaatatctgtgacgctcagtttcagtacttctacgagtacctcggtaattcaccacggctagtcatcactcccttgacagatcgttgttatatcacgttaactcaatcccttcatctcactatgtccggagcaccggccgggcccgccggcaccggcaagactgagactaccaaggacctcggccgcgcactagggatgatggtgtacgtgttcaactgcagcgagcagatggactacaagtcaattgggaacatctataaagggctggtgcaaacgggtgcttggggctgctttgatgagttcaaccgcatatcggtcgaagtgttatccgtggtggcggtacaggtcaagatgatccacgatgccattcgcaatcgaaaaaagcggttcgtgttcctcggagaagctatcacactcaagccctccgtaggaatctttatcaccatgaatccaggctatgccggtaggacagagctgcctgaaaatctcaaagcactattccgtccgtgtgccatggtggcacccgacatcgagctcatctgtgagattcttctggtcgccgaagggttcgtggacgcaagagccttggctcggaaattcattacattatatacattatgcaaggaactcctctccaaacaggaccactatgattggggcctcagagccataaaatccgtcttggtggtggctggcagcctgaaacggggtgacaagaaccgcccagaagatcaggttctgatgcgagccctgagagattttaacatgcccaagattgtgacagatgacataccggtgttcctgggactggtcggtgacctcttccccgcgcttgatgtccctaggcgccgtaagttacatttcgagcaaatggttcggcagtcaactcttgagttgcgcttacagcctgaggagtcatttattttgaaggtggtacagttagaggaacttctggcggtacggcacagcgtgtttgtggttgggaatgcagggacaggcaagtcaaagattctgcgcaccttaaaccgaacctatgtgaacatgaagcagaaacccgtctggaacgacctgaacccaaaggcagtgaccaccgacgaattgtttggatttatccatcacgcaacccgggagtggaaggacggcaaaatcgtctatagttatttcataggactcttctcatcaatccttcgcgagcaagcaaatcttaaacacgatggcccgaaatggattgtacttgatggagatatcgatcccatgtggattgagtccttgaatactgtaatggatgacaacaaggtcctgacgttggcctcaaatgagcggattgcccttacaccatttatgcggctgctgtttgagatacatcacctgcgcagcgccacgcccgcgactgtgtctagggcaggaatactatatgtgaatcctcaggacctgggctggaacccatacgtggcctcatggatagatcgcagacggcaccaaagtgagaaggccaacctcaccatcttatttgacaagtacgtccccgcatgtctagataagctgcgaaccagtttcaaaaccatcacaagcatcccagaaagctcactcgtccagacgctttgtgtgctgttggagtgtctgctgacccccgagaacgtgcccagcgactcacccaaagaggtatacgaggtctatttcgtgttcgcctgcatttgggcgtttgggggtacactactgcaggatcagatctccgattaccaggccgacttcagtcggtggtggcaaaaggaaatgaaggctgtgaagtttccaagtcagggcaccatttttgactactacgtggatcacaagactaaaaagctgcttccttgggccgacaagattgcacagtttactatggatcccgacgtgccacttcagactgtgctggtccacaccactgagacagccaggctgagatacttcatggagctgctcctggagaagggcaagccgctgatgttagtgggaaacgcaggtgtaggaaagacggtgttcgtgggcgacacacttgctagtttgagcgaagactatattgtctcaagagtgccattcaactattatacaacctccactgccctgcagaaaatactggagaagcccctggagaagaaggccgggcacaactatggcccgggcggcaataaaaagctaatttatttcatagacgatatgaacatgcccgaggtggacttgtacggtacggtgcagccccacaccctcattaggcaacacatcgattacgggcactggtacgacaggcagaaagtaatgctcaaggaaatccataattgccagtacgtggcgtgcatgaatcctatggtgggttctttcaccatcaacccacgtttacagcggcactttaccgtgttcgccttcaactttccatccctggatgccctcaataccatatacgggcagattttcagcttccactttcaacagcaggccttcgctccaagcatcctgcgcagcggaccaactctgatccaagcgaccattgccttccatcagacgatgatgtgtaacttcttacccaccgcaattaagttccactacattttcaacctacgggacttgtcgaacgttttccagggcattttgttcgcttcccctgaatgcctcaagggtccgctcgatttgatccacctgtggctccacgaaagcgctagagtgtatggagacaagctgatcgataagaaagactgcgatttatttcaacggcgcatgctcgaaactgcgtataagtactttgaaggcatcgactcacatatgctcctgcaacaaccactgatctactgtcactttgctgacagagggaaagatccgcattatatgcctgtcaaagactgggaagtgttgaagacaattttgacagagacactggacaactataatgagcttaacgctgctatgcatcttgtactctttgaggacgctatgcaacatgtctgcaggatcagtcgaattctgagaacccctcagggatgtgcactcttagtgggagtcggcggcagcggaaagcagtctctgagcaggctggctgcctacttgaggggcctggaagtattccagatcaccctcacagaaggttacggcattcaggagctcagagtcgaccttgcgaatttgtacattcggacaggggcaaagaacatgcccacagtttttcttttgactgacgcccaggtgttggatgagagtttcctggtactcatcaatgacctcctggcaagcggcgagatccctgatttgttctcagatgaggacgtcgataagataatctccgggatccacaacgaggtgcatgcgttggggatggtcgattctagagaaaattgttggaaatttttcatggccagagtaagactccagctgaaaattattctctgtttctctcctgtaggccgcaccttgcgggtgagggcacgcaaatttcctgccattgtcaattgtaccgctatcgattggtttcatgcctggccccaggaagccttagtttctgtctctagaagatttattgaggagaccaagggcatcgaaccagtccataaagacagtatttctcttttcatggcccacgtgcatactaccgtcaatgagatgtcaacgcgctattatcagaatgagaggcgtcataactacaccacacccaagagttttctagaacagatctccctattcaaaaatctccttaagaagaaacaaaacgaagtgtccgaaaagaaagagcggctggttaacggcatacagaaacttaaaaccaccgcctcccaggtgggggacctgaaggcccgacttgccagccaagaagccgaattgcagctgcgcaaccatgacgcagaggccctgataaccaagatcggcttacagacggaaaaggtgtcacgggaaaaaacgatcgcggacgctgaagagcgcaaggttactgcaattcaaacggaggtgttccagaagcagcgagaatgtgaggccgatctgctgaaggccgagccagcgctcgttgccgcaacagctgccctgaacacgctgaatagggtgaatctgtccgaactgaaagcctttccaaacccacctattgccgttactaacgtgactgccgcagtgatggtgctgctcgcccccaggggcagggtgcctaaggataggtcatggaaggctgccaaggtgttcatgggcaaagtggacgattttctccaggccctgattaactacgacaaggagcatatcccagaaaactgcttgaaggtggttaacgaacattacttaaaggaccccgaattcaatccaaacttaatccggacaaaatccttcgcagcagccgggctttgtgcttgggtaatcaacataattaaattttacgaagtgtactgtgacgtcgaacccaaaaggcaagccttggcacaagcaaatctagagctggctgctgccactgagaaattagaggctatcaggaagaagctcgtcgatctggacagaaacctcagtagattgacggcatcattcgaaaaggctaccgccgagaaggtgcgctgccaagaagaagttaaccagacaaacaaaactataaagctcgccaatcgcctggtgaaagaactcgaggctaagaaaatcagatggggacagtcgattaagtcctttgaggcccaggagaaaacactttgtggcgacgtgctgctgacagccgcctttgtctcgtacgttggtcctttcaccagacagtacagacaagaactcgtgcactgcaaatgggtgcctttcttacagcagaaagtgagcatcccattaacagagggcctggaccttatttccatgctgacagacgatgcaacgatagccgcatggaataatgaaggcttaccctccgataggatgtcaacagagaatgcagcaatcctcacgcactgcgaacggtggcccctggtgatcgatccccaacagcagggcatcaagtggatcaagaataagtatggcatggatctgaaagtgacacacctagggcagaagggcttcttgaacgcaatcgagacggctttagcctttggcgacgtgatcctgatagaaaacctggaagaaactatcgaccctgtactggatcctctcctggggcggaatactataaagaaaggcaagtacattaggattggcgataaagaatgtgagtttaacaagaattttcgactcatcttacatacaaaacttgccaatccacactacaagccagaactgcaagctcagaccacgctgttaaattttaccgtgacagaagatggcttagaagctcagctgttggcagaggttgtgagtatcgagcgacctgatttggagaagctgaaactcgttctaactaagcatcagaacgactttaagatagagttgaaatacttagaagacgacctcctgctaaggttatccgccgccgaaggttcttttttggacgatacaaagctggtcgagcggttagaggctacgaagacaacagtagctgagatcgagcataaggttatcgaggctaaggaaaacgaacgaaaaatcaatgaagcccgggaatgctatagacctgtcgccgcaagggcttccttgctctatttcgtaattaacgatctgcagaagattaatcccttgtaccagtttagcctcaaagcttttaatgtgctgttccatagggccattgaacaggccgataaagtggaagacatgcaagggagaatctccatcttgatggagagtattactcatgctgtgtttttatacacctcacaggcgttgttcgagaaagacaagctaactttcctatctcaaatggctttccagatccttcttagaaaaaaggagattgaccccctggagctggacttcctccttaggtttacagtcgagcatacacatttatccccagtcgacttccttacaagccagagttggtctgccataaaggctatagcagtcatggaagagtttcgagggatcgacagagacgtggaagggtcagctaagcagtggcggaagtgggtcgaaagcgagtgtccagagaaagaaaaactcccccaggagtggaagaaaaagagtctgatccagaagctaatactactgagagcgatgaggccggatcgtatgacatacgctctccgcaactttgttgaggaaaaactgggagcaaagtatgtagaacggaccagacttgatctggtgaaggcctttgaggagtcttctcccgcaactccaatatttttcattcttagcccgggcgttgacgcgctgaaagacctggagatactggggaagcgccttgggtttaccatagattccggcaagttccataatgtgtctctcggacagggccaggagacggtggcagaagtggctctcgagaaggcaagcaagggaggacactgggtaatcctgcagaatgtacacctcgtggcaaaatggctggggaccttagagaagctcctggagcgttttagccagggctcgcatagagactacagggtgttcatgagtgccgagtcagcacctacccccgacgaacacattataccccaggggctgcttgaaaacagcatcaagataacgaatgaaccgcccaccgggatgctggccaaccttcacgccgctctgtataacttcgatcaggatacccttgagatatgcagtaaggagcaggagttcaagtcaattttattctccctctgttacttccatgcatgtgtggctggcaggctcagattcggaccacaggggtggagccgctcgtatccttttaaccctggcgacctcaccatctgcgccagtgtgctctacaattatctggaggccaatagcaaggtcccctgggaagacctgagatacttattcggtgaaataatgtatggagggcatatcactgacgattgggaccgtaaactttgcagagtgtatctggaggagttcatgaatccctctctgactgaggatgagctgatgctcgcaccaggcttcgctgcccccccttacctcgactacgccgggtatcaccaatacatcgaagaaatgctgccacctgagagccccgccctgtatggcctccaccccaatgccgagatcgagttcctgaccgtcacctctaacacactgttcagaactctgttggagatgcagccacgcaacgccctatccggagacgagcttggtcagtccactgaggagaaggtgaaaaacgtcttggacgacatcctggaaaagctccctgaggaatttaacatggcagaaattatgcagaagaactccaaccgctccccctacgtgttggtgtgctttcaggagtgcgagcgcatgaacatcctgattcgggagataagaatctccctggagcagctcgatctgagcctgaagggcgagcttgctctctctccagcagtcgaggcccagcagtttgcactcagttacgacactgtgccagatacttggagtaagttagcatacccttcaacatatgggttggcacagtggttcaatgatttactgctcagatgccgagagctggacacttggactcaagatctgacccttcccgcggtagtctggctctctggcttcttcaatccacagagctttcttacggcaatcatgcaaactatggcccgcaaaaacgagtggcctctggacaagacaaggctaaccgcagatgtaacaaagaagaccaaggaagattacggccatcctcctcgagagggcgcatatctgcacggcctcttcatggaaggagcacgctgggacacacaggccggcaccatagtggaggccagactgaaggagctggcatgccctatgccagtgatttttgctaaggccacccctgttgatagacaagagaccaaacagacttacgagtgccccgtctatagaacaaaactccgcgggccctcctacatatggacatttcggttgaaaagtgaagaaaagaccgccaaatgggtgctggccggtgtggccttgctgcttgaagcctag

SEQ ID NO: 186024 - DNA, 1374 bp, synthetic construct
  misc_feature 1..1374: note = Description of Artificial Sequence: Synthetic coding sequence
  source 1..1374: mol_type = other DNA
atgagcgacgccaacaaggccgccatcgccgccgagaaggaggccctcaacctgaaactcccaccgatcgtgcacctgcctgaaaacattggtgtggacacgccgacccaaagcaagctgctaaagtaccgaaggagtaaagaacagcagcagaaaattaaccagctggtgatcgacggggcgaaacggaaccttgaccgcaccttgggtaagcggacgcctctgttgcctccccccgactatccccagacaatgacttcagaaatgaaaaagaaaggatttaattacatctatatgaagcaatgtgtagaaagtagtcccctagtgcccattcagcaagaatggctggaccacatgttgcggttaatcccagagtcactaaaggaaggtaaagagagagaagaactcctcgagtccttgattaatgaggtgtctagcgactttgaaaactccatgaagaggtacttagttcaatcagtactggtgaagccaccggtcaaaagtctggaggacgaagggggcccccttcctgaatcgcctgtgggcctggattacagtaatccttggcactccagttatgtccaggcacggaatcagatcttttccaatcttcacataattcaccctactatgaaaatgctgctggatctaggctatacgaccttcgccgacaccgtcctgctggattttaccggcattagagctaagggacccatcgactgtgagagtctcaaaaccgatctgtccatccaaaccagaaacgccgaggaaaagattatgaacacatggtaccctaaggtgattaacctgttcaccaaaaaggaagcactcgaaggtgtcaagcctgaaaagctggatgcattctacagctgtgtgagcaccttgatgagcaaccagctaaaggacttactgaggcgcacagtggagggcttcgtaaaactgttcgacccaaaggatcagcagagactgcccatcttcaaaattgagctaacctttgacgacgataagatggagttttatcccaccttccaggacttggaagacaacgtcctgtctctcgtggagcgtattgccgaagcactacagaatgttcagactatcccctcttggctgtctgggaccagcacacctgtaaaccttgataccgagctgcctgagcacgtcctgcactgggctgtagacacattgaaggctgcagttcaccgaaatctggaaggcgccaggaaacattatgaaacatacgttgaaaagtataattggttattggatggcacggctgtagaaaacattgagacgttccagaccgaggatcacacattcgatgagtacacggaagaactggactgttgggtggtctgggaggtgtacttctag

SEQ ID NO: 186025 - DNA, 2040 bp, synthetic construct
  misc_feature 1..2040: note = Description of Artificial Sequence: Synthetic coding sequence
  source 1..2040: mol_type = other DNA
atgttcctgctgaccggcggcgtgagcctgaagagcgccgagaagaacccggacccaacttggctgcaggacaagtcctgggaggaaatctgtagggcctccgagtttcctgccttccggggtttgcggcagcacttttgcgaacacatttatgaatggagggaaatctacgacagcaaggagccccacaatgctaagtttcccgcgcctatggacaagaatctcaacgagttacaaaaaattattatcctgaggtgcctgcggccagataaaatcacccccgcaataaccaactacgttacagacaagctaggcaagaaattcgtcgagccgccaccattcgatctaaccaagtcatacctggactcaaactgtacaatcccccttatcttcgtgctgtcaccaggagcagacccaatggcctctctgcttaagtttgcaaatgacaagtctatgtccgggaacaagttccaagccatttctctcggacagggccaaggccctatcgccgctaagatgatcaaggctgctatcgaggaaggaacatgggtctgcctgcagaactgtcacctggccgtgtcctggatgcccatgctggagaagatctgtgaagatttcaccagcgagacatgtaacagctcctttcggctgtggttgacgagttatccatcctccaagtttcctgtgactatcctgcagaatggcgtgaaaatgacgaacgaacctcccacagggctgagactgaatttgctccagagctacctcaccgacccagtgtctgatcccgagtttttcaagggatgccgagggaaagagttgctgtttataaatgaatatgataccattccctttgaggctattagttacctcacaggcgagtgtaactacggcgggcgggttaccgatgattgggaccggagactactgctgactatgctcgccgatttctataatttgtatattgttgagaatccgcattataagtttagtccatccggaaattatttcgctccacctaaaggtacatacgaagactatattgagttcattaagaagttgccatttacccaacatcctgaaatcttcggcctgcatgaaaatgttgacatctcaaaagatcttcagcagacaaaaacactatttgaatcattgctgctgacccaaggcggctcaaagcaaaccggcgcatccggcagtaccgatcagatcctgctagaaattaccaaggatatactaaacaaattgccctcagatttcgatattgagatggcactgcgcaagtatccagtccgctacgaggagagcatgaataccgtgctggtacaggagatggaaaggttcaacaacctgattattacaatcagaaatactctccgcgacctcgaaaaggcaataaagggagtggtcgtgatggatagcgcactggaagcactgtcggggagtctgctggtgggcaaagtgccagagatctgggccaagcggtcctaccctagccttaagcctctgggttcctacataaccgacttcctggctcggcttaacttcctccaggactggtacaacagcgggaaaccatgcgtgttttggctgagtgggtttttttttactcaggcattcctgacgggcgctatgcagaactacgcacgcaagtacactaccccgatcgatttgttggggtatgaattcgaggtgatccccagtgacacctcagacacctcccccgaagacggagtctatattcacgggctttacttggatggagccaggtgggacagggagtctggcttattagccgaacagtatcccaagttgctgttcgacctcatgcccattatttggatcaaacctactcagaaaagtagaatcatcaagtccgatgcttatgtctgccccctctacaaaacttccgaaagaaaggggacgctttcaaccacaggtcatagcacaaatttcgtgattgccatgctgcttaaaacagatcagcccacaaggcactggattaaacgaggtgtcgcactgctctgccagctggacgactag

SEQ ID NO: 186026 - DNA, 9279 bp, synthetic construct
  misc_feature 1..9279: note = Description of Artificial Sequence: Synthetic coding sequence
  source 1..9279: mol_type = other DNA
atgagcgacgccaacaaggccgccatcgccgccgagaaggaggccctcaatctcaagttaccccccatcgtgcatctgcctgagaatattggcgtggataccccaacccagtccaaattgttgaagtatcggcgatctaaagaacaacaacagaagattaaccagctcgtaattgacggcgcgaagcgtaacctcgaccgcaccctaggaaagcggactcccctgctgccccccccggactatccacagactatgactagcgaaatgaagaaaaagggatttaactacatatatatgaagcaatgtgtcgagtcatctccgcttgtccccatccagcaggagtggctggaccacatgctacgactaatccccgagagtctgaaagaagggaaggaacgggaggagctgctggagtctctgatcaacgaggtgtcatccgacttcgagaatagcatgaagcgctacctggtccaatccgtcttagtgaagccccctgttaaatcgctggaagacgagggcggaccactgcctgagtctccagtgggtctggactattccaatccctggcactcctcttatgtgcaagcccggaatcagatcttctccaatctccacattatccaccctaccatgaagatgcttctagacctaggctacactaccttcgctgacactgtgctgttggactttacaggtattcgtgcgaagggtcccatcgactgcgagtccctgaagaccgacctgtctatccagacaagaaatgccgaggaaaagataatgaacacctggtaccctaaggtcatcaacctatttacaaaaaaggaagcactagaaggcgtcaaaccagaaaagctggatgccttttactcttgtgtgtcaaccctgatgtctaaccagttgaaagacctcctgaggcggaccgtggaaggatttgtgaagctgtttgaccccaaggaccagcagaggctgccgatttttaagattgagttgacattcgatgacgacaaaatggaattctaccctacgtttcaagaccttgaagataacgtgctgagcctagtagagcgaatcgctgaggctctccagaacgtacagaccatccccagctggctcagcggcacatctacgcccgttaacctcgacaccgaactcccagaacacgtactgcactgggccgtggacaccctaaaggccgccgtacaccgtaatctggaaggagcacgcaagcactatgaaacttacgttgaaaaatataactggttgctggacggtacggccgtcgaaaacattgagacattccagacagaggatcatacttttgatgagtatacagagttcatcgaaaaattcctgtctctcgctagcgagatcatgctgctcccacagtggattcattataccatggtgagacttgattgcgaggatcttaagaccgggctcaccaacaaagctaaggcctttgcaaatatcttattgaacgacattgctagcaagtaccgcaaagagaacgagtgcatctgcagcgaatttgaggcaattaaagagcatgccctgaaagtacctgaaacaactgaagagatgatggacttaatctcgtatgtcgaaaaagccagaacagttggcatcgaggaactcatcttaaggatacaggagtctaaaaggcaaatgtcctatttcctagacgtattcctgttcccccaggaggatttagccctgaatgctactgtgctgatgtggcctagaaagatcaatcccatttttgatgaaaacgacgagcttatcgagaacgccaagcacaagaaagaaaatgaactcatggctaaacgcgagaagctgattctcgaaatcgagaaagagtctcggagaatggaggaattcactgagttcgcggagttggagaggatgcaacagtacgttaccgacgtgcgccaattgcaaaaaaggatccaagagagcgaagaggccgtgcagtttattaacaaagaggaagagctcttcaaatgggaacttaccaaatatcccgagctggacaagctcaaagttaacatcgaaccataccaaaaattctttaattttgtgctcaagtggcagcgctctgagaaaaggtggatggacggtggcttcctagacttgaacggcgaatctatggaggcggacgttgaagaattttcaagggaaatctttaagactctcaaatttttccagacaaagctgaaaaaagagctgcaggaaaaaagaaaggccgcccgcaaacgtagtctggaggaggaaaagatcgaagaggaaccaaaagacaatgctacaatcactatgtgtaggatgcgtgcccggcactggaagcagatctctgagatcgtgggctatgatctcactcccgatagcggcactaccctccggaaggtgcttaaacttaacctcaccccctatctggaacaatttgaagtgatctccgcaggcgcctccaaggagtttagtctagaaaaggccatgaacactatgatcggcacttgggaggatatcgccttccacatttctctctacagagacactggagtttgcattcttagcagtgtggacgaaatacaggccattctggatgaccagatcattaagacccagaccatgagggggtctccctttattaagccttttgaacacgaaataaaggcctgggaggataggttgattaggatccaggaaacaatagacgagtggctgaaggtacaggcccagtggctgtaccttgagccaatcttttgctctgaagacatcatgcaacagatgccggaggaggggcgtcagttccaaaccgtggatcggcactggagagacataatgaagttttgcgctaaagaccctaaagttttagccgcaacctccctgaccgggttgctggagaaactccagaattgtaacgaactgctcgaaaaaatcatgaaggggctcaatgcgtacctagagaaaaagcgcctgttctttcctagattttttttcttgtcaaacgatgaaatgttagaaatacttagcgagacaaaggatcctctcagggttcagccacacctgaagaaatgctttgagggtatcgcaaaactggaattcctgcccaacctggacatcaaagctatgtacagcagtgagggcgaacgggtagagctgatagccctaatctctacaagcgccgcaagaggcgccgtcgagaaatggctcatacaggttgaggacctgatgctgagatctgtgcacgacgtaatagctgcggctcgcttggcgtaccctgagtcagcccgccgcgattgggtccgggagtggcccggccaggtcgtgctgtgtatctctcagatgttctggacctctgagactcaggaagtgatatctggagggaccgaaggcctgaagaagtattataaggaactccagaaccagttgaatgagattgtggagctcgtgcgcggtaaactgagcaagcaaacacggaccacgttgggagccttggtgacaatcgatgttcacgcccgggacgtcgtgatggacatgataaagatgggggtctcacacgataccgactttctgtggctggcccagctccgttattactgggagaatgagaatgcgcgtgtaaggatcatcaattgcaatgttaagtacgcttacgagtacctcggaaatagccctaggttagttatcaccccacttacggaccgatgctataggaccctgattggcgcattctacctcaatctgggcggcgccccagaggggcctgcaggcacaggtaagacagaaaccactaaagacttagctaaggcattagccgttcaatgcgttgtgtttaactgttcagacggcttggactacctcgcaatgggcaagttcttcaaggggctggcttcaagcggtgcctgggcatgctttgacgagttcaaccggattgaactggaggtgctgtctgtggtcgcccaacagatcttgtgtattcagagggccattcaacagaaactggtcgttttcgtgtttgagggaaccgaactgaaactgaaccctaattgcttcgttgcaattacaatgaatccggggtacgctggaagatcagagctaccagacaacctcaaggtgctgtttaggaccgtggcaatgatggtgccaaactatgcactcattgcggagattagcttatactcatatggctttctgaacgcacggccattgagtgtgaaaatcgtcatgacttatcggttgtgttccgagcagctgtcttcccagtttcattacgactacggtatgagagccgtaaaggccgtgttggtcgccgccggaaatctgaaactgaaatacccaaacgagaacgaagacattctacttctgagaagtattaaagacgtgaacgagcccaaattcctgtcccacgatattcccctgtttaacggcataacatcggatttgtttccaggcattaagcttccagaggccgattaccacgaattcctggaatgcgctcatgaggcttgcaatgttcacaatctgcaacctgtcaaatttttcttagaaaaaatcatccaaacctatgagatgatgatcgtgcggcacgggttcatgctggtcggagaaccgtttgccgctaaaaccaaagttctgcatgtgctggccgacaccctgaccttaatgaacgagcacggctatggtgaagaagagaaggtcatctaccggacagtgaacccaaagagcatcaccatgggccaattgtttgggcagtttgatcccgtttcacatgagtggaccgacgggattgttgccaacacctttcgagagttcgccttgtccgaaactcctgacagaaagtgggttgttttcgatggacccattgatacactgtggattgaaagcatgaacactgtgctggacgacaacaagaaactttgccttatgtccggtgagatcattcagatgtcaccccagatgagccttatttttgaaactatggatctcagtcaggcctcccctgctactgttagccggtgtggcatgatctacctggagccctctcagctggggtgggagcccctggtttcaagttggttgaacagtttgaagggccctctttgcgagccggagtaccaagcccttctcagaggcttattcgcatggctgataccaccatcgctcaatcaaagagtggaattatttcagctaaactatctttacacaactattgtgtcaaaaatcctgaagatcctgattacatttagaatcagcaattacttcaaatacgttccactgaagacccagtgcacttttataaaattttttctgcaccagcaggcctgttttatcttcagcctgatttggtccattggtgggtcctgtgacaccgacgggcgaagagttttcgacacgttcattagactgattattctcggtaaggatgatgaaaaccccgtgcccgactcagtcgggaagtgggaatgcccttttgatgaaaagggcttagtttacgactatatgtacgagctgaagaacaaggggagatgggtgcactggaacgaactgatcaagaatactaatctgggtgacaaacagattaagattcaggatataatcgttccaacaatggacacaatcagatacacgttcctcatggacttatcaatcacctatgcgaaaccactcctcttcgttggtccaaccggcaccggcaagtcggtgtacgtcaaagataagcttatgaatcatttggagaaagaccagtattttcccttctatattaacctatccgcccgcacaagcgctaatcaggtgcaaaatataattatggcgcgcctcgacaaaagacgtaagggagtgttcggacctcccatgggaaaaaaatgtatcatcttcattgatgacatgaatatgcccgctctggagaagtacggagcacaaccacccattgaactcctgcgccagttcttcgactgcggtcattggtatgacctcaaggataccagtaagattacgctggtcgacattgagttgattgccgctatgggcccgcccggggggggcagaaaccctgtgactcctcgctgcatccgtcacttcaatatctgctcaattaattctttttcagatgagacgatggtccgtattttcagtagcatcgtggctttctatttaaggacacatgagttcccccccgaatactttgtgattggaaatcagatagttaacgggaccatggagatctataaacagtctgtggaaaatcttctcccaaccccaaccaagtctcattacacattcaacctgagagacttctcccgcgtaatccgcggctgcctgctcatagagcgtgacgcagtcgctaacaagcataccatgattaggttgttcgttcacgaagtgctgcgggtgttctacgacaggctcattaacgacgatgatcgaagatggttattccagctgactaagactgtgataaaagaccatttcaaagagagctttcattcaattttttctcacttgcgcaaacaaaacgcgccagtcactgaagaagacttgaggaatctgatgttcggggattacatgaacccagatctggagggcgatgacagggtatacattgaaatcccaaatatacatcatttctctgatgtcgtcgatcagtgccttgatgagtataaccagactcacaagacacgaatgaacctcgtcatattccgctacgtgctcgagcacctgagccgcatctgcagggtgcttaagcagagcggaggaaacgccctgcttgtggggctgggcggttccgggagacagtccctgactcgccttgcaactagcatggccaaaatgcacatattccagcctgaaatctctaaatcttacggaatgaacgagtggcgtgaggacatgaaatcctttatcgctgtccctgtgacgaaccggatagtggataataagtctaaaatccttgagaagaggctcaggtatctcaatgaccactttacatataatctctactgtaacatatgccgttccttgttcgaaaaagacaagctcctgttctcctttttgttgtgcgccaaccttctcttggcgcgtaaggagatcgagtaccaagagctgatgtttctccttaccggcggagtgtccctgaaaagcgcagaaaagaatccagatcccacttggctgcaagacaaatcttgggaggaaatttgtcgcgctagtgagttccccgcatttcgcggactacggcagcacttctgcgagcacatctacgagtggagagagatctatgattcaaaggaaccccacaacgcaaagtttcctgcaccaatggataagaatctcaatgaactacaaaagatcatcattctacgctgcttgaggccagacaagatcaccccagccattacgaattatgtaactgacaagctggggaaaaaattcgtggagcctcctccatttgatctgacaaagtcgtatttagactcgaactgtacaatcccactgatttttgtgctttccccaggagccgatcctatggctagtctccttaaattcgccaacgataagagtatgagcgggaacaaattccaggcgatttcactcgggcaaggccaaggaccgattgcggccaagatgatcaaggccgccattgaggagggcacatgggtttgtcttcagaactgtcatctggcagtgagctggatgcccatgctggagaagatctgcgaggacttcacttcagagacctgcaattcctcgtttcggctctggctgacttcttatccaagttcaaagttcccagtaaccattcttcaaaatggcgtcaaaatgacgaatgagcccccaacaggactgcgattgaatctgctccaatcttacctgactgatcctgtgagtgaccccgagttctttaaaggttgcagaggcaaggaattagcatgggagaagctgttgtttggtgtgtgtttttttcacgcactcgtacaggagcgcaagaagttcggaccactcggatggaacataccctacggcttcaacgagagtgatcttcgaatcagcattcgccagcttcagctatttatcaatgaatatgatactattccctttgaggcaatttcctacctgaccggtgaatgcaactatggcggccgcgtaacggatgactgggaccggagactccttctgaccatgctggcagacttttacaatctgtatatagttgaaaaccctcattacaagtttagtccatctggcaattatttcgcaccaccaaaaggaacatacgaagactacatcgagtttataaaaaagctgccattcacccagcaccccgagatatttggtctccacgagaatgttgatatctccaaggacctacagcagacaaagactctgtttgagagtcttctgcttacacagggcgggtctaaacaaacaggcgcttctggttcaactgatcagattttgcttgaaatcactaaagacatcttgaacaagctcccctcagacttcgatattgagatggctctgaggaaatacccggtgcggtacgaagagagcatgaacaccgtgctggtgcaggagatggagaggttcaacaatctcatcatcaccatcagaaacaccttaagagacctggaaaaagctatcaaaggagtggtggtgatggattcagcactcgaggcactctccgggagccttttagttggtaaggtgcctgagatttgggccaagcgctcctacccctccttaaagccactgggctcttacataacagattttctagcccgtttaaacttcttacaggattggtacaatagcggcaagccttgtgtgttctggcttagtggattctttttcacacaggcgttcctgactggagctatgcagaactacgcccgcaaatataccacgcccatcgacttattgggctatgagttcgaagtgatcccgtcagatacgtccgacacctcccccgaagatggggtgtatatccacggactttatctagatggagccagatgggacagggagagtggcctcctggctgagcagtaccctaagctgctttttgatctcatgcccattatatggatcaagcctacccaaaaatctcgtattatcaagtccgatgcctatgtttgtcccttatataagactagcgaacggaaaggcacccttagtaccacaggacattctacaaatttcgttatagcaatgttgttaaaaaccgaccaacctacaaggcactggatcaaaaggggagtcgcattgttgtgtcagttagatgactag

SEQ ID NO: 186027 - DNA, 2355 bp, synthetic construct
  misc_feature 1..2355: note = Description of Artificial Sequence: Synthetic coding sequence
  source 1..2355: mol_type = other DNA
atgagcgacgccaacaaggccgccatcgccgccgagaaggaggccctgaacctgaaactcccacccatcgttcacctaccagagaacataggagtggatactccaacccagagtaagctactgaagtaccggaggtctaaagagcagcagcaaaaaattaatcaattggtgattgatggtgcgaagagaaatttagaccgtacactcggcaagagaacaccgcttctgcctcctccagattatccccagaccatgacttctgagatgaaaaagaaaggattcaattacatttatatgaagcagtgtgttgaaagctcgcccttggtccccatccagcaggaatggctcgatcacatgctccgcctaatccctgaatcactgaaggaggggaaagaacgagaagagcttctggagagtctaatcaacgaagtttctagtgacttcgagaacagtatgaagagatacttggttcagtccgtgcttgtgaaaccccccgtgaaaagcctggaggatgaaggagggcctttgcctgaatcacccgttggactcgattattccaacccatggcactcatcatacgttcaggcccgcaaccaaatctttagcaaccttcatatcattcatccgaccatgaaaatgctgctggatctgggatatacaacgtttgccgacactgttctgctggacttcacaggcattcgggccaaggggccaatcgattgtgaatctttaaaaacggatctctctatacaaaccagaaatgccgaggagaagataatgaatacctggtatcccaaagtgatcaacctgtttaccaagaaggaggcactggagggcgtgaagccagagaaacttgacgctttctactcttgtgtgagtactctgatgtcaaaccagctgaaggatcttctgcggcggactgtggaggggtttgtcaaactcttcgatccaaaggaccagcagcggcttcccattttcaagatcgagctaacctttgacgatgataagatggagttttaccctacttttcaggacctggaagacaatgttctttcgctggtggaacggatcgcagaggcgttgcagaacgttcaaaccatccccagttggttgtccggtaccagcaccccggtaaacctggataccgagctgcctgaacacgttttgcactgggctgttgacactctcaaggctgccgtccacagaaatctggagggcgcaagaaaacattatgaaacctacgttgaaaaatataattggctcttggatgggacagccgtcgagaatatagagaccttccagaccgaggatcatacctttgatgagtacaccgaatttatagaaaagtttcttagcttggcctcggaaatcatgctcctgcctcagtggatccattacacaatggttaggctggactgtgaagatctgaagaccggactgactaacaaggctaaggctttcgctaacatactactgaatgatatcgcctcaaaataccgtaaggaaaacgaatgcatttgcagtgagttcgaagccatcaaggagcacgctctgaaggtacctgagacaactgaagaaatgatggaccttattagctatgtcgaaaaagcgagaaccgtaggtatcgaggagctcattctgcgcatccaggaatctaaaagacagatgagttattttcttgacgtttttctatttcctcaagaggaccttgccctgaatgcgactgtgctcatgtggccgcggaaaattaatcccatcttcgacgagaatgatgagttgatcgagaacgccaagcacaagaaggagaacgagctgatggctaaacgggaaaagctcatcctcgaaatcgagaaagaaagcagacggatggaagagtttacagagttcgcagagctggaacgtatgcagcagtatgtgactgacgtgcggcagttgcaaaagaggatccaggagagtgaggaggccgtccagttcatcaacaaagaagaggaactcttcaaatgggaactaaccaagtaccccgaactggacaaactgaaagtcaatatcgaaccgtatcaaaaattctttaactttgtgttgaaatggcagcgatccgagaaacgctggatggatgggggcttcctggatttgaatggagaatcgatggaagccgacgtggaagagttctctagggagatatttaagacactgaagttttttcaaactaaactgaaaaaagagctgcaggagaaaagaaaagccgcacggaaacgctcacttgaagaagagaagattgaggaggaacctaaggacaatgcaactataaccatgtgctccacggttatggaacaaataaaggcatttaaggtctag

SEQ ID NO: 186028 - DNA, 687 bp, synthetic construct
  misc_feature 1..687: note = Description of Artificial Sequence: Synthetic coding sequence
  source 1..687: mol_type = other DNA
atggagaccttcatccccatcgacctgaccaccgagaaccaggagatggacaaagaagaaacaaaaacgaaacctcggctgctgagatacgaagaaaaaaaatacgaggacgtgaaacctttggagactcaacccgccgaaatcgctgagaaggagactttggaatacaagacggtgcggacattctctgagagtctcaagagtgaaaagacagaggactatttgagggaatccattattcagcagcatatggtctccccggagcctgcctccctcaaggagaaagggaagtcacgcagaaagaaggaccaaacccatgcctgtcccaacgtgaggaaagcacgccccgtgtcctatgatcggacagagcctaaggacgacgacgtgattcggaacatcataagacttcgcgaaaagttagggtggcagaccatcctgcctcaacacagcctgaaatacggctccagcaagatagctatacagaaaattacccttaagaaaccactggaggacgatggagaattcgtctactgcctccccaggaagtcccccaagagtttgtataacccttatgatttgcaagttgtctctgcccacacagctaaacattgcaaggagttctgggtgataacagccagcttcatctcaaaaagatatctggtgatctgcggggctgtgtatatctag

SEQ ID NO: 186029 - DNA, 687 bp, synthetic construct
  misc_feature 1..687: note = Description of Artificial Sequence: Synthetic coding sequence
  source 1..687: mol_type = other DNA
atggagaccttcatccccatcgacctgaccaccgagaaccaggagatggacaaggaggagaccaagactaaaccaaggctcctccgttacgaagagaagaaatatgaggacgtgaaaccacttgaaactcagcccgctgaaatcgctgagaaggaaactctggagtataagacggtcaggacttttagtgagtcactgaaatccgagaaaacagaggactacctgagagagtccattatccagcagcatatggtgagtccggaaccagcttcactaaaggagaaaggaaagtctaggagaaaaaaggatcagacccacgcctgtccgaatgtgaggaaggccaggccggtgagctacgaccgcacagaacctaaggatgatgacgtgatcagaaacataatacgcctcagagaaaagctcggttggcagaccattttgccccagcattccttaaaatacggaagttccaaaatcgctatacagaaaattaccctgaaaaagcctttggaagacgatggcgagttcgtatattgcctcccccgaaaaagccccaagagcttatacaacccatacgacctgcaagtggtgtcagcccatacggctaaacactgtaaggaattttgggttattaccgcctcctttatcagcaagagatacctggtcatttgtggggccgtctacatatag

SEQ ID NO: 186030 - DNA, 1362 bp, synthetic construct
  misc_feature 1..1362: note = Description of Artificial Sequence: Synthetic coding sequence
  source 1..1362: mol_type = other DNA
atggagaccttcatccccatcgacctgaccaccgagaaccaggagatggacaaagaggagaccaaaaccaaaccaaggcttcttaggtatgaagaaaagaagtacgaggatgtcaaaccactggaaactcagcctgctgaaatagccgaaaaagagaccttagagtataagacggtgagaacattttccgaaagcctcaagtctgagaagacagaggattacctgcgcgaatctattattcagcagcacatggtgagtccagagcctgcatcgctcaaagaaaaaggaaagagcaggcgaaagaaagatcaaacccatgcatgccccaatgtccgaaaagcccgccctgtttcctatgaccgcacagaaccaaaggacgatgacgtcatacgcaacatcattcgcctcagagaaaagctgggctggcaaactatactgccacaacacagtctgaagtacgggtcttctaaaattgccatccagaaaattaccctgaaaaagcctctcgaggatgacggcgagttcgtctattgcctgcctcgtaaatccccgaaatctctatataacccatatgacctgcaggtggtcagcgctcacaccgccaagcattgtaaggaattctgggttataaccgccagcttcatttctaaagttataaacatcgtgggcagcgtaaaagaggtagagctcataccgaccttagaatggctgtctgaacgacggcactactacttgctgcgccagtttaagattttcagcgattttagaatgaacaaggcgttcgtgacctggaagctcaacgttaagaggatcaaaacagaaaaatctcgctcatttctctatcaccacttatttctggcagatgatctattccagacttgtctcgtgtatatacgaggcctctgcgaggacgccatcaatctgaaaaattacaacgaccatgagaataacctcagtgctatctgcctggtgaaactggactcgtcaaggacttactccctcgacgagttctgtgaggagcagctgcagcaggcgacccaggcattgaaacagctcgaggatatccgtaataaagctatctcagagatgaagtcaacattcctgaaggtcgccgaaaaaaacgagattaaagagtatttcgagtctaaactcagcgaggatgatacgacccacttcaaactgcctaaatacaggagactattagaaacattcttcaaatttgttatgctggttgattatatttttcaggagttaatacgacaactgatgaataccgccgtaaccctcctcttagagctgtttaacgggtccgcaggcatgcctttttccgtggaaaaaaagaatgagaatctcataaggtag

SEQ ID NO: 186031 - DNA, 13548 bp, synthetic construct
  misc_feature 1..13548: note = Description of Artificial Sequence: Synthetic coding sequence
  source 1..13548: mol_type = other DNA
atggagaccttcatccccatcgacctgaccaccgagaaccaggagatggataaggaagagactaagactaaacccaggcttctgaggtatgaagaaaaaaaatatgaagacgtaaagccactcgagactcagcccgctgagatagctgaaaaggagacgctcgagtacaagactgtgaggacatttagcgagtccttaaaaagcgaaaagaccgaggattatctgagagagtccatcattcaacagcacatggtctcccccgagcccgccagtctgaaagaaaagggtaagagtcgaaggaaaaaagaccagacacatgcgtgcccaaatgtgagaaaagccaggcccgtttcttacgacaggacagagcccaaagatgacgatgtgattcggaacatcatcagactcagagaaaaactcggttggcaaactattctgccccagcattccctaaagtatggctctagcaagatcgcaatccagaaaattacactaaaaaaacctttagaagatgacggcgaatttgtatactgtctcccccggaaaagtccgaagtccctgtataacccatacgacctccaagtcgtcagtgcccatactgccaagcactgcaaagaattttgggtcataactgcctccttcatctctaaagtcatcaacatagtcggatccgtgaaagaggtggagctgataccgactctggagtggttgtcggagcgaaggcactattacctcctgaggcagttcaagatattctctgacttcaggatgaataaggctttcgtgacctggaagttaaacgtcaagcggatcaagacagaaaagtctcgcagtttcttataccaccacctgtttctcgcggacgatctgttccaaacatgcttagtttacattcggggcttgtgtgaagatgcaatcaaccttaagaactataacgatcatgaaaacaacctatccgcaatctgcctcgtgaaacttgactcttctaggacctactctctggatgaattttgcgaggaacagctgcagcaggccacacaagcgctcaagcaattagaggacatccgcaataaggctatctccgagatgaaaagtaccttccttaaagtagccgaaaaaaacgaaatcaaagagtatttcgaatccaagctgtccgaggatgataccacacattttaagctccccaaatatcgtcggctactagaaacattcttcaaatttgtgatgcttgtcgattacattttccaagagttaattcgtcagctaatgaatactgccgttacgctcctgttagagctttttaatgggtctgcaggaatgcccttcagtgttgagaagaagaacgaaaatctcatcagaaccttcaaggataacagtttcccaacgggtaaaactacaaatgattgcgaagagttggtggataattcaaaattacatgccatcagcgttcagaagagcgaggtgaagactgacacggacatcaacgaaatactcaattccgttgaagtgggtaaagatctgcggaaaacatacgctcccattttcgaagttaatttatgtctccggatacctgctgagtctgatagctctgaaaattctaaggagaacttccatgagagcgaccagtgtcccgaggagtgtgtaatgtttgaagatgagatgagtgaaaacaaagacaattgcgtcaaaaaacattcgtccgaagagttactgccgaaagcaaagaaatcgaaggaaataagctataatttagaggacatcatttccgataccgaaatcgagactgagtttgagaataagtatatgtactacgaatttcccgagttcccaacgaacttgtttattgaccctaacagactggaattttcggttaagatccaaaacatgcttaccaatatggaaaaatgcattaccaccataacacccctatgtcaggatccccaactgtctatctttattgacttagtgagcatcatggatctaccaaacaagaccggtagtattatccattacaaggagcagacaaggtggcccgattgccacattttgttcgagaccgatcccgcctaccaaaacattatcgtcaacctcctcacaatcatcggcaacagtatgggcctagtgaatgcatactcccacaaattcattaaatattgcacaatgaccgagaaggctaaaatcatgtcaatgaaaatttcctcaatgggcgaactcacttcaaaggagttcgaagccattctaaaccggtttcgtaactattttcgtcacatcgttaatatggccattgaaaagcgcattggcatattcaatgtagtatcactggattaccagtccgaatgcttactgtatatcgataacgtgattcatatgtctcacactctgatacagagtgtaatagagaaaaagaataagaatttactggaggtcgtagaaagcagtctgcagcagcttgaatgtgaccctacagaaattgaggagttcctggagcacttcatttttctgaacgcgattagctcaaagatctccaagcttgagaaagagttcctgacaatgtcccagctctactccgtggctaagcaccaccaaatccacatttctgaggagcagatcgcaatctttcaggtattactcctcaaattcagccagctcaagtcgtctatgaaattatctaagattaataaagataccgcgatcacaaaattccgggataacctggaagcttgtatcagcgggctgcatgttgacgttgggaacctgaaggccaaaattagaacaccccttctcctgtgcgccggtacacaggtgtctacagcaatggagatgatacagaccttatcaggcgaagccgcctcacttaccaataaagccaaagcctactctcattaccaggattgtttctctgacagtcagagtcacatgcactcagtgaatgtggaagagatcactcaaatcgtgctttccgaaatctcagacattgagggggatctgactcttagaaagaaattgtgggaggcacaggaagaatggaaaagggccagctgggagtggcggaattcgtcactgcagtcaatcgacgtggagtccgtacagaggaacgtgagcaaactcatgcacattattagcgtcctcgaaaagggactgccgaaaagcgacatggtgacacatttgaaacaagtggttacggaattcaaacaggaactgccaatcatcattgccttaggtaatccttgccttaagcctaggcactgggaggcgctccaggaaatcatcggaaagagtgtcccgctggacaaaaattgcaaggttgagaatctcttggctctaaagatgttccagtatgaaaacgagattaatgatatgtctacatcagctacaaacgaggccgccctggagaaaatgctgttcaaaattatcgatttctggaacacaaccccactccctctgatcctgcatcacacagaaatctattccatcttcattattccaagcatcgacgatataagcgcccagctggaggaatcccaggtaattttagcaacgatcaaaggatcgccacatatcgggcctattaaggatctggtgaacgaatgggatcagaatctcactctgttctcttacactctggaggaatggatgaattgccagaggaattggttataccttgagccggttttccactcctcggagatccgaagacaactgccagctgagacagagctgttttcccaggtcattagcatgtggaagaaaattatgtccaagatacaaaacaagcaaaacgctctgcagataactacaagtgccggcgtgctcgaaatccttcaaaattgcaacattcacttggagcacattaaaaagagcttggaagattacctggaagtaaagcgtctaatatttcctagattctacttcctcagcaatgcggagctacttgacatcctggctgactcccgcaacccagaaagtgttcagccgcacctggttaagtgctttgagaatattaagcaattactaatctggaaacaggacatcggtccgcccgctgtgaaaatgctcatcagcgcggagggtgaaggtctggtcttaccaaagaaaatcagagtccgctcagcagttgaacagtggctagtcaacgtggagaaaagcatgttcgatgtcctaaagaaagagcggtacatttataatataattctgcttttccagagccagattatgttctacaacgattgcgttaaatccttcgtgtcctcttattcccgggaaaagctggaaaaagtgcacgcgggtcttatgtgccatttagaggaagtggccgacttagtggtcctcgacacttctaattcccgtactaaagccattctgggcgccctgctgattctgtacgtgcactgtcgcgacatcgttattaacctgctactcaagaacatctttaatgcagaggacttcgagtggacccgccatttgcaatacaagtggaatgaaaagcagaagctctgttacgttagtcaaggtaatgcatcttttacctatggttacgagtacctgggctgcacgagcaggctggtgattacccctctaacagataggtgctggcttaccttaatggaggccctgcacctcaacctgggcggctgcccagcggggccagctggaaccggaaaaactgagacagtgaaagacctggcaaagtcgcttggcaaacactgcgtggtgttcaattgcttcgaagacctggactacaaaatcgtgagaaagtttttcttcggtttggtgcagtctggcgcctggtcatgttttgatgagtttaatttgatcgacctggaggtgttaagtgtcatagcttcccaaatcctcactataaaggcagcgaaggataactactccgctcgcttcgtactggaaggaaaggaaattcgcattaacatgtcttgcgctgtgttcatcaccatgaaccctcggtatgggggcggagtcgaactcccggacaatctgaagagcctctttcgtcccgtcgctatgatggtgccacactatcagatgatcgcagagattatactgttctcttttgggtttaagagcgccaacagtctgagcggcaaactcacgaacctctatgagctggctagaaagcagctgtctcagcaggatcactacaatttcggcctgaggtcacttaaaatagtgttaatcatggcgggcacaaagaaacgtgaatttaagtgtctgagcgaggctgacgaaacactcattgttatcgaagcaatccgcgaggctagtttgcccaagtgtcctccagaagacgtgcctttattcgagaatataatcggggacatctttcccgaagtgacagttctaaaggtgaatcagctggctttggaaaaagtgatctataccgccacgcagcagttaggattacaaaattggtcaagccagaaggaaaagatcattcagttttataatcagctgcaggtatgtgtcggagttatgttggttggccccactggaggcggcaagactactgtccgaaggatcctggagaaggctctaaccctcctgcccattgctgattttctgagcgtggctgaaaggaagagcgcctccaagatatccgagagaaagggaaaagtggatatttgtgtcttaaatcccaagtgcgtcaccctgagcgaactgtatgggcagttagatccaaacacaatggagtggaccgacggcctgctcagtgcgacaatccgctcctacgtctacttcaatactccaaagaatacaaaaaaggatatcgacctaaggttaaagtcccgcattagcgatctaagcaacgtgtttaagctggattcttctgacactaccgagactgatgataacattttcgaggaaattgagaaagtagtaaagattccagagaatcacaacttcgactggcagtggatcatcctggacggcccggttgatacattctgggtggagaacttgaatagtgtgctcgacgacactcggactctctgcctcgcaaattccgagcgaatagccctgactaacaaaatccgggtgatctttgaggtcgacaacctgtcgcaggcatcacccgccaccgtgtcgaggtgtgccatggtatacatggacccagtggacctgggatgggaaccttatgtaaaaagctggcttcttaaaaccagcaagatcattagccagagcggtgtggattgcctggagtttatgattaaaaactctgtcaccgatgggttgcagtttatccggaacagacaaaaattccaaccgtatcccatggaagacatcaccgtggtgattaccttatgccgcatccttgacgctttttttgacttcatggggaagaatggggggttcgaacaatcagatgacttgaacgacaccagttccaaggaggccaatagtcaaagggagtctgtgacttttaaagacatcgagaagagggatgagaatacatggtaccccgaaaagaatcctgataagctaacaaaaatcatccagaaactttttgtgttcgctttcacatgggcctttgggggtgcactcaaccgagaggacgagcaccgggaaaacattccattctgcccaagcctggagccagatagcctcgcaaaggttacttatgattttgataagttagtgcacgaactgtttggcaactcatcccaggtaggatggaagcactgggggcagagtcagggccgccggcgaaaaggcaactgcataaacctccccacgggtgagtgctctatttttggttacttcgttgacattgaacagtgcgaattcatcccctggagcgatttggtgccgaacgaccagacattgatacagcgtggaacctcccttttaacaaacctgcagcggagtggcggtaatttcctgaaaatcactgaatgcggagaatgtataaattataccgctacacgcgataccacttgtctgagcttcctgatgagcctgctgttgaagaatagctgccctgtactacttactggcgaatcaggcgtcggcaaaaccgccgcaattaaccagatgttggagaagctcgagggtcccggagcctttgacataaagcatgggtccatcctcggggacactcttttgtatagcgaaattaagaaatcaagtagcctcaagcagaatatcaccattttgatcccagagacgcacaaaaccgcgaccggaagttctgacaatcctactaagaaaccagaggtgcgcacaaacaagaagctgctgaaaaacaatgatcataaaggcgttgttgtctccacaattaatttttcaactaacgtaaccgcggccaagacaaaggagatgatcttgaaaaaactgattcgccggacaaaggatacgttaggagcaccaaaaaacaacagaattctgatcttcattgacgatatgaatatgccagtgtctgatatgtacggagctcagccgcccctagagttgatacgacagctccttgatttgggtggggtatatgacaccgagaaaaacacctggaaaaatatccaggacctgtccatcgttgccgcctgcgtgcctgtggtgaatgatatttctcccaggctcttgaagcacttctctatgctggtgcttcctcacccaagccaggatatcttgtgcaccattttccaggcccacttggggatctatttctccattaataattttactcctgaagtgcagaaaagcaaagaccagattattagctgtagcttagccatctaccaccaggtgcgccaaaatatgctgcccacacccactaagtgtcactacatgtttaaccttcgcgacatgttcaagcttctgttgggcctccttcaggctgatcgcaccgtcgtgaactcgaaagagatggcagccctgcttttcgtccatgaggcaaccagagtcttccacgatagactgattgactttactgacaagtcactattttaccgcctgctgtccagagaactggaaaactgctttcagatcggcattgacggatgtggcaaaaaaacttgcgctacactggcatgttacctgaccgacaataaattgtaccgcgttcctatcagtcacaagtgtgcttatattgaattcaaggaagtgttcaagaaagtatttattcacgccggtctgaagggcaagcctactgtgctgatggttcctaatttaaatatcgaacaggattcctttctggaggacctcaactatattatttcctctggccgaattcccgacttattcgaaaacgtcgaactggacagtattgccatgaagatacggtatctgaccgagcagtctggtcatatggacaatcggcagtcccttcttagcttcttccagaagcgcatatacaagaatctgcacattttcgttatcatgtcacccgaaggccccagtttccgccagaactgtagagtctacccatccatgatttcctcatgcaccatcgactggtacgagcgatggcctgaggaggccttgctcatcgtcgccaattcatttctaaaggaaaaggtaaatttcgagaaccgggaaaatctcaaagaaaagctcgcccccacgtgtgtccagatccataagtccatgaaggatctgaacaggaaatatttcgaggaaactgggagattctattacactacaccgaactcatatttgcagttcatggaaacattcgctcacatcctgcgggcccgggaggaggagatgcaaacgaagcgcgacagatttcacatggggctcagcactatcttagaggccactaccctagtcacagagatgcaggaagagttactgattctgggaccccaagttgagcagaaaacgaaggagactgagactctaatggagaagttaaggaaagactcccaggttgttgagaaggtgcagatgcttgtaaaacaggatgaggaaatcgtggctgaagaggttcgtatagttgaagactacgcccagaagaccgccaacgaactaaagtccgtgttgcccgcatttgacaaggcgattgtggccctgaacgcactggacaaggctgacgtggctgagttgagggtgtacaccaggcctcccttcttagtgttgaccgtgatgaatgctgtgtgcatacttcttcaaaaaaagcccaattgggctactgcgaagcttttactaagcgaaaccggttttctgaaaaagctgatcaacctagacaaggattccatccccgacaaagtattcgtcaagctgaagaagattgtgactttgccagacttcaaccctcacaagatcagtttggtatctgtagcttgttgctccctgtgtcagtgggtgatcgccctgaacaactaccacgaggtacagaaggtggtgggcccgaaacagattcaggtcgcggaagcccagaacgtgctgaagattgcaaggcagcggcttgctgaaaagcagcgtggcctgcagttagttgaagaacacttgctgtttctccaggccgcatacaaagacacagtggctgagaaacaactcctggctaaccgtaaaaccatggcttcacgaagatttcagtgtgcatctgtgttactaacagtgcttgaagacgagaagacccggtggcaggaaacaattaaccagatcgataataaactagagggaattctcggggacatcctgctatcggctgcgtgcatcgtatactccggaattctaacacctgagtttcggcagctcattgtgaataaatgggaaactttctgtatcgaaaacggtatttcactgtcctcaaagttctcactaattaaagtaatggcgcagaaatacgagatatccagatggcacaatcaagggctgccccatggccagtactccgtagagaatgctatactaatcaagaacggccagcagtggcctctactgatcgacccccatcgccaagcccacaagtggattcgccagatggagggctcaagactgcagaagttgtcaatcgaagattccaactacactaagaaaatagagaatgcaatgaaaacgggaggttcggtgctgttacagaacctgctggaaacattggctcctgggttgaaggcaattcttaagaaggatatataccagaaaaaaggacattacttcattcgcgttggagatgcagaatttgaatacaattccaattttagattgtacctgtccactgagatcgataatccccattttcttcctagcgtctacaatttcgtgacgatgataaactttacggtgaccttccagggtctacaggatcagctcctgtctaccgtcgtaacccatgaggtccctcacctcgaagaccagcggagtaagctactggaatctatttccctggacgccataactctcgaggaactggaagaaaagacacttaacttactgcagaaggccctcgggagcatactggacgatgacaagatcgtcgacacactccggaagagcaagatgaccagcaacgagatttccaagaggattgaggccaccaaaaaggctgagtcggaaatccaagccattaggaagaactacctgcccatcgctacccgaggagccctgctgtatttcttagttgccgatctgacacagattaactatatgtatcagtttagtctggactggttccatcaggtatttgtgtcctcagtggtcagtaagtccaaagaacaagagcatagtttcaaacgagagaaggttagccccaaggaggtgcacgagttcatttccatcagtaaagagcctaacctggagaatgaaaaaaaccttctggacaagcatattaaaagcgcaattgatatgttgacaaaaagtatatttaaagtcgtttcctctgcactttttaatgaagacaagctgtgcttcagtttccgcctatgtacagtgatcatgcagaataatgctaacggtaacctcatacaggacgacataggctttctgccggaagaggagtggaatattttcctgtacagcggcattctgattaatatcaaatctgcgctgtcccagtctaggctgacttcaaccttcgaaattggcgagtcccaacatctccagtggttgtccgactcacgctggcggcagtgccagtacgtgtcaactcatctggagccgttctcgctgctttgcaaatccttgctgagtaatgtgtctcaatgggacacttttaaaaattcgaaagctgtgtattctctaattagtactcctttctctagcgaaaacgcctcattagaagagaacactaagcctcccgaggaaactgagcttctgaatgagaacaaagaaacctgcaatccaataaacttcccgtgggaaaagctcacctcctttcaacggctgattctggtcaaagtcttgcggcccgaatcacttaacaacagcgtgcggaagtttatcacagagaaaatgggcaacaaatatctccagcgcacgggggtgaatctcaaagacgcatataagggttctaatgctcggaccccactgatcctgattcagacacacgggatcgaccttactaatattttgctgaggtttgcacaggaactcaaagggacaactcaccacgtcaccatcatcagcctgggacgggaccaagccgccaaagccgaggacctcatccttaaggctctcactaagacccagcagtgggttttcctgcagaactgccacttggcgacttccttcatgcccagactgtgcaccatcgtggagagttttaacagtccgaatgtcacaattgaccctgaatttcgactttggctgtctagcaagtcctacagctcgttccccattccagttctgaaaaagggactgaagatcgccgtggagtctccacagggcctcaagtccaatctgcttcaaacatttggatgcactggctcgggcgaggttactgaagagatttttgaaaatccagactgtggccagtggtggaagaaactcctgttcagcctatgcttctttaacgctgtcatcaatgagcggaagaattacgggatcctcggatggaacattgcctacaaatttaatagctccgatcttggtgtggccataaaagtgctagagaattccctccggggccaaccctcaatctcgtggcaggccctccgctatcttatcggagaagtaatatacggaggcagggtcatcgataactgggacaagcgatgcctgaagacgctgttgtacaaattttgcaacccagaggtcctgaaagacgacttctccttttcaaggagcgcctctattaaggactacatccatatcatccagagtttgcccgacgacgatctcccggaagttctagggattcaccctgaggcaatcagaagctgctgggagacgcagggcgaaaaatttatagaaaatctaatagccatgcagcctaagaccacaaccgccaatttgatgattaggccagaacagtcaaaggatgagctggtgatggaaatcctcagcgatctgctcaaaagactgccacttactgtggagaaggaggagatagccgtcgggactccgagcacactgaaaagcatgatgtcctctagtatttgggaatcgttgtccaagaacttgaaagaccacgatcccctgatacattgtgtccttttgacctttttgaaacaggagattaaaagatttgacaaactgctgtttgtcattcacaagtcattgaaggatctgcagcttgccatcaaaggagaaatcatcctcactcaagagctggaggaaatctttaatagtttcctgaacatgcgggttcccacactgtggcagaaacatgcatatagaagctgtaaaccccttagttcgtggattgacgacttgatacagcggctgaacttctttaacacttgggctaaggttgcctataccgccatccagcgaaggtatatgagattcgttaccgtctggaaacaatctattccaagtaccagtcagaaatgcaagcaccccgaggactccgaaaacaacttttttgaggggtttccttctcgctactggttacctgctttctttttcccacaggctttcctggcggcagtactgcaagactacgggaggagccgcggaattgccgtggacgcccttaccttcacgcaccacgtgatttctaacacaactgacaaagatgagaaattctccgttttcatgccaaagaagctcaacatagtgaggcgggccttcaaaggatccgcatcctcacatactggcgtgtacatttttggcctgttcatcgagggtgctcgatggaaccgggaacagaaaatactggaggacagcttaccgttggaaatgtgctgtgactttccagacatatacttcctccctactaaaatttctactaaaactccaaatgcctccaaccaaacagatagtgaactctatgcgttcgagtgcccggtgtatcagaccccggaaagaagccggattttggccactaccggcctgcctaccaacttcctcacctctgtgtatttgagtactaagaaacctccatcccactggatcacaatgcgggtagccttgctgtgtgaaaaaaacgaaaagtag

SEQ ID NO: 186032 - DNA, 13548 bp, synthetic construct
  misc_feature 1..13548: note = Description of Artificial Sequence: Synthetic coding sequence
  source 1..13548: mol_type = other DNA
atggagaccttcatccccatcgacctgaccaccgagaaccaggagatggataaggaagaaacaaaaacaaaaccacgtcttctccggtacgaggaaaagaagtacgaagatgtcaaacccttggaaacccaacctgccgagatcgcagagaaggagacactggagtataaaaccgtgcgaacgttctctgagtcgctcaagtccgagaagactgaggattacctgcgcgagagcatcatccagcagcatatggttagccctgaaccagcgagcctgaaagagaagggtaagagcagacggaagaaagaccaaactcacgcctgccccaacgtaaggaaggcacggccggtatcttacgacaggacagagcctaaggacgacgacgtcattcgcaatataatccgcctgcgggagaaactggggtggcagacaatcctgcctcaacacagcctgaaatatgggagtagtaaaatcgctattcagaagattacactcaagaaaccacttgaggatgacggcgaatttgtgtactgtcttcctcgcaagagccccaagagcctgtataatccgtacgacctgcaggtggtgtccgctcataccgcgaaacattgcaaagagttttgggtgattacggcatccttcatcagcaaggtgataaatattgtcggaagtgtgaaagaggttgaacttatccctacgctggagtggctttctgagcggcgccattattacttactacgacaatttaagatcttcagtgactttcgcatgaacaaggctttcgtgacctggaagttgaatgtgaagcggataaaaactgaaaaatctcgcagtttcttgtaccatcatctctttttggctgatgatttgtttcagacttgtctggtatatatccgaggtctgtgtgaggatgctatcaacctgaagaactacaacgatcacgagaataatttgagtgcgatctgcctagttaaacttgattcctctcggacctacagccttgacgaattttgcgaggagcagctccagcaggctacccaggccttaaagcagctggaggatatacgcaacaaggctatctccgagatgaaaagcacatttctcaaggtggccgagaagaacgagatcaaagagtactttgagagcaaactttccgaagatgacactacacattttaagctacccaaatacagaaggttgctcgaaactttctttaaattcgtgatgctcgtcgactatatctttcaggagctcattaggcaacttatgaatactgcagtgactctgctgctcgaactctttaacggttccgctggcatgcccttctcagtcgaaaaaaaaaatgagaacctgattcggacgttcaaggacaattccttccctaccgggaaaacaacgaacgattgtgaagagctcgtggataactcgaaacttcatgcaatctcagtccagaagagcgaagtgaagaccgacaccgatattaacgagatcctgaattctgtcgaagtcggcaaggacctgaggaaaacctatgcacctattttcgaggtcaacctctgcctgcgaattccagctgaatcggatagttctgaaaacagtaaagagaatttccacgagtctgaccagtgtccagaggagtgtgtcatgttcgaagatgagatgagtgagaataaagacaactgcgtcaaaaaacacagcagcgaggagctgttgcctaaagctaagaaatccaaggaaatctcctacaatttagaagatatcattagcgataccgaaatcgagaccgaattcgaaaacaaatacatgtactatgaattccctgagttccccacgaatttattcatcgaccccaatcgcctggagtttagcgtcaagatccagaacatgttgacgaatatggagaaatgcatcactaccatcacccctctttgccaagacccccaactgagtatctttatcgatctggtttccattatggatttgccgaacaaaaccggcagcataattcactataaggagcaaacccggtggcctgattgccatatcttatttgaaaccgaccccgcataccaaaacatcatcgtcaacctgctgacaattatcggaaacagtatgggcctggtgaatgcatattctcacaaatttataaagtactgcaccatgaccgaaaaggccaaaataatgtcgatgaaaatttcatccatgggggaactgacttcaaaggagttcgaggctatcctgaaccgattccgtaattattttcggcacatcgtaaatatggcgatcgagaagcgaatagggattttcaacgtggttagtctggattaccagtccgagtgtctgctgtacatcgacaacgtcattcatatgagtcacacacttatacaaagtgtaatcgagaagaaaaacaaaaacttactggaagtcgttgaaagcagtttgcagcagctggagtgcgatcctacagagatcgaggaattcttggagcacttcatctttctcaacgccatctcctctaaaatatccaaattggaaaaagagttcctgaccatgtctcaactgtattcagtggcaaagcatcaccagattcatatctccgaagagcagattgccatcttccaagtccttctgctgaagttttctcagctgaagtctagcatgaaactgtcaaaaattaataaggacaccgcaattacaaagtttcgcgacaacctggaagcgtgtatctccggtctacacgtggacgtgggcaacttaaaagctaagatacggacccccttacttttatgtgctggcacgcaggtcagtacagcgatggagatgattcagactctatccggtgaagcagcgtcccttacaaataaggctaaggcctatagccattaccaggattgtttttccgacagtcagtcacacatgcacagcgtcaacgtggaagagatcacgcagatcgtcctgagtgagatctcagacattgagggagatctgacactgagaaaaaagttgtgggaggctcaggaagaatggaaaagggcatcctgggaatggcgcaacagttctcttcagtcaattgacgttgagagtgtgcagcgaaatgtgtctaagcttatgcacatcatatccgttttggagaagggcttgcccaaaagtgacatggttactcacctgaagcaggttgtgactgaatttaagcaagagttacctatcattatcgctctgggcaacccatgcctgaagcctcggcattgggaggctctgcaagagattatcggaaaaagtgtgccactcgacaagaactgtaaagtcgaaaatctcttagccctgaagatgttccaatacgagaatgaaattaatgacatgtcaacctcagctaccaatgaggccgcgctggagaagatgctgtttaagatcattgacttctggaacactacccccctgcctctgatcctgcatcatacagagatctattccatcttcataattccctcaattgacgatatctcagcccagctggaggagagccaagttatactggccacaatcaagggatctcctcatattggtcctattaaagacctcgtgaatgagtgggatcaaaatctgacactcttttcctacacgctggaggagtggatgaattgccagcggaattggctgtacctggaacccgtattccatagctccgagattaggcgccaacttcccgccgagaccgaactcttttcccaagtgatctctatgtggaagaaaattatgtctaaaatccagaacaagcagaacgcactacagatcacaacatccgctggcgtcctggagatactccagaattgcaacatccacctcgagcacattaagaagtctctcgaggactacttggaagtgaaacgactcatcttcccaaggttttacttcctcagcaacgccgaacttctggacattctagccgactctagaaaccccgagtctgtccagccccacctcgtgaagtgtttcgagaatatcaaacaactgctgatctggaagcaagatattggtcctcccgctgtaaagatgctcataagcgccgagggagaagggttagtactccccaagaaaatccgcgtgcggagtgctgtcgagcagtggcttgttaacgttgagaaaagtatgtttgacgtgctgaaaaaggagcggtacatctataacattatattacttttccagtcccaaatcatgttctataacgattgtgtcaagtccttcgtgagttcctactcccgcgaaaaactggaaaaggtacacgcaggtctcatgtgccaccttgaagaggtggctgatctagttgttttggacactagtaactcaaggacaaaggccatcctcggcgcactcctgattctatatgtgcactgtcgggatatcgtgattaacctattacttaaaaacatctttaatgctgaggactttgagtggactaggcatctccagtacaagtggaatgagaagcagaaactatgctatgtgagtcagggaaacgccagttttacatacgggtatgagtatctgggctgcacgagccgattggtcattaccccgctcactgatcgatgctggttaactctgatggaagcacttcacttgaacctgggcgggtgcccagccggacccgcgggtacaggcaagacagagactgttaaagaccttgctaagtcactgggcaagcattgcgtggtgttcaattgttttgaggacctggactacaaaattgtcaggaagtttttcttcgggctggttcagagtggagcatggtcctgctttgacgagtttaacctcatcgatctcgaggtgcttagtgtcattgcatcacaaatcctgactattaaagctgcgaaggataattattctgcgcgctttgtgctggaggggaaggagatacggatcaatatgtcctgcgcagtatttataactatgaacccccggtatggaggcggtgtggagctgcctgataacctgaaatccctgtttcgacctgtggctatgatggtgccccactaccagatgattgctgaaatcattctgttctcctttggcttcaagtctgccaactccctgtcaggaaaactgaccaatctgtatgagctggcaagaaaacaactgagccagcaagatcattacaacttcggcctgcggtccctcaaaatcgtcttgatcatggcaggcaccaagaagcgggagttcaaatgcctgtcagaggctgacgaaaccctaatcgtgatcgaagcaatcagagaggcaagtctgcctaagtgtcctcccgaagatgtgcccctgtttgaaaatattattggagacattttccctgaggtgacagtgctcaaggtcaatcagcttgccctggagaaggtaatatataccgctactcaacagcttggccttcagaactggagcagccaaaaggagaagataatacaattctacaaccagttgcaagtctgcgttggagttatgctggtggggcctacaggaggcgggaagaccaccgtacggaggattctggaaaaagctctgacactactcccaatagccgatttcttatctgttgctgagcgtaagtccgccagcaagatctctgagcgaaaggggaaagtggacatttgtgtgctgaacccaaagtgcgtgactctatcagaattatacggccagctggaccccaataccatggagtggacagacggactgctgagcgctacgatacgaagctatgtgtacttcaacacacccaagaacacaaagaaagatattgacctgcgtctgaagagtaggatcagtgatctcagtaacgtgttcaagctggactcttctgacacaaccgagacagatgataatatttttgaggaaatcgagaaggtggtgaagatcccagaaaatcacaactttgactggcagtggataatcctggacggtccagtggacacattttgggtggaaaacttgaattccgtactcgatgatacaagaacactgtgcttggcgaattccgagcgcatagccctgacaaataagattcgagtgatcttcgaggtcgataacctgagccaggctagtccggctaccgtgtcaagatgtgcaatggtatacatggatccggtcgacctgggatgggagccctatgtcaagagctggcttctcaagacctccaaaattataagccagtctggagtggattgtctagagtttatgatcaaaaactccgtcaccgacggcctccagttcataagaaataggcaaaaatttcaaccttatcccatggaggatattactgtcgttataactctgtgtaggatcctggacgccttcttcgactttatgggaaaaaatggtgggttcgagcagagcgacgacttaaacgatacttcgagtaaagaagccaattcccagagagaaagcgttacctttaaagacatcgagaaacgcgacgagaacacatggtatccggaaaagaatccagacaagctcacgaaaatcattcaaaagcttttcgtattcgcattcacatgggcttttgggggggcactcaaccgagaagatgagcatcgggagaatataccattttgtccctcccttgaaccagatagtctagctaaggttacctacgacttcgacaagctcgtccatgaactcttcggcaatagcagccaggtgggatggaagcactggggacagtcccaaggccgtcgtagaaaaggtaattgcattaatttacccaccggggaatgctccattttcggttatttcgtggacatcgagcagtgcgagtttattccttggagtgatctggtgccgaacgatcagacactgattcaaaggggtactagcctgctgacaaacctacagagatcaggagggaattttctgaaaatcacggagtgcggtgaatgtatcaattataccgcgacaagggacacgacatgcttgtccttcctgatgagccttctactcaaaaatagctgccctgtgctgctgaccggcgagtctggcgtgggaaaaactgctgccattaatcaaatgctcgagaaactagagggacccggcgcattcgacattaagcatggatcaattttgggcgacaccttgttatacagcgaaataaagaaatcaagcagtttaaagcagaacatcaccatactcattcctgaaacccacaagacggcgacagggagtagcgataaccccaccaagaaacccgaggtccggacaaacaagaaactcctgaaaaataacgaccataaaggggtggttgtgagcacaatcaacttttcgacaaacgtcactgccgccaaaacaaaggaaatgattttaaaaaaattaataaggcggaccaaggatactttgggcgcccccaagaacaacaggattctcatatttatcgacgatatgaatatgcccgtgtccgatatgtacggggcccagcctcctctggagttaatcaggcagctgctggaccttggtggggtttatgatactgagaagaacacctggaaaaatattcaggacctgagcatcgtggcagcctgcgtacccgttgtgaatgacatatcccctagacttctgaagcatttcagcatgctggtgctgcctcaccctagtcaggatatcctgtgtacgatcttccaggcacacctgggcatatacttctctattaacaactttacaccagaggtgcagaaatccaaagaccagatcatatcttgctctttagccatataccatcaagtaagacagaacatgcttcctacacctacaaagtgtcactatatgttcaacttgcgggacatgtttaaactgctccttggccttctccaggccgacaggaccgtcgtgaattctaaggaaatggctgctctgctgttcgttcatgaggcaacgcgcgtatttcacgacaggctgatagacttcacagacaagtccttgttttaccgtctgctgtctcgagagctggagaactgttttcagattggcattgatgggtgtggaaaaaaaacctgtgcgacccttgcttgctacctgactgacaacaagctgtatcgcgtgcctatctcccacaagtgcgcttacatagagtttaaggaggttttcaaaaaggtttttatccatgccgggctgaaaggcaaacccaccgtactgatggtgcctaacctaaatattgaacaggattcctttttggaagatcttaattatatcatctcttcgggccggatccctgatctttttgagaacgtagaactggacagcattgctatgaaaatcaggtacctgaccgagcaaagcgggcatatggacaatagacaatcactgctatcttttttccagaaacgcatttacaaaaacctccacattttcgttatcatgtctcctgagggaccatcatttcgccagaactgtcgggtgtacccctccatgatcagctcatgcactatcgattggtacgaaagatggccagaagaagccctactcattgtggccaactcttttctgaaagagaaagtaaattttgaaaatcgggagaatttaaaagaaaagcttgcgccgacatgcgtccagatccataagagcatgaaagacctgaatcggaagtattttgaggagacaggaaggttttactacacaacccctaatagctatttacagttcatggagacattcgcccacatcttaagggcccgggaagaagaaatgcaaacaaaacgagataggtttcacatgggactctctactattctagaggccacaaccctcgttaccgaaatgcaggaggagctgcttattctgggtccacaggtcgagcagaagaccaaggagaccgagactctgatggaaaaactgcgcaaggattcacaggttgtggagaaggtgcagatgctggtgaagcaggacgaggagatcgtcgcggaggaggtaaggattgttgaggactatgcccagaaaaccgcaaacgaacttaaaagcgtcctcccagcctttgataaagctattgtcgcccttaatgccctcgataaggctgatgtggcggaactacgcgtgtataccaggccaccattcctggtcttaactgtaatgaatgctgtgtgcatcctgctccagaaaaagccaaactgggccaccgctaaattgctcctgtctgaaacgggtttcctgaagaagttaattaacctggacaaagactcaattcctgataaggtttttgtgaaattgaaaaaaatcgtaacactgcccgacttcaatccacacaagatcagcttagtgtctgtcgcctgctgctccctttgtcagtgggtcattgccttaaacaattatcatgaggtgcaaaaagtcgtgggacctaagcagatccaggtggcagaagctcagaatgtacttaagattgcaagacagagattagccgagaaacagcggggccttcagctagtggaagagcacctgttatttctccaggcagcctacaaggacaccgttgcagaaaagcaactactggccaataggaagacaatggcttccaggcggtttcagtgcgcaagcgtattgctcacagtcctcgaggacgaaaagacgcggtggcaggagaccatcaaccagattgacaacaaactcgaggggatactgggcgacatcttgctgagcgccgcgtgtatagtgtacagtggcattctaacacctgaatttaggcagcttatagtcaacaaatgggagactttttgcatcgaaaacggaatatctctgagtagcaaattcagcctcattaaagtaatggcacagaagtatgagatttccagatggcataaccagggactgccccacggccagtatagtgtggaaaatgccatattgattaagaacggacagcaatggccactgctgatagatccgcaccgccaggcccacaaatggatccgccagatggaaggcagcaggcttcaaaagctgagcattgaagatagcaactacactaagaaaatagaaaatgccatgaaaactggaggctccgtgcttttgcaaaacctgctcgagacactggctcccggactcaaggctattctgaaaaaagacatctatcaaaagaaaggacattactttattagagtcggcgatgctgaattcgagtataacagcaacttccgcctgtatctatcgacagagattgacaacccgcattttttgccaagtgtgtataatttcgtcactatgatcaacttcactgttacttttcaggggcttcaggaccaattgctgtctacagtcgtgactcacgaggtgccccatctggaggaccagcgctctaagctcctggaatctatctcgctagacgcaattaccctggaggagctggaggagaagacactcaatcttctgcagaaggctcttggtagtattcttgatgatgacaagatcgtggacaccttgagaaagtcaaagatgacctctaatgaaataagcaaacggattgaggccaccaaaaaggctgaatcagaaatccaggccatccggaaaaattacctaccgattgcaactcggggagcactgctgtactttctggtggccgacctcacacaaatcaattatatgtatcaattcagcctggattggttccaccaagtctttgtgagcagcgtggtgagcaagtctaaagagcaagagcatagtttcaagagagagaaggtttcccccaaagaagtgcacgaatttattagcatttcaaaagagcctaatctagagaacgaaaagaatctgctcgacaagcatatcaaaagtgcaatcgatatgctcaccaaatctatatttaaggtagtgtcttcagcactatttaacgaggacaagctttgcttctcttttcggctgtgtaccgtaatcatgcaaaacaacgcgaacgggaacctgatacaagatgatataggtttcctgccagaggaagagtggaacatattcctctatagcggaatacttattaacattaaaagcgcactctcacagtccagactcacatccaccttcgagattggagagtctcaacacttgcaatggctgtcagactcgaggtggaggcagtgccagtatgtatcaactcacctggaacctttttccctgctgtgcaagtccctgttgtcaaacgttagccaatgggacacatttaaaaatagtaaagcagtgtattcgcttatatccacgccattttcaagcgagaacgcaagtcttgaagagaatacaaagccccctgaagagacagaactcctgaacgagaataaagagacgtgtaaccccatcaactttccttgggagaagctgacgtcctttcagcgactgatactcgtgaaagtgcttaggccagagagtttaaacaattctgttagaaagtttattacagagaagatggggaacaagtacctccaaaggactggggtaaatctaaaggatgcctataaaggctccaacgccagaaccccactgatcctcattcagacccacgggatcgacctaaccaatattttacttcggttcgcacaggagcttaaggggacgacccaccacgttaccataatttcactcggccgggatcaagcagcaaaggcagaggaccttatcctgaaggcactgaccaagacacagcagtgggtattcttacagaactgtcacttggctacctcattcatgccgcggttgtgcaccatagtggagagctttaactctcctaacgtcacaatagaccctgagtttagactgtggctctccagtaagagttactcttcgttcccgatccctgtgctgaaaaaggggcttaagatcgccgtggaatccccacagggtctgaaatccaatctgctccaaaccttcggctgcaccggaagcggggaagtaactgaggaaatcttcgagaaccccgattgtgggcaatggtggaaaaaactgctcttctccctgtgcttctttaatgccgtcattaacgagaggaaaaactacggcatcttgggatggaacatcgcctataaattcaactcaagtgacctcggtgtcgccataaaggtcctggagaacagcctgaggggtcagccctctatttcctggcaagccttgaggtatcttatcggcgaggtgatttacgggggaagggttatcgacaactgggataagcgctgtctgaaaaccctgctctataagttctgcaatcccgaagtgctgaaagacgatttcagttttagtaggtcagcatcgattaaagactacatacatataatccagtccttgcctgatgatgacttgcccgaggtactgggaatccaccccgaggccatcagatcatgctgggaaacgcagggtgagaaattcatcgagaatctgatcgccatgcagcctaagaccacgaccgctaatctgatgattagaccagaacaatcaaaagatgagctggtcatggaaattctgtcggaccttcttaagcggctgcctctgaccgtagagaaggaggaaatcgccgtgggcacccccagcaccctgaaatctatgatgtcctcatctatttgggaatcactaagcaaaaaccttaaggaccatgatcctctgatacattgtgtgctcttgactttccttaagcaagagatcaaaaggttcgacaaactgctgttcgtaatacataagtcactaaaagatctgcaattggcaattaaaggagaaattattctgacgcaggaattggaggaaatcttcaactctttcctgaatatgcgggtccctacactctggcagaaacatgcgtacaggtcatgcaagcctctgtcctcctggatcgacgacctgatccagcgcttgaactttttcaacacctgggccaaagtggcttatactgcgattcagcggagatatatgagattcgtcactgtctggaaacagtccattccaagcacatctcagaaatgcaaacacccagaagactccgagaataatttctttgagggcttccctagtaggtactggctacctgctttctttttcccgcaggcattcctcgcagccgtgttacaggactacggaaggtctcgtggtatcgctgtcgacgcattgacctttacccaccatgtgatctccaacactactgacaaggacgagaaatttagcgtgttcatgcccaagaagctcaacatcgtgaggcgagcttttaaagggtccgcttcaagccacacgggagtgtatatcttcggccttttcatcgagggtgcccggtggaatagagagcagaagatcctcgaggatagcttacccctggagatgtgctgcgatttccccgacatttacttcctgcctactaaaatttctactaaaacacctaatgcgtccaaccagactgatagtgagctgtacgctttcgagtgccctgtgtaccagacaccagagagatcaagaatcctggctacaacaggactgcccaccaatttcttgacaagcgtctacctctctactaagaaacccccttcacactggatcactatgcgtgtcgccttgctctgcgagaaaaatgagaagtag

SEQ ID NO: 186033 - DNA, 10524 bp, synthetic construct
  misc_feature 1..10524: note = Description of Artificial Sequence: Synthetic coding sequence
  source 1..10524: mol_type = other DNA
atgggccggcggagccagtggatctgggccatgcggtgccagatgctagtgcccgtactgtctctacacatcgggttggcccgcgcgttgggatgtgggtgcattgcctccaagatcgagtgtctaatccgttgcaacgcaccattccccctattggatgccgtgggctccgtcgcaagccaagaactgcagtcactaaccgggaccgttggcgtcaccagcggtgcggccgcgtaccctagatggaacctagcccgagcccgagcccccccacatctgccgggtacacaagacccgctccgcagagtgcgagatcctacaccaattgttgcatcttctccgggcagacggcgcggttcctggtctggcggttacggacaggaggcctcagaaccgggggtggtgggcctctgctgtgctgtgctcccaatccacccttcactggcccttgccggggtcgggggaccagacctgcggaggttccaggaaggcccccagcgtccttccgatcatggagccgcggagaaacatatggagacattcattcccattgatctgacgaccgaaaatcaggaaatggataaggaggagacaaaaactaaaccacgattgctgcgctacgaggaaaagaaatacgaggatgtcaagcctctggagacgcagcccgcggagatcgcagagaaggaaacactcgagtacaaaactgttcgcaccttttctgagtctctgaagtccgagaaaacggaagaacctaaagacgacgatgtcattcgaaacataatacgcttgagagaaaaattgggatggcaaactatcctgccccagcatagcctgaaatatggaagtagcaagatcgcaatacagaagattacactcaagaagccattagaagacgatggagagtttgtctactgcttgcctagaaagtctcccaagtccctctacaacccgtacgacctccaggttgtttccgcacacactgccaagcactgtaaggaattctgggtgataaccgcatcttttatatctaaattggattcaagtagaacttatagcctggacgagttctgcgaagagcagctgcagcaggccacccaggctctgaagcagctggaggatatccggaataaggcaattagtgagatgaagtctactttcctgaaggttgctgaaaaaaatgagatcaaagaatatttcgagagtaagctatctgaggacgataccacccattttaagctccctaaataccgccgactcctcgaaacattctttaagtttgtgatgctggttgactatatttttcaggaacttatcagacaacttatgaatactgcagttacacttctcctggagttgttcaacgggagcgccggtatgcctttctctgtagaaaagaagaatgaaaatctgattagaacgtttaaggataactcattcccaaccggcaagacgaccaacgactgtgaggaactggtggacaactctaagttgcacgctattagtgtgcagaagagtgaagtgaagactgacactgatatcaacgagatcctgaactccgtggaggttgggaaagacttgagaaagacttacgccccgatctttgaggtcaatctttgcctgcgaatcccagcagaaagtgattcttctgagaatagcaaagaaaatttccacgaatccgatcagtgccccgaggagtgcgtcatgtttgaagacgaaatgtctgagaataaggataactgtgtgaagaagcattctagtgaggaactgctcccgaaggcaaagaagtcaaaagaaattagttataacctggaagacattatctctgctaccataaccccactttgtcaggacccccagctcagcatttttattgacctggtcagcatcatggacctcccaaacaaaaccggaagcatcattcactacaaggagcaaactagatggccagattgtcacatcctgtttgaaaccgacccagcctaccagaacataatcgtgaacctgctaaccattattggcaatagtatgggtttggttaacgcctactctcataagttcatcaaatactgtactatgacagagaaagccaaaattatgtccatgaaaatcagcagcatgggcgagctgacaagcaaagagttcgaggccatcctgaatagatttagaaactactttcggcatattgttaatatggccattgagaagcgtattggtatctttaatgttgtggtggagtctagcttgcagcaattagaatgcgacccaaccgaaatcgaagaatttttagagcactttatctttctcaacgcaattagcagtaagatttctaagttagaaaaagagtttctcacaatgtcgcaattatactccgtggcaaaacaccatcaaatacacatttcagaggagcagatagccattttccaggttttactactgaagttttcgcagcttaaatcctccatgaagctgtctaaaattaataaggatacagccatcaccaaatttagagataacctggaggcttgtatatccggactacacgtcgacgtgggaaacctcaaggccaagattaggactccacttctgctgtgtgcaggaactcaagtctccaccgccatggagatgatccagaccctgtccggggaagccgcttcactcacaaacaaggccaaagcctatagccattatcaagattgtttctcagacagtcagtctcacatgcactctgttaatgtcgaagaaataacccagattgtactgagtgagattagtgacatcgagggggatctgacattaaggaaaaagctctgggaagctcaggaggaatggaagcgcgcgtcctgggagtggagaaactctagtctgcagtctattgacgtggagtccgtgcaaagaaacgtgtccaagctcatgcacattataagcgtacttgaaaaggagatctactccatttttataatccccagtattgacgatatttcagcccaactcgaagaaagccaggtgattctcgctacaataaaggggagcccccatataggtcctattaagagccagattatgttttataacgactgcgtcaagagctttgtatcctcgtacagccgagagaagctcgagaaagtgcacgctggcttgatgtgtcatctagaagaagtggcagatctcgtggtgctggatacaagcaatagccgcaccaaggccattctcggggcacttctgattctgtatgtgcactgcagggacattgtgatcaatttattgctaaagaacatctttaacgcggaagacttcgaatggacccgacaccttcagtataagtggaacgagaagcagaaactgtgttacgtgagccaaggtaacgcatcgttcacctatgggtacgaatatctcggctgtaccagtcgactggtgatcacccctcttacggacaggtgttggcttaccctaatggaggcactccacctgaatctcggcggctgcccagcaggaccggccgggaccggcaagactgagacagtgaaagacctggccaagtgtgccctgttcgcctttaagtgcaacacggctctgattaaacttcctaatagcctcattgtgttgacttgtttcggactcgagaaaacggtcctcgtgatgaatacagtgatgagctttcggttcgtgttggagggcaaggagatccgtattaatatgtcctgcgccgtctttattaccatgaatcctaggtatggcggaggggtggaactgcctgataatcttaaaagcctgtttagacctgtggccatgatggtgccacactaccagatgatagccgaaataatcctgttttccttcggtttcaagagtgccaattctttatcagggaagttaaccaacctatacgagttggcacgaaaacagctgtctcagcaagaccattacaactttgggttaagaagcctgaagattgttcttattatggccggtactaaaaaacgtgaatttaagtgtgacacctctgattccttgagtgaagcagacgagacattgattgtgatcgaagccatccgagaagcgtctcttcccaaatgtccacccgaagatgtgcctttgttcgagaacattatcggagacatctttccagaggtgaccgtgctgaaagtaaaccagttggccctcgagaaggtcatatatactgctactcagcaattggggttgcaaaactggtctagtcagaaagaaaagataatccaattttataaccagctccaggtgtgtgtgggcgtgatgctggtggggcccacaggaggtggcaagactaccgttcgccgcatactcgagaaagcacttacactcctgcccatagctgattttctctccgtggcagagcggaaatctgcctctaagatctccgagcgcaagggcaaggttgacatctgtgtgctgaatccgaaatgcgtcacactgagtgagctgtatggccagctagaccccaacactatggaatggacagacggcctcttgagcgcaacaatcagatcctacgtttacttcaacacacctaaaaatactaagaaggatatagatctgcgcctcaaatcgcgcatcagcgatctgagcaacgtcttcaagcttgacagctcagatacaacagagactgacgataatatcttcgaagagatcgaaaaggtcgtaaaaatccccgagaaccacaattttgactggcagtggattattctggacggccccgtggatacattctgggttgagaatctgaactctgtgctcgacgatacgagaaccttatgtctggccaattcagagaggattgccttgactaataagatcagggtgatcttcgaagtagataacctttctcaagcctcccccgccacggtgtcacgctgcgccatggtgtacatggacccagtagatctggggtgggagccatatgtgaagagctggctgctcaagacctctaaaattatatctcagtcaggggtcgactgcctcgagtttatgattaaaaactccgtgacagatggcctgcaattcattcggaacaggcagaagttccagccatatcctatggaggatatcacagtagtcatcaccctctgtcgcatcctggatgcttttttcgatttcatgggcaaaaacggtggtttcgagcagtcggacgatctgaatgatacctcgtccaaggaggctaacagccagagagaatctgttacttttaaagacattgaaaaacgggatgaaaatacatggtatcccgagaaaaacccagacaagctgacaaagatcatccagaagttgtttgtgttcgcgttcacttgggctttcgggggggcactgaaccgagaagacgagcaccgggaaaacattccgttttgcccttctttggaacccgactctctggcaaaggttacgtatgactttgacaaattggtccatgaattatttggcaactcctcccaagtgggcattaacctgcctaccggtgagtgttctatattcggctacttcgttgacattgagcagtgtgagtttataccttggtctgatttagtgcctaacgaccagacgctgattcagcgtgacaatccgacgaaaaaaccagaagtacgcacgaacaagaagctattgaaaaataatgaccacaaaggggtggtagtcagtacaattaacttcagtaccaatgtgaccgccgctaagacaaaagaaatgattctaaagaaactcatccggcgtaccaaagacacgctgggtgcacctaagaacaaccggatccttatctttatcgatgacatgaatatgcccgtctcagatatgtatggtgcacagccccccttggagctgatacgtcagttactcgacctgggcggcgtctatgatacagagaagaacacatggaagaatatccaggacttatcaatcgtggccgcctgcgtgccagtcgtgaatgacatctctccgcgactcctgaagcatttcagtatgctcgttctccctcacccctctcaggatatactgtgtaccatttttcagatcgggatcgatggttgcggaaaaaaaacttgcgctaccttggcttgctacctcactgacaacaagttatatagggtgccaataagccataaatgcgcttatatagagtttaaagaggtgttcaagaaggtctttatacacgctggtctaaaaggtaaacccacggttctgatggttcccaacctgaacatcgaacaggactcattcttggaggatctgaactacattatttcctctggtaggatcccagacctctttgagaacgtcgaactggatagcatagcaatgaaaatccggtacttaaccgagcaaagtggacatatggacaataggcaaagcctcctatcgttttttcagaagaggatctacaagaacttgcatatatttgtcatcatgtcgcctgagggacctagctttcgacaaaattgccgcgtttacccttctatgatttccagctgtactattgactggtacgagagatggccagaggaagctctcctgattgtggctaactctttcctcaaagagaaagtaaactttgaaaaccgagagaatctcaaagaaaaacttgcgcccacctgtgtgcagatccacaaaagcatgaaggacctgaaccgcaagtactttgaagagactggacgcttttattacactactccaaactcttatctccagttcatggaaacattcgcccatatcctgagagccagggaagaggagatgcaaactaaacgcgatagattccacatggggttgtctactattctggaggctaccacattggttacagaaatgcaggaggagctactgatactggggccgcaggtcgaacagaagacaaaggagaccgaaacattgatggagaagctgaggaaagattcgcaagtggtcgaaaaggtgcagatgcttgtcaagcaggatgaagagattgtggccgaggaggtgagaattgtagaggattacgcccagaaaacagctaatgagttaaaaagcgtccttcccgctttcgataaggccatcgtggccctgaatgctctggataaagccgatgtggcagaactgagagtttatacaagaccccccttcctggtgctaaccgtgatgaacgccgtgtgtattttgctgcaaaagaagcccaactgggccactgcgaagctgctgctaagcgagacaggcttcttgaaaaaactgatcaacctggacaaagacagcatccccgacaaagtgttcgtgaagctgaaaaaaatagtgacccttccagactttaatccacataaaattagccttgtcagcgtcgcatgttgtagtctatgtcagtgggtgattgctctgaacaactaccatgaggttcagaaggtcgtggggcctaagcagattcaggtggccgaggcacaaaacgttcttaagattgcacgccagagattggctgagaagcagcgcggactgcaattaataagcaggtggcacaatcagggcttaccacacggccagtactctgtggaaaatgctatcttaatcaaaaacgggcaacaatggcctctcctgatcgatcctcataggcaggcccataagtggattaggcaaatggaggggtccaggctacagaagctctcaattgaggattctaactatacgaaaaagatcgagaacgcgatgaaaacaggaggctctgtgctgctccagagctgtcaagcctctacctggcggaaaaaattgtacctttccaccgagatcgacaatccgcacttcctgcctagtgtgtacaacttcgttaccatgatcaactttacagttacctttcaggggctccaggatcagctgcttagcaccgtcgttacacacgaagtccctcacttggaggaccaacgctccaagcttcttgagagcattagtttagacgctatcactttggaggagctggaggagaagacactcaatctgctgcagaaagccctgggaagcatcttagatgatgataaaattgtcgatacactgcgaaagagtaagatgacatccaatgagattagtaaaaggatcgaggcaaccaaaaaggcagaaagcgagatccaggctatcagaaagaattatctccccattgcaacacgcggagccctcctgtactttctcgtggcagatctgacccagatcaattacatgtaccagtttagtctcgattggttccaccaggtgttcgtttccagcgttgtgagtaaatcaaaagaacaagaacatagcttcaagcgtgagaaggtttcaccaaaagaggtgcatgaattcatttccattagcaaggagcccaacttagagaatgagaagaatctgctggacaaacatatcaagtcagctatcgacatgctcacgaagtccattttcaaggttgtctcctctgcactgtttaacgaggataagctctgcttctcctttcggctatgtaccgttattatgcagaacaacgccaatggaaacttaatccaggatgacatcggcttcctgcctgaggaggaatggaacattttcctttactctggcattctaattaatattaaatctgccctttctcagtctcgtctaacctcaacattcgaaattggtgaatcccagcacttgcagtggctctcagacagcagatggaggcagtgccagtacgtctctacgcacctggagcctttttcactgctctgcaagtcacttctatcaaacgtttcccagtgggatactttcaagaacagtaaagcggtttactctcttatttcgacacctttcagcagtgagaacgctagtctggaggagaacaccaagccaccagaggaaaaacatacattttgtctcctgctccgcgctattaaccacacaggaactgatctgggcccagtgggcagggggcaatggttgacatccaccgcatgtgaccgccatacggacgtttgctctttttcgttcgcgcttaatgacggagtgcccgatgtagagcatgtccaggacatattctatggccactgcgtagataaataccacgtcaaggttcttcggccagaaagcttaaacaactccgttcgtaagttcattaccgagaaaatgggcaacaaatacttgcaaagaactggtgttaaccttaaggatgcgtacaaaggtagcaacgctcgcacacccctcattctgattcagacgcacggctctgctagcattaaggactacatccacatcatccagagcctgcctgacgacgacctgccagaagtattggggattcatcctgaggcgattcgcagctgctgggaaacccagggtgagaaatttatcgagaaccttatcgccatgcagcctaaaactacaaccgccaatctgatgatcagaccagagcaaagcaaagatgaattggttatggagattctctccgatctgctgaaacgcctgccgctgacagtggagaaggaggaaatcgcagtgggaacccctagtactctcaaaagtatgatgtcttcctccatttgggagtctctgtctaaaaatctgaaagaccacgacccccttatccactgtgtgcttttaacgtttctgaagcaggaaatcaagcgattcgacaagctgctgtttgttatccataagtccctgaaggatctgcagctggccattaagggcgagatcattctgactcaggagctcgaggaaattttcaattcctttctaaatatgcgtgttcccaccttgtggcaaaagcatgcgtaccgctcctgtaaacccctctcatcttggatcgatgatttgatccagcgtctcaacttttttaacacatgggccaaagtggcctacacagccatccagaggcggtatatgcgcttcgtcaccgtgtggaagcaatccatcccctctaccagccagaagtgcaaacatcctgaggattcagagaacaacttcttcgagggctttccaagtcggtattggcttcctgctttcttttttcctcaagcgttcctggctgccgtgctccaggactatggtcgctctaggggcatagcagtagatgccctgactttcacacatcacgtgatctctaacaccacggacaaggacgagaagtttagtgtgtttatgcccaagaaactgaacatcgtccggcgggcttttaaaggatctgcctcttctcacactggcgtctacatctttggactgtttattgaaggtgcaaggtggaatcgcgagcagaaaattttggaggacagcctcccactggaaatgtgttgtgatttccctgacatctactttctgcccaccaagatcagtacaaagacacccaacgccagtaaccagacagattccgagctgtatgcttttgagtgtccagtctatcagaccccagagcgatctagaatcctggccacaactggacttcccaccaacttcttaacctcggtctacctgtccacaaagaagccgccatcccattggataaccatgcgggtggccctgctctgcgaaaagaatgaaaaatag

SEQ ID NO: 186034 - DNA, 2619 bp, synthetic construct
  misc_feature 1..2619: note = Description of Artificial Sequence: Synthetic coding sequence
  source 1..2619: mol_type = other DNA
atgagcagcaaggccgagaagaagcagcggctgagcggccggggcagctcccaggccagttggtccgggagagcgacccgcgccgccgtcgcaacacaagagcaggggaacgcccccgccgtcagtgaacccgaactgcaggccgaacttccaaaagaagaacctgaaccccgactggagggaccccaggctcagtcagaggaaagcgttgaaccagaagcggacgttaaaccacttttcctgagcagagccgctctcactggactggctgatgcagtgtggacccaagaacacgatgccattttggagcattttgcccaggacccaacggagagtattctgacaatatttatcgatccctgctttgggctgaagttagagttgggaatgcctgtacaaacacagaatcagctcgtttacttcatccgccaggctcccgtgcccatcacctgggagaattttgaagccaccgtgcaatttggcaccgtgaggggcccctacattcccgccttattgcggctgctcggcggagtgtttgccccacagatcttcgccaatacggggtggccagaatctatccggaaccactttgccagccacctccataagttcctggcatgcttgactgacactcgctacaagctcgaaggtcatactgttctgtatatccccgcggaggctatgaatatgaaacctgaaatggtgatcaaagacaaggaattggttcagagactagaaacaagcatgatacattggacgcggcagatcaaggaaatgcttagcgcccaggagacagttgagaccggagaaaacttaggccctttggaagaaattgagttctggcggaacagatgcatggatttaagcggaatcagcaaacagctggttaagaagggggtgaagcatgtagaatctatccttcatctggcaaagtccagttatcttgctcctttcatgaaacttgcccagcagattcaagatggttcccgacaggcccagagcaatttaacgttcctgtctatactaaaagagccctaccaggaacttgctttcatgaaacccaaggatatttctagcaagctgcccaagctgatatcactcattcggatcatatgggttaattctccgcattacaatacgcgcgaacggcttaccagcctctttcgcaaaatgagcaatgagattatccgcctctgttgtcacgccatctcgctggatcggattttcgagggttacgtgagtagttccaaggaggacctacaggggtgcatcctgtgctgccatgcatggaaagatcattatgtccaggccgtgcaaatgcacattcaatttagttcacgtggctgggtactggatcagacaagcatctttgcccaggttgacgcatttgtacagcggtgcaaagatctgatcgaggtgtgtgattgccagtatcacttcgctcgttgggaagatgggaagcagggcccactgccatgcttcttcggcgcgcaaggacctcagatcacacgtaatttgctggaaattgaagacattttccacaaaaatctgcatacactgcgcgctgtgcgaggcggcatactggacgtcaaaaacacttgctggcatgaggactataacaagttcagggctggtattaaggacctagaagttatgactcaaaatctgatcacaagtgctttcgagctcgtaagagacgtccctcacggagtgcttctgctggacacttttcatcgtttggcctcccgggaagcaatcaagaggacgtacgacaaaaaggccgtggacttgtacatgctcttcaactccgagctggcgctggtcaaccgcgagaggaacaaaaagtggcccgacctggaaccttatgttgctcagtacagtggtaaagcgagatgggtgcatatcctccgaagacggatcgatcgggtgatgacctgtctcgctggggcgcacttcttgccacggataggtaccggtaaagaaagtgtgcacacataccagcagatggtccaggccatcgatgagctggtgaggaagacatttcaggagtggacaagcagtcttgacaaggactgcattcggagattagatacgccattactgcgcatctcccaggagaaagcaggcatgcttgacgttaacttcgacaagtatcggagccacctggccccttttccatacaccccactgttacaactatcccaggagttccactcacatctgttgactcccctcttcattatcctctcactatcccacacgatctgcctcctatcttctttttacttttttttctcatccttcatttttgtttctccgcatctccccccgtgctatcagcactttaacttcacaacatacttgaagacccaacaaaacaaaaccatgattggccaagcacgctggctgacacctgtgattcccgccctttgggaggcagaggtgggcgcatcactagagccaagatctctccgcacggcgtgggctacgtggcagaatcccgtcagtgcaaaaaacaccaagatttcctgggcttggtggcataaacccgttgtgtcggccacctgggaaggagaggtgggtggatccccagaacccgggcgccagcggttgcagtag

SEQ ID NO: 186035 - DNA, 12591 bp, synthetic construct
  misc_feature 1..12591: note = Description of Artificial Sequence: Synthetic coding sequence
  source 1..12591: mol_type = other DNA
atgagcagcaaggccgagaagaagcagcggctgagcggccggggcagctctcaggcctcttggtcggggagggcaaccagagccgcagtcgccacacaagaacagggcaacgcccccgctgtgtctgaacctgagcttcaggccgaactccctaaggaagaacccgagcctcgtttagaggggccacaagctcagagcgaagaatcggtcgagccggaggctgacgtcaaacccctcttcctttcccgggccgccttaaccggactggccgatgctgtgtggacacaggagcatgacgccattcttgagcacttcgctcaagacccgaccgagtctattttgacgattttcattgatccatgcttcgggctcaagctggaactaggaatgcccgtccagactcaaaaccagctggtgtattttataagacaggcccctgtgcccatcacctgggagaatttcgaggctactgtccaatttgggaccgtgcgcggcccatatattcctgctttattacggctgcttggcggcgtcttcgccccacaaattttcgccaataccggttggcctgaaagtatccggaaccacttcgcaagccatctccacaagtttctcgcttgtctgaccgataccagatacaagctggaaggccacaccgtgctttatatccccgccgaggcaatgaatatgaaacctgaaatggtgatcaaagataaggagcttgtgcaaaggctggagacttcgatgatccactggacaagacaaatcaaggagatgttgtccgcacaggagacagtcgagaccggagaaaacctgggacctctcgaagaaatcgaattttggcgcaataggtgtatggacctctctgggatctctaagcagttagttaagaagggcgtgaagcatgtcgagtccatattgcatttggctaaatcttcctatttggctccattcatgaagctggcccaacaaatccaggacggcagccgtcaggcccaatctaatctgacctttctgagcatactgaaggaaccatatcaagagctggctttcatgaagcccaaggatatctccagcaaactccctaaattaatttcacttatcagaattatttgggtcaactcgccgcattataatacacgcgagcggctgacctctcttttccggaaggtctgcgattgtcagtaccactttgccaggtgggaggacgggaagcaagggccgctgccctgtttttttggtgcccagggaccacagatcacacgcaacttgctcgagatcgaggacatctttcataaaaacttgcacaccttgagagccgtgcgcggtggcattctggatgtcaagaatacatgttggcacgaggattataataaatttagagccggcatcaaggacctggaggtgatgactcagaacctgatcacatctgccttcgagctcgtgcgcgacgttccccacggtgtcctattacttgatacttttcacagactggcatccagggaggctattaagcgtacgtatgacaaaaaagccgtggacctctacatgctgtttaactccgaactggcccttgtaaacagagagaggaacaagaagtggcctgatctggaaccatatgttgcccagtattccggcaaggcacgatgggtccacattctacgaaggcgaattgatcgggtcatgacttgcttggccggggcacactttttacctcggattggaaccggcaaagagtccgtccacacttatcaacaaatggttcaagcgatcgatgaattggtccggaaaacgtttcaagagtggaccagtagtttagacaaggattgtattcgacgcctcgacactcctttactgcggattagccaggaaaaggccgggatgctggacgtgaacttcgacaaatcattgcttatcttgttcgccgagattgattattgggagcgactgctgttcgagaccccacattacgttgtcaatgtggctgaaagggctgaagacctgcggatcctgagggaaaatcttttgctggtagctcgcgactacaatcggattatcgccatgttatctcccgacgagcaggctctgttcaaggagcggattcggcttctcgataaaaagattcacccgggtctcaaaaaactgcactgggcccttaaaggcgcttcggcgtttttcatcacagagtgccgaatacatgcaagcaaggttcagatgatagtcaacgaatttaaggcctctaccctgacgattgggtggcgggctcaggaaatgagcgagaaacttttggtaagaatcagcggcaagagggtgtaccgtgacctagaattcgaggaggatcaaagggaacatcgtgccgccgtgcaacagaagctgatgaatctgcaccaagacgtggttaccattatgaccaacagctacgaagtgtttaaaaatgatggcccagagattcagcagcagtggatgctgtacatgatcagacttgaccggatgatggaagatgccctccgcctaaacgtaaaatggtccttactggagctttccaaggcgataaatggggacggtaagacatcccctaatcccttgttccaagtcttagtaattctcaaaaacgatctccagggttccgtcgcccaagttgagttttcccctacattacagacgctcgccggcgtcgtgaatgacatagggaatcacctattctctacaatctctgttttttgccatcttcccgatatactcactaaacgcaagcttcatcgtgagccaatccagaccgtggttgaacaggacgaagatattaaaaagattcaaacccagatatcctctggaatgactaacaatgcctccctcctacagaattatctgaagacatgggacatgtacagagaaatctgggagatcaacaaggactcatttattcacagatatcagcggttgaacccacccgttagcagcttcgtggcagatatagcaaggtatacagaggtggcaaataacgtgcaaaaggaggagacagtcaccaatattcagtttgtccttctcgactgcagccatctcaagttttccttagtgcaacattgcaacgagtggcagaataagttcgctactctgctgcgcgagatggcggccggaagactcctggaattgcatacttacctgaaggaaaacgctgagaagatctccaggcctccacaaacactggaagagttaggcgtgtctcttcagctcgtggacgccctgaagcatgacttggccaacgtggagactcagataccccctatccacgagcagttcgcgatcctggaaaagtatgaagtaccagtggaggactcggtgctggagatgcttgacagcctcaacggggagtgggttgtctttcagcaaactctgcttgactctaagcagatgttgaaaaagcataaggagaagttcaagacggggttgatacactctgcagatgattttaagaagaaagcccataccctcttggaggactttgaattcaaaggccatttcacatcaaacgtgggctacatgagcgcgcttgatcaaatcactcaggtgagggccatgttaatggccatgcgagaggaagagaacagcctgcgggctaatctgggtattttcaaaatagagcagcctcctagcaaagacctgcagaatctagagaaagaactcgatgctctgcagcagatatgggagattgcaagagactgggaggagaattggaacgagtggaaaactggacgattcttgatactgcaaactgaaaccatggagactaccgcccacgggctgtttcgtcgtctgacaaaacttgctaaagaatataaagatcgcaattgggagataatcgagaccacaaggagcaagatcgagcagttcaagagaacaatgcctctcatctccgacctcaggaatccagctctgagagagcggcactgggatcaggtccgggacgaaattcagcgcgagttcgatcaggagtcagaatccttcacattggagcagattgtcgagctgggcatggaccagcacgtggaaaagatcggagaaattagcgcttcggctaccaaggagcttgcgatcgaggtcgcactgcaaaatatcgcgaaaacctgggacgttacacagctggacatcgtcccctacaaggacaagggtcaccaccgcttgcgagggactgaagaggtttttcaagcgctggaggacaaccaagttgctctgtctaccatgaaagcgtcccgatttgtaaaggcatttgaaaaagatgtggaccattgggaaagatgcctgtccctgatcctggaggtaatagagatgattttgaccgtgcagcgtcagtggatgtacctcgaaaatatctttctaggagaggacattaggaaacaactgccaaatgaatccacgctttttgatcaagtcaatagtaactggaaagcaatcatggaccgcatgaacaaagacaataatgctttacgctctacccatcatcctggccttctggacacactaatagagatgaacaccattctggaagatatacagaagagcttggatatgtatctcgagaccaagcgccacatattcccacggttctacttcctaagcaacgatgacttgctcgaaatactcgggcagagtcgcaaccctgaagccgttcaaccacatctgaaaaaatgttttgataacatcaagctcctgagaattcaaaaggtggggggccccagctctaaatgggaagccgttggtatgttctctggtgatggggaatacatcgacttcctgcactctgtgtttctggagggtccagttgagagttggcttggcgacgtggagcagacaatgcgggtcacccttagggacctgttgcgaaattgtcacttggccctgagaaaattcctgaacaagcgcgataaatgggtcaaggaatgggcaggtcaggtagtgatcacagcgtcacagatccagtggaccgcagacgtgactaagtgtctgctgacagccaaagaacgcgcagacaagaaaatcttgaaagttatgaagaaaaaccaggtctctatattaaacaagtattccgaggccatccgcggtaacctcacgaagatcatgcgcctgaaaattgtggccctcgttaccatcgaaatccacgcccgagatgtactggaaaagctgtataagagcggactaatggacgttaattccttcgactggttaagccaactgcggttttactgggagaaagacctggatgactgtgttatccggcaaactaatacccagttccagtacaactacgagtatctgggcaatagcggccggctcgttataacgcccctgaccgatcggtgctatatgaccctgactactgcattacatctgcaccgcggcggcagccctaagggcccagctggcaccggaaagacagagactgtcaaggaccttggcaaagcacttgggatttacgtgatcgtcgtcaactgctccgagggcctcgattacaagtccatgggtaggatgtactctgggctggcgcagacgggggcctgggggtgcttcgacgagtttaatcggattaacatcgaggttctgtctgtggtagcacaccagattctgtgcatcctctctgccttggctgcaggactcacccacttccacttcgacggcttcgagattaatctagtatggagctgcgggatattcattaccatgaatccgggctacgcaggacggaccgaattgcctgagaatttgaagtctatgttcagacccattgctatggtcgtccctgactcaaccctgatcgctgaaattatcctgtttggtgaaggctttgggaactgtaaaatccttgctaagaaggtttacaccctctactccctggccgtacagcagctgtcccgccaggatcattacgactttggtcttcgcgctttaacctcgctcttgaggtacgccgggaagaaacgtcgcttgcagccagacttgactgatgaggaagtcttgctcctgagcatgagggacatgaacatagctaagcttaccagtgtcgacgctccgttatttaacgctattgtgcaggacctcttccccaatatcgagctgcctgtgattgattatggcaaattgcgagagacagtggaacaagaaatccgagacatggggctacagtctacccctttcaccttgacgaaagtctttcagttgtatgagaccaagaacagccggcattccaccatgatagtgggctgtacaggctctggaaagaccgcatcctggaggattctgcaggcatccctcagtagcctgtgtcgggccggcgatcctaactttaacattgtgagagagttccctctaaacccgaaggcactgtcccttggggagctgtatggggagtatgacttgagcacaaacgagtggaccgacgggattctgtcctccgtcatgcgcaccgcatgcgcggacgaaaaacctgatgaaaagtggatattatttgacggccctgtagacacgctttggatcgaaaatatgaactcagtaatggatgacaacaaggttctgaccctaatcaacggagagcgtattgctatgcccgagcaggtaagcctgctcttcgaggtagaggatctggccatggcctcccctgcaaccgtgagcaggtgcggcatggtgtacaccgattatgccgacttggggtggaaaccctatgtccaatcatggctcgaaaaaaggccaaaggcggaggtggaaccgttgcaacgcatgtttgagaagctcatcaacaagatgctcgcattcaagaaagacaattgcaaggagctcgttccactgccagaatacagcggcatcacctcactgtgtaagttgtacagcgccctcgctactcccgagaacggggtgaacccggctgacggagaaaactatgtcactatggtcgagatgacctttgtcttttctatgatctggagtgtttgtgcctccgtggatgaggagggacggaagcggatcgactcttacttgcgggagatcgaaggctcatttcccaacaaggacacagtttacgagtacttcgtggatccgaagatccgcagctggacctctttcgaagacaaattacccaagtcttggcgctacccacctaatgccccattctataaaatcatggttccgaccgtggatacagtaagatacaactacttggtgtcttctctcgttgcgaatcaaaaccctattctgttggtgggacctgtcggcacaggaaaaacctctatcgctcagtcagtgctgcagagcctgccatcatcacaatggagcgtgctcgtggttaacatgtccgctcagaccacctcaaacaacgtgcaatctatcatagagagccgtgtcgagaagaggacaaaaggagtgtacgtgccgttcggggggaaaagcatgattaccttcatggatgatcttaacatgccagccaaagacatgtttggttcacagccccctctggagttaattcggctgtggattgactatggcttctggtacgatcgcacaaaacagacaattaaatacatccgggagatgtttctgatggcagcgatgggcccccccggcggcggacgcaccgtgatctcaccacggcttcgatccaggtttaatatcataaacatgaccttccctactaagtcccagataatccggattttcggcacgatgattaaccagaagcttcaggatttcgaggaggaggtcaaacccattggtaatgttgtgacagaggctaccctggatatgtataatacagtggtccagcgttttctaccaacgccaacaaaaatgcactatctgttcaatttgcgcgacatatctaaggtcttccaggggatgctgagagcaaacaaggacttccatgacacaaagagtagcatcacgaggctctggattcatgaatgctttcgtgtgttctccgatagactggtggatgcggcggacaccgaagcctttatgggcatcatatccgacaagcttggctccttttttgatttgacttttcaccacctgtgccccagcaagaggcctccaatttttggggatttcctcaaggaacctaaggtttatgaggatttaacagacctcaccgtgctaaagaccgtgatggagaccgccttgaacgagtataacctgtcaccaagtgtagtgcctatgcagctggtcctgttccgggaagcaattgagcacattacccgtatcgttcgcgttattggtcagccccggggcaacatgcttcttgtcgggattggtggatcaggccggcagtctcttgctaggctcgcttcctccatctgcgattataccacatttcagatagaagtcacaaaacactataggaaacaagaattccgggacgacatcaagcgactttatcgacaggctggggtcgagctgaagacgacctctttcatcttcgtggacacgcagatagctgacgagagctttttggaggacattaataacatcctgtccagtggagaagtgcctaacctctacaagccggacgaatttgaagaaattcaatctcatatcatagaccaggcgcgtgtggagcaggtgcccgagagcagcgattccctctttgcataccttatagagcgggtccagaacaacctgcatattgtgctgtgcctctcccctatgggagacccttttcgcaattggatccgtcagtatccggctttagtcaattgtacaactattaattggtttagcgagtggcctcaggaggctttactcgaagttgcagaaaaatgcctcataggagtggacttggggactcaggagaatatccacagaaaagtggcccagatctttgttactatgcattggagtgtcgcccagtattcacagaagatgctacttgagttacggaggcataattatgtcacacccactaagtacctagaactgttgtccggatacaaaaagctcctgggagagaagagacaggaattgctcgctcaagcgaacaagctcaggactggtctgttcaaaattgacgagactagggaaaaagttcaggtaatgtctctcgagctcgaggatgctaagaagaaagttgcagaattccagaagcagtgtgaagagtatctggtcatcattgtccagcagaagagggaagctgatgagcaacaaaaggctctcgaaagcctgaacaaaaaggacatcggcgagatcaaatcatatggacgtcccccagcccaggttgagatcgtcatgcaggccgtgatgatccttcgtggtaacgagcctacctgggcagaggccaagcgccaacttggtgagcagaacttcatcaagagtctcattaatttcgacaaggataacattagcgacaaggttcttaaaaagattggagcttactgcgcacaacccgacttccaacccgatatcatagggcgtgtctccctggcagctaagagcctgtgtatgtgggtccgggccatggagctgtacggtcgattataccgggttgtagagccaaaaaggatccgcatgaatgcagccctcgcccagctccgtgagaagcaggctgctcttgcggaagcacaggagaagctgcgggaggtggctgagaagctagaaatgctgaagaaacagtacgatgaaaagctggcacaaaaggaggaactgagaaaaaagtctgaagaaatggaactaaaactggagcgggcgggaatgctggtgtccggattggccggggaaaaggcccggtgggaagagactgtgcaaggcctcgaagaagaccttggctatctggttggcgattgcctgctggcagccgccttcctgtcatacatgggcccattcctgaccaattatagggatgaaatcgtaaaccagatctggattggaaagatctgggaactgcaggtcccttgctctcctagcttcgctattgacaatttcctgtgtaatcccactaaagtccgggattggaatattcagggactaccttctgacgcgttctctacagaaaacgggataattgttacacgggggaaccggtgggcccttatgattgatccacaggcccaggcccttaagtggataaagaacatggaaggaggccaggggctgaagataatcgatcttcagatgagcgattatctgagaattttggaacatgctattcatttcggctaccctgtgcttttgcagaacgtgcaggagtaccttgatcctactctgaaccccatgctgaataagtcggtcgcccggattggaggacggcttttgatgcggataggcgataaggaagtggagtataacaccaacttccggttctacattacgaccaaactgtccaacccccattattcccccgaaactagcgcaaaaacaactatcgtgaacttcgcagtgaaagagcagggactggaagcacagctcctagggatcgtggtgcgaaaagagagacccgaacttgaggagcaaaaggatagcctcgtgataaatatagcagccggtaagagaaagcttaaggaattagaggatgagatcctgcgactgcttaatgaggccacgggctcgctcctggatgatgttcagctagtgaatacattgcacacctccaagatcaccgccacagaggtgactgagcagctggaaacttctgaaaccaccgagatcaacactgaccttgcacgggaggcatacaggccttgcgcccaacgcgcaagcattcttttttttgttttaaatgacatggggtgcatcgatcctatgtaccagttttctctggacgcgtacatcagcctgttcattctcagcattgacaaaagccaccggtcaaacaagcttgaggatcggattgactacctaaacgattaccacacttatgccgtgtatcgctacacatgccgtacactgttcgagcgccacaagctcctgttctcatttcacatgtgtgcaaagattcttgagaccagcgggaagctcaacatggatgaatacaattttttccttcggggcggtgtggtgctcgatcgcgaggggcagatggataatccgtgtagcagctggctagccgacgcttattgggataacattacagagctggacaagctcaccaacttccacggtctcatgaacagcttcgagcagtacccacgggattggcatctttggtacacaaatgccgcaccagagaaagctatgctgccaggtgaatgggaaaatgcctgcaatgagatgcagagaatgctgatcgtacgttctttacggcaggaccgagtggccttctgtgtgacttctttcatcataacaaatttgggctcccgctttatcgaaccacctgtgctcaacatgaagtctgtgctggaggactctaccccgaggtccccattggtgtttatactgagcccaggggtagacccaacatctgctctgctgcagctcgctgagcatatgggaatggcccagcgctttcacgcactcagcctaggccaggggcaagcacccatagctgcaaggctgcttcgcgagggcgtcacccaaggccattgggtgttcttggcaaactgtcacctcagtctgagctggatgcccaacctcgataaactcgtggaacagctgcaggtggaggaccctcacccctcgtttcgcctctggctcagttccatccctcaccctgatttcccaatctcaatcctccaggtctccatcaagatgactactgagccccccaagggattgaaagcgaacatgaccaggttatatcagctgatgagcgagccacagttttcacggtgctcaaagcctgccaaatataagaaactcctgttctctctgtgtttttttcactccgttctgctggaacggaaaaaatttctgcagctaggatggaacatcatctacggattcaacgatagtgacttcgaggtttcagagaatctgctgagtctatatttagacgagtacgaggaaactccatgggatgctttgaagtacctgatagcgggaatcaactacgggggccatgtgactgatgactgggatagacgactgctgacaacctacattaacgattatttttgcgatcaaagcctctcaacgccattccacagactctcagccctggagacatacttcatccccaaggacggctctttagcttcttataaagaatatatctcactgctgcccggaatggacccccccgaagcctttggtcagcaccctaatgcggatgttgccagccagattaccgaagcacagactttatttgatacattgctgtcattgcagccacagattaccccaactagagcagggggtcaaacccgggaggagaaagtgctggagctggctgccgacgtgaaacagaagattcctgagatgatcgattacgaaggtacccagaaactgctggctctggacccctcacccctgaatgtagttctgctccaggagattcagcgctacaacaccttgatgcagacaattcttttctcccttaccgatctcgagatcccaagttgtgtctcccataaaagcgagcgcgtagtcttagagctttccgcagtgaagcatcccagacagtag

SEQ ID NO: 186036 - DNA, 13284 bp, synthetic construct
  misc_feature 1..13284: note = Description of Artificial Sequence: Synthetic coding sequence
  source 1..13284: mol_type = other DNA
atgagcagcaaggccgagaagaagcagcggctgagcggccggggctcttcccaagcttcatggtcaggccgggccacacgggcggcagtggcaacccaagagcagggaaacgcgcccgccgtttcggagcctgagctgcaggctgaactgccaaaagaggaaccggaaccccgtttggagggtcctcaggcacagtctgaggaatccgtcgagccggaggctgatgtgaaacccctctttctttcaagagctgccctgactggtctggcggacgctgtgtggacccaggaacatgacgctatactggagcactttgctcaggaccctaccgaaagtatcctgactatatttattgacccttgtttcggactgaagctcgagcttggaatgccagtgcagacccagaatcagctggtttattttatccggcaggcccccgtccccatcacctgggagaacttcgaggcaactgtacagttcggcaccgtccggggaccatacattccagccttgctccgactgcttggcggagtcttcgcccctcagatatttgcgaatactggatggcctgagtctatccgcaatcacttcgcgagtcatctccacaagttcctggcatgcttgaccgataccagatataaactcgaggggcatacagtgctctacatacctgcagaggccatgaatatgaagccagaaatggtgataaaggataaagagctggtgcagcgccttgagacgagcatgattcattggacccgccagattaaagagatgctaagtgcccaagaaacagtggagactggtgaaaatttgggcccgctcgaggaaatagaattctggcgcaatcggtgcatggacctgtccggcatcagcaagcagctggtgaaaaaaggtgtgaaacacgttgagagtattctccatctggcaaaatcatcatatttagctccattcatgaagctcgcgcagcagatccaggatggaagcaggcaggctcagagcaatctcacttttttatccatcctcaaagaaccgtaccaggaattggcatttatgaaacctaaagacattagcagtaagttgcccaaactgatcagcctcataaggatcatctgggtcaacagtccgcattacaatactcgcgagagactcacatctctcttccgaaaagtgtgtgactgccagtaccactttgctaggtgggaagacggcaaacagggtcctctgccgtgtttttttggagctcaagggcctcagatcacacggaacctgctggagattgaggatatatttcacaagaacctacatacactgagggcagtaaggggaggtattctcgatgtgaagaatacctgctggcacgaggattacaacaagtttcgagcgggcatcaaggacctggaagtgatgactcagaacctcattactagcgctttcgagctggtgcgggatgtcccccacggagtcctgctgctggacacattccatcgcctggcaagcagggaggcgataaaacgcacatatgacaagaaagccgttgatctatacatgttgttcaattcagagttggcgctggtgaaccgagagcgaaataagaaatggcctgatcttgagccttacgtggctcaatatagcggaaaagcacggtgggtgcacattcttaggaggcgaattgacagagtgatgacttgtctggcaggcgcccatttcttgcctaggatcggcacgggcaaggaatccgtgcatacataccagcagatggtccaggccattgatgaattggttcgcaaaacctttcaggagtggaccagctctctggataaggattgcattcgtcgtttagacaccccacttttgcggatctcacaggaaaaagccgggatgctggacgtgaatttcgataagtcccttctgatcttatttgctgaaattgattactgggagcgacttctgttcgaaacccctcattacgtcgttaacgttgcagaaagggcagaagaccttagaattctgagagagaatctactgctggtagctcgggactacaacaggattatcgccatgctcagcccagacgagcaggccctctttaaggaaaggatccgcctgctggacaagaagatacaccccggacttaaaaagctccactgggccttgaagggcgcaagcgctttctttattacagagtgtcggatacatgcctcgaaggtgcagatgattgttaatgagtttaaagcatcgacgctaaccatcggatggcgagcccaggagatgtccgaaaagctgctagtgcgaatttccgggaaacgtgtctatagggatttagaattcgaagaagatcagcgagaacacagagccgccgtgcagcagaagctgatgaatctgcaccaggacgttgtgaccatcatgacgaattcttacgaggtgttcaaaaacgacgggccagagatccagcagcaatggatgttgtatatgatccgcctcgatcggatgatggaagacgcattgcgactgaacgttaagtggagcttgcttgaactgagcaaagcaatcaacggagatggtaaaacatccccaaacccactattccaggtcctggtaatccttaagaacgatttgcagggtagcgtggcccaagtggaattttcacctaccctgcagacgctcgcaggggttgtgaacgatattggaaaccacctgttttctacaatcagcgtcttttgccatttgcctgacatcctgactaagagaaaactgcacagagagccaattcaaactgtggttgaacaagatgaagacatcaaaaagatccaaacacagatctcatctggaatgaccaataacgcaagcctgctgcagaactatcttaagacctgggatatgtatcgggagatctgggaaataaacaaggactcttttatccacagataccaacgcttgaacccgcccgtctcttcatttgttgccgacatagccaggtatacagaggtggctaataacgtgcaaaaagaagagactgtgaccaacatccagttcgtgctgctggactgtagtcatttgaaattctcactggtccagcactgcaatgagtggcaaaataaattcgctactctgttgcgtgagatggctgctggacgtctgctggaactccacacatacctgaaggaaaacgcggaaaagatctctagaccaccccagactttggaggagctcggtgtcagcctgcagctggttgacgctcttaaacacgatcttgctaacgtggagactcaaatacctcctattcatgaacagttcgctattttggagaagtatgaagtgccagtagaggatagcgtgttggagatgctcgatagcctcaatggtgagtgggtggtattccaacagaccctcctggactctaagcagatgctgaaaaagcacaaagagaaattcaaaaccggtctgattcactcagccgatgattttaagaaaaaggctcatacattgttggaggacttcgagtttaagggccattttacaagcaacgttgggtatatgtctgcactcgatcaaatcactcaggtgcgggcaatgttaatggccatgcgcgaggaagagaattctctgagagccaacctggggatctttaaaattgagcagcctccctcaaaggatctccaaaatctcgagaaagagttggacgccctccagcagatttgggaaatcgctagagattgggaggaaaactggaatgagtggaagacaggacgctttctcattttacagaccgagactatggaaactactgcgcatggcctgttcagacgcctcacgaaactagctaaggagtataaggataggaattgggagatcattgaaacaactcggagcaaaattgagcagtttaaacggacaatgccgctgatttccgatctcagaaatcccgccctgagggaaagacactgggatcaggtgcgggacgaaatccagagggaattcgatcaggaaagcgagtcgtttacattagagcagatcgtcgagctcgggatggatcagcacgtggagaaaattggcgagattagcgccagcgccaccaaggagctggccatcgaggttgctctccaaaacatagccaagacttgggacgtgacacagctcgacatcgtcccttataaagacaaggggcaccatcggttgcgtggcacagaagaggtgtttcaggccctggaagacaatcaagttgctctctcaaccatgaaagcttctcgcttcgttaaagcatttgagaaagatgtggatcactgggagcggtgcctttccctaatactggaggttatagagatgatactaacagtgcagcggcagtggatgtatttagaaaacatcttccttggggaagatattcgcaaacagctacctaatgagtccacgctgttcgaccaggtgaattcgaactggaaggccatcatggatcgtatgaacaaggataataacgctctgaggagtacccaccacccaggcttgttggacaccttgattgagatgaatacgatcctggaagatatccagaaatcactggatatgtatctggagaccaagagacacatattccctaggttttacttcctcagcaatgatgatctcctggaaattttggggcaatcgaggaaccctgaggctgtacagcctcatttaaagaagtgcttcgacaatattaagcttcttcgcattcagaaggtaggtggaccgtcttccaaatgggaagccgtggggatgttctccggtgacggcgagtacattgatttcctgcacagcgtgtttctggaaggccctgtcgagtcatggctgggggacgtcgagcagaccatgagggttactctcagagacctgttgaggaattgccacctcgctctgaggaaatttcttaataagcgggacaaatgggtgaaggagtgggcagggcaggtggtgatcacagcgtcacagatccaatggacagctgatgtaactaagtgtttacttactgcgaaagagagagccgataagaaaatccttaaagtgatgaagaagaaccaagtctcaattctaaacaagtattccgaggccatccgtggaaatctgacaaagatcatgaggttgaagattgtcgccttggttacaattgaaatccatgccagagacgtcctggagaagctttataagagtggtttgatggatgtcaattcctttgactggctgagccagctccggttttactgggagaaagatctggacgactgcgtgattaggcagacgaacacgcagtttcagtacaattacgagtatttagggaactctggcagattggtaatcactcccctgaccgataggtgctacatgaccctaactacagctctgcacctgcatcgcggcgggagcccgaaaggcccagctggcacgggaaagacggagacagtgaaggatctgggaaaagcgctggggatatacgtgatcgtagtcaactgtagtgaggggcttgactacaagtctatggggcgtatgtactcaggcctggcccaaaccggcgcttggggctgttttgatgagttcaaccgcattaatatcgaagtccttagtgtggtcgcccatcagattctgtgtatcttgagtgcacttgccgccggccttacgcatttccacttcgatggatttgagataaacctcgtgtggtcctgcgggatttttattactatgaatcccggatatgccggacgaacagagctgccagagaacttaaagagtatgtttcgccctattgccatggtggtgcccgactcgactttaatcgctgaaatcattctgtttggagaaggctttggcaactgtaaaatcctagccaagaaggtgtatacactttacagtctagccgtgcagcagttatcaaggcaggaccactacgattttggcctgcgcgctctgaccagtctgcttcgttatgcaggaaaaaagagaagactgcagccagatttgaccgacgaagaagtgctgcttctgagcatgcgcgacatgaacatagcaaaactgacctctgttgacgcgcccttattcaacgctatcgtgcaagacctatttcccaacattgaactccctgtcattgactacggcaaactgcgggagaccgtggaacaggaaattcgcgatatgggcctccagagtactccattcactctgacaaaggtcttccaactctatgaaacaaagaactctcgccacagtaccatgattgtggggtgcaccggttctgggaagacagccagctggcgcattcttcaggcctctctgtcaagtctttgtagggccggagaccctaactttaacatcgttcgagaattccccctgaaccccaaagctttgtctctcggcgagctctatggagagtatgacttgtccacgaatgagtggactgacggcatcttgagtagtgtcatgaggactgcctgcgctgatgagaagcccgatgaaaaatggattctgttcgatgggcctgttgacaccctgtggatagagaacatgaacagcgtaatggatgataataaagtacttaccctcataaacggcgagaggatagccatgcccgagcaggtgagcctgctgttcgaggtggaggacttggccatggcatcacctgctaccgtgagcagatgtgggatggtgtacacagactatgccgacctgggttggaagccttacgtgcagtcgtggctggagaagcggccaaaagcagaggtcgaaccactacagcgcatgtttgaaaagctgattaataagatgttagcgttcaagaaggataattgcaaagagttggtaccattgccagagtattcaggcatcacaagcctgtgcaaactctattctgccctggccacaccggagaacggcgtaaaccccgctgacggggaaaattacgttactatggtggagatgacatttgtattcagcatgatttggagtgtgtgcgccagcgtggatgaggagggacgtaagcgaatcgatagctacctgagagagattgagggtagctttcccaacaaagatacagtttacgaatattttgtggatccgaaaattaggagctggacctcttttgaggataaactgccaaaatcatggagataccccccgaatgcaccattttacaagattatggtgcctacggttgatactgtcaggtataattatttagtatcatctttggtggctaatcagaaccctatccttcttgtcggacctgtgggaaccgggaagacctcgatcgctcagtctgttctccagtccctgccctcttcacagtggtccgttctggtggtcaatatgtccgctcagacaacttcaaataatgtgcaatcaatcatcgagagtagagtcgaaaaaaggacaaagggtgtctacgtaccattcgggggcaaaagtatgatcacatttatggatgacctgaacatgccagccaaagacatgtttgggagccagcccccgctggagctgatcaggctatggattgactacggattttggtacgaccggacaaaacaaactattaagtatattagagagatgttcctgatggcagccatgggtcctccgggaggggggaggacagtgatctcccctcgactacgcagtcggttcaacattataaatatgacattccccacaaagagccaaattatcagaattttcggtactatgatcaatcagaaactacaggacttcgaggaggaggttaaacctataggaaacgtcgtgaccgaggccaccctggatatgtataacactgtagttcagcgcttcctgccgactccaaccaagatgcactatctgtttaacctgcgggacatctcgaaggtgttccagggtatgctgcgagcgaataaagacttccatgatactaaaagtagcataacccgactgtggattcacgaatgtttccgtgtgttcagcgataggctggtcgacgctgccgacactgaagcttttatgggtatcattagcgataaactggggtccttcttcgacctgaccttccaccatctgtgtccttctaagagaccccccatcttcggagactttctgaaagagccaaaagtgtacgaggacctgaccgacctgacagttcttaagaccgtgatggaaaccgcgctgaatgagtacaacctgtctccttcagtggtcccgatgcagcttgtgctgtttagagaagcgatcgaacatattacccgaattgtgagagtcattggacagccccgtggaaacatgcttctagtgggaattggaggctctggacgccagtccctcgccaggctcgcatcctctatctgcgactacactaccttccagatcgaagttaccaagcattaccgcaagcaagaattcagggatgatattaaacgtctgtaccggcaagccggcgtggaactcaaaacaacaagtttcattttcgttgatacccaaatagccgacgagagctttttggaggacatcaacaatattctatctagtggtgaggtccccaacctgtataagccagacgagttcgaggagattcagtcccacataattgaccaggcccgcgtagaacaggtaccggaatccagcgactccttgtttgcctatctgatcgaaagagtccagaacaatttacacatcgtgctgtgtctgagcccaatgggagatcctttccggaattggattcgccagtacccagcattggttaattgcaccacaataaattggtttagcgaatggccgcaagaagctcttttggaggtggcagaaaaatgcctgatcggagttgacttgggaacacaagagaacattcaccgcaaggtagcccagatcttcgtcacaatgcactggagcgttgcccaatatagtcagaagatgctgctggagctgaggagacataactacgtgaccccaacgaagtatctcgagctgctcagcggctataaaaaacttctgggggagaaacggcaggaactgcttgcccaggctaataagcttcgcactggtctgtttaaaatcgacgaaacccgtgaaaaggtccaggtaatgtcactcgaactggaggacgcaaagaagaaggtggcggagtttcagaagcagtgcgaagaatacctggtgattattgtgcagcaaaaacgagaggcagatgaacagcagaaggcagtcaccgctaactctgagaaaattgcagtagaggagattaaatgccaggctcttgctgataacgcccagaaagacttagaggaagccctaccagcattagaggaggcgatgagagcccttgaaagtctgaacaagaaggatatcggcgaaattaagtcctatgggaggccaccagctcaggtcgagatagtaatgcaagccgtaatgatattacggggcaatgagcctacctgggctgaggccaaacggcagcttggagaacaaaatttcatcaagagcctcattaactttgacaaagacaatatcagcgacaaggtgttaaagaaaataggagcctattgtgcacagccagattttcagcctgatattatcggcagggtttctctcgccgccaaatctctgtgtatgtgggtgcgggctatggaactgtacggaagactctatagagtcgttgagccgaagcgtattagaatgaatgcggctctggcacagctccgtgagaaacaagccgctctcgctgaagctcaggaaaagctaagagaagtggctgaaaaattggagatgctgaagaagcagtatgatgagaagctggcccagaaagaggagttgcggaagaagtctgaagagatggaacttaagctcgagagggctgggatgttggtctcaggactggccggcgagaaggctaggtgggaagaaacggtccagggcctcgaagaagacctgggctacttggtgggcgattgtctgcttgcagccgcattcctcagttacatggggccctttctgaccaattacagagacgaaattgttaaccagatctggattgggaaaatctgggaactacaagtgccatgtagcccatcctttgccatcgataactttctgtgtaacccaaccaaagttagagattggaacattcaggggttaccgagcgacgccttctctacggagaacggaattattgttacacggggtaatcggtgggcactaatgatcgacccacaggcccaagcattaaagtggatcaagaacatggaagggggccaaggtctgaaaattattgatcttcagatgtctgactatttgcgcatcctggaacacgctattcatttcggataccccgttctcctccagaacgtgcaggagtatctggaccccaccttgaacccgatgctgaacaagtctgttgctcggatcggaggtcggttgctaatgagaattggagataaagaggtggagtacaacactaactttcgcttttacatcactaccaagctgagcaatccccactattcacccgaaactagcgctaagaccaccattgtgaatttcgcagtgaaagagcaaggactggaggcgcagcttctgggaatagtcgtgagaaaagagcgccctgagctggaagaacagaaagattctctggtcattaacatagccgctggcaaaaggaagctgaaagaactggaggacgaaatactgcgcttgctgaacgaggcgactggcagtcttttggacgatgtgcagctggttaacactctccacaccagtaagatcactgctactgaagtaaccgagcagctagaaacctctgagactacagagatcaacaccgacctggccagagaggcatatcgtccttgcgcacagagagcgtctattctgttttttgttttgaatgacatgggttgcatcgatccgatgtaccaattctccctggatgcgtatatctcactgtttattctgagtattgataaatctcatcgaagcaacaaacttgaagacagaatcgactacctaaacgattaccatacatatgccgtctacagatatacttgtagaaccctgttcgaaagacataaactgctcttctcgtttcacatgtgcgccaaaatcctggagacatccggtaagttaaacatggatgaatataacttctttctgagaggaggcgttgtgctggacagggagggtcagatggacaatccatgtagttcatggctggccgatgcatactgggataacatcactgaactggataagctgacaaacttccacgggcttatgaacagcttcgaacagtacccacgggactggcacctgtggtataccaacgccgcccctgagaaggccatgttaccaggcgaatgggagaatgcttgcaatgagatgcaacggatgctgattgtgcggagcctgagacaggaccgcgtggcattctgcgtgacaagcttcatcattacaaacctggggagtcgatttatagagcccccggtcctgaatatgaaaagcgtcctcgaagactccaccccgcgcagccccctggtctttatactgtcgcccggagtagatccaacatcagcgttactgcagctcgcagagcatatgggaatggctcagcgattccacgcactgagcctgggtcagggacaggcccctatcgccgcaaggttactgcgagagggcgtcacgcagggccactgggtctttctggccaattgtcacctaagtctgagctggatgcctaatctcgataaacttgtcgagcagttacaagttgaggaccctcacccttctttcaggctgtggctttcgtctatcccccaccctgattttcctatttcgattctccaagtttccataaaaatgacaacagaaccaccgaagggcctgaaggcgaatatgacccggttataccagctgatgtccgagcctcaattttcgagatgctccaaaccagctaagtataagaagctgctttttagcctctgcttcttccactcggtgttactggagcggaaaaagttcctgcagcttggctggaacatcatctacgggttcaatgatagtgatttcgaggtgagcgagaatttactcagtctttatctggacgagtatgaggaaaccccctgggacgcgttaaagtatcttatcgctggcatcaactatggtggacacgtgactgacgattgggatcgccgcctgctcactacttatataaacgattatttctgcgaccagtcactgagcacaccctttcacagactgtctgcactggaaacctacttcattccaaaggacggctcactggctagctacaaagagtacatatcactcctgcccggaatggaccctcccgaggctttcgggcagcatccgaatgccgatgtcgcttctcagatcaccgaagcacagaccctttttgataccctcttatctctacaacctcagattacccctacaagagcgggcggtcagaccagagaagagaaggtgctggaacttgccgctgacgtgaagcaaaagatccctgaaatgatagactacgaaggcacccaaaagctcctcgcccttgacccatcccctttaaatgtggttttgctacaggagattcaacggtacaataccctaatgcagacaattttgttttcgctgacagatctcgagaaaggtattcagggcttaattgtgatgtctacctccctggaagaaatctttaattgcatttttgatgcacacgtgccaccgctgtggggcaaggcgtaccccagtcagaagcctcttgcagcttggaccagggatctggccatgcgggtcgagcaatttgagctctgggcttcccgggcacgacctccagtcattttttggctgtctggcttcaccttccccactgggttcctaacagcggtcctccaaagtagtgcccgccaaaacaacgtgagcgttgatagcttgagctgggaattcatcgtttctaccgttgacgatagtaacctcgtgtatccgccaaaagacggggtgtgggtccgggggctgtacctggaaggcgccggttgggaccggaaaaacagctgtttggtagaagcagagccaatgcagctggtgtgtttgatgccaacgatacatttccgccctgccgagagtaggaagaaatcagccaaaggtatgtactcatgtccatgttactattatcctaaccgtgccggctcttccgaccgggccagctttgttattggcatcgacctgcgcagcggagccatgacccccgaccattggatcaagcgtgggactgcactactcatgagcctcgattcctag

SEQ ID NO: 186037 - DNA, 12351 bp, synthetic construct
  misc_feature 1..12351: note = Description of Artificial Sequence: Synthetic coding sequence
  source 1..12351: mol_type = other DNA
atgggcgccaccggccggctggagctgaccctggccgcccccccccatcctggccccgcctttcaaaggtctaaggctcgcgaaactcagggggaagaagaggggagcgaaatgcagattgctaaaagcgatagcatccaccatatgtctcactcacaaggacagcctgagctgcccccactccccgcatctgctaatgaagaaccctcaggtttataccaaaccgtcatgagtcattctttttacccacccttaatgcagcgaactagctggactctggcagctccgttcaaagagcagcaccaccacaggggaccaagtgactctatcgcaaataattattctttaatggcccaagacttgaagctgaaagacctgctgaaggtttaccaaccagcaacaattagcgtgcctagggataggacggggcaaggccttccttcctccggcaaccgctccagtagtgagccaatgaggaagaagactaaatttagctcccgcaataaagaggatagcactaggattaaattagctttcaagacaagtatcttctctccaatgaagaaggaggtgaagacttctttgacctttccgggttctcggcctatgtcaccggaacagcagttggacgtgatgctgcagcaggagatggagatggagagtaaggagaaaaaaccgtccgaatcagatctcgagagatactactactatcttaccaacggaatacgcaaagacatgatagctcccgaggaaggcgaggttatggtccgcatatccaagctcatctccaatactctcctcacttctccatttctggagccgttaatggttgtgctggtccaggagaaagagaacgactactattgtagtctgatgaagagcattgtagactacattctgatggatcccatggagcggaagcgcctctttatcgaatcgataccccggctgtttccacaacgggtgatccgggcacccgtgccttggcatagtgtgtacagatcagcaaagaaatggaacgaggaacatctgcatactgtcaacccaatgatgctgaggctgaaggagttatggttcgctgagttccgagatttgagattcgttcgaacagcagaaattttagctgggaagttacccctgcaaccacaggagttctgggacgtgatccagaaacactgtctggaagctcaccagacactgctcaacaaatggatacccacgtgtgcacagttgtttactagtagaaaggaacactggattcatttcgcacccaagtccaattatgactcaagccgaaatattgaagaatactttgcctcagtagctagtttcatgagcctgcagctgagggagttagtaatcaagtctctcgaggacctcgtctctttgttcatgattcacaaggatggaaatgatttcaaggaaccatatcaggaaatgaagttttttataccccagctgatcatgatcaagctggaagtgtctgagcccatcattgtgttcaacccgtcctttgacggctgctgggaactgattcgtgactccttcctggagatcatcaaaaattccaatggcatccctaagctgaaatacatccccttgaagttctccttcaccgccgctgccgcggaccgccagtgtgtcaaggccgccgaacctggtgaaccatccatgcacgctgcagccaccgccatggcagagttgaaaggctataatcttttattggggactgtgaacgccgaggagaaactggtaagcgactttctgatccagacatttaaagtctttcagaaaaaccaagtgggcccttgcaagtacctgaacgtgtacaaaaagtacgtggatcttctcgacaatacagccgaacaaaatatcgcggccttccttaaagaaaatcacgatatcgacgacttcgtgacaaagattaacgctatcaagaagcggaggaatgaaattgcgtccatgaatatcacggtcccactggcaatgttttgcctggatgctactgcgctgaatcacgacttatgcgagcgcgctcaaaatctgaaagaccatcttattcagttccaggtggacgtcaaccgcgacaccaacacatcgatctgtaaccaatatagccacattgccgacaaagtgtctgaggtacctgctaataccaaggaactggtctccctcatcgaatttcttaagaagagttccgccgtaacagtgttcaaactgaggagacagctacgggacgccagtgaaagactggagtttctgatggattacgcagacctgccttatcagatcgaggacatcttcgataactccaggaacctccttctgcacaaacgggatcaagcggaaatggaccttatcaaacggtgcagcgagttcgagctgcgtcttgaaggctaccaccgggagctcgagagtttccggaagcgcgaggtgatgacgactgaggaaatgaaacacaatgtggagaagttgaatgaactttccaagaatttgaacagggcgttcgctgagttcgagctaattaataaagaggaggagctgcttgaaaaggagaagagcacttatcctctgctgcaggctatgctgaagaataaggtgccttatgagcagctatggtctaccgcctacgaattctctattaagagcgaagaatggatgaatggccccctgtttcttctgaacgccgagcagatcgccgaggaaatcggcaacatgtggagaacgacatataagctgattaaaaccctgtctgacgtgcctgcgccccgtcgcctggcagaaaacgtgaagattaagattgataagttcaagcagtatataccaattctgagcatatcgtgcaacccgggtatgaaagacagacactggcagcagatatcagaaatcgtcggctacgagatcaaacctaccgagactacgtgtctttctaatatgctggaatttggtttcgggaaatttgtggagaaactggaaccaatcggggccgccgcttctaaagagtattctcttgagaagaaccttgatagaatgaaactcgactgggtcaacgttaccttctctttcgttaaatatcgagacaccgatactaacatcctctgcgcaatcgatgatatccagatgctgttggacgatcatgtgatcaaaacacaaacaatgtgtggttctcccttcattaaaccaattgaggcagagtgtcgaaagtgggaagagaaactcatccgaattcaggataacctggacgcctggctgaagtgtcaggcaacctggttatacctggaacccattttctccagtgaagatataattgcacagatgcctgaggagggacgcaagttcggaatcgtcgattcatattggaagagccttatgagtcaagccgtgaaggataatagaatcctagttgcggctgatcagccacggatggctgaaaagttacaagaagccaacttcctgttggaggatattcagaaagggctgaacgattatctcgaaaagaagcgactgtttttccctcggttcttctttttaagcaacgacgagcttctcgagattctgtccgaaaccaaggaccccctgagagtccagccccatcttaagaagtgtttcgaaggcattgcgaagttggaatttaccgataatctggagattgttggcatgattagctccgaaaaagagactgtgccatttattcagaagatttacccagccaatgccaaaggcatggtggagaagtggctgcagcaggtcgagcaaatgatgctggcctccatgcgagaggttattggcttgggaatcgaagcctacgtgaaggtgcctagaaatcactgggttttgcaatggcccgggcaggtcgtcatttgcgtgagttccatcttctggacccaggaagttagtcaagctcttgccgaaaatacactgctagatttcttaaaaaaatcaaacgatcagatcgctcaaatagtgcaacttgtgcgcgggaagcttagcagtggcgccagacttaccctcggtgccctgacagtcattgatgtgcatgcgcgcgatgtggtcgctaagctgtccgaagaccgtgtctccgacctaaacgatttccaatggatctctcagctgagatactattgggtggctaaggacgtgcaggtacagattattaccacggaagctctgtacggctatgaatacttaggcaattccccacggctggtcatcacccctctgacggaccgatgctataggactctgatgggcgcactcaagctgaacctgggaggtgcgcccgagggacctgccggcacaggaaagacagagacaaccaaagatcttgccaaagcactagcaaaacagtgtgtggtgttcaactgctctgacggactcgactacaaggccatgggcaagtttttcaaggggttggctcaagccggagcctgggcttgtttcgacgaattcaatagaatcgaagttgaggtgctctccgtggtagcccagcagatcttgagtattcagcaggctatcattcgaaaattgaagaccttcattttcgaaggaaccgaattgtcactcaaccctacatgtgccgtttttattactatgaatccagggtatgctggtagggccgaactgcccgataatcttaaagctctgttccgaactgtggcaatgatggtccctgactacgcgctgattggggagatcagcctgtatagcatggggttcctggattctcggtccctggcccagaaaatcgtggctacctatagactctgttcagaacagttgagctctcagcatcactacgactatggcatgcgggcagttaaatcagttctgaccgctgcaggaaacctgaagcttaaatatccagaggaaaacgaaagcgtcttgctcctgagagctctactggatgttaacctggccaagtttctagcccaggacgtcccactattccaaggaataatctccgatctgtttccaggggtggtcctgcccaagccagactacgaggtttttctcaaggtgctgaacgataacataaaaaagatgaagctgcagcctgtcccatggtttattggcaagatcatccaaatttacgaaatgatgctcgtgcggcatggttacatgatcgtaggggatcctatgggggggaagactagcgcatataaggtgctggccgcagcgcttggggaccttcatgctgccaaccagatggaagagtttgccgtggagtacaagattatcaatccaaaagcgattaccatgggacaattgtatgggtgttttgatcaagtgagtcatgagtggatggacggcgtgcttgcaaatgcattcagagagcaggctagttcactctcagatgatcggaaatggattatcttcgatggaccggtggacgccatctggatcgagaacatgaatactgtcctggacgataacaagaaattgtgcctaatgagcggagaaattatccagatgaatagcaagatgagcctgatcttcgagcccgcggacctggaacaggctagccctgctacggtgtcaagatgcggaatgatatacatggagccacaccagctagggtggaagccattgaaagactcttacatggatactctgccttcctctttaaccaaggagcacaaagaattggtgaacgacatgttcatgtggttggtgcaaccctgcctcgaattcggccggctccattgcaagttcgtggtccagacctcaccgatacacctcgccttttccatgatgcgtctgtattcaagtttgctcgatgagattagagcagtggaggaagaggagatggagctgggcgaaggactttcaagccaacagatctttctgtggttacaagggctctttcttttcagtctggtctggacagttgctgggacaattaacgccgacagtagaaagaagttcgatgtatttttccgcaatcttattatgggcatggacgacaatcaccccaggcctaagagcgtgaaactgactaagaacaatatttttcccgaaagggggtcaatatatgatttctacttcattaagcaggcgagcgggcattgggagacatggactcaatacataacgaaagaggaagagaaagtaccagctggtgccaaggtgagcgagctcatcattcccaccatggagactgcgagacagtccttcttcctcaagacttacctggaccacgagatccctatgctcttcgtagggcccacaggaactggcaagtctgccatcactaataacttcctgctccacctgcctaagaacacttatttgccgaattgtatcaatttctctgctcggactagtgccaaccaaacccaggatattattatgagtaagctggaccgacggaggaaagggctgttcggaccgcctattggaaaaaaggcagtcgttttcgtggacgacctgaatatgccggcgaaggaagtgtacggcgcccagccccctatcgaattgttgagacagtggatcgaccacgggtattggtttgacaagaaggataccaccaggctggatattgtggatatgcttttggtaaccgctatgggcccccctggcggaggccgaaacgatattacaggtcggttcacacggcacctgaacataatttctattaacgccttcgaagacgatatcctgaccaagatcttctcttccatcgtggattggcatttcggcaaagggtttgatgtgatgttccttcgctacggaaaaatgttggttcaggctaccaagacaatctatagagatgcagtcgaaaacttcctacctacgccgtccaagagtcactacgtgtttaacctccgcgatttttcgcgggtgatacagggtgtcctgctgtgtcctcacacccaccttcaggacgttgaaaaatgtatcaggctgtggatccacgaggtttatagagtgttctacgacagacttattgacaaagaggaccgtcaagttttcttcaacatggtgaaggaaaccacaagcaactgctttaagcaaacaatcgaaaaagtcctcatacacctgtccccaactggtaagatagtcgacgacaacatcagatccctcttttttggcgactatttcaaaccagagagcgaccagaagatctacgacgaaatcacagatcttaagcagcttacggtggtcatggagcattacctcgaagaattcaacaatattagtaaagcgcctatgtccctcgtcatgtttagattcgctatcgagcacatttcaaggatctgtcgtgtcctgaagcaggacaaaggacacctgctcttagtgggcatcggcggttctggcaggcagagcgccgcaaagctcagtacgtttatgaacgcgtatgagctgtaccagattgaaataactaaaaattacgccgggaatgactggcgagaagacctaaagaagataatcttgcaggtgggtgtggctaccaaatctacggtgttcctttttgctgataaccagataaaggacgagtcgtttgtggaggatattaatatgctcctcaacacaggggacgtcccgaacatttttccagccgacgaaaaggcggatatcgtggaaaagatgcagactgctgcccggactcagggtgaaaaagtggaggtcactcccctgtccatgtataatttcttcattgaaagagtgatcaacaagatttccttcagcctcgccatgagcccaatcggggatgccttcagaaacaggttgcggatgtttccttcactgatcaattgttgcaccatcgactggttccagagctggcctacagatgccctcgaattagtggccaacaaattcctcgaggatgtcgagctcgacgataacatccgggtggaagtggtttcgatgtgtaagtacttccaagaaagtgtcaagaagcttagtctcgattactacaacaagctcagaaggcacaactacgtgacacctacctcctacctagaactgattctgaccttcaagacactgttgaactcaaaaaggcaggaggtggccatgatgcgaaacagatatctcaccggccttcagaaacttgattttgctgcttcgcaggttgcagtgatgcagcgggaactgacagccctccagccgcaactgatcttgacgtctgaagagaccgctaagatgatggtgaagatagaggcggaaaccagagaagccgatggcaagaaactactcgtgcaggcagacgaaaaagaagcaaacgtggctgctgccattgcccagggtatcaaaaatgagtgtgaaggcgatctggcagaagccatgcctgcccttgaggctgctctcgctgccctcgacacacttaacccagctgatatttcccttgtgaagtcaatgcaaaatccacccgggcctgtaaagctggtgatggagtccatttgcatcatgaaaggcatgaagccggagcggaagcctgatccctctggctcaggcaagatgatcgaggactattggggagtcagtaagaagatcctgggagacctgaagtttctcgagagcctcaagacctatgacaaggacaacatacccccactgacaatgaaacgcatacgagagcgttttataaatcatccagaattccagcccgctgtgatcaagaatgttagttccgcctgcgaaggcctgtgtaagtgggtccgagcaatggaagtgtacgatcgagttgcgaaggtggtcgcccccaaacgagagcggctcagggaggccgagggtaagctagccgcccaaatgcagaaactgaaccagaagagagcagaactaaagctagtggtggatagactgcaagcattgaacgatgacttcgaagagatgaacactaaaaagaaagatctggaagagaacatcgaaatatgttcccagaagttggtgcgggctgagaaactgattagcggactagggggggagaaagatcggtggacagaggccgcacgtcagttaggcatcaggtacaccaatctgacaggggatgtgcttctatcttccggtacagtggcgtacctaggcgccttcacggttgactaccgtgtgcaatgtcagaatcagtggctggcagaatgtaaagataaagttatcccgggatttagcgacttcagcttgtcacataccctgggagacccgataaagattcgcgcctggcaaatcgccgggctacccgtagactctttttccattgacaacgggattattgtgagtaactcacgaaggtgggctctgatgatcgaccctcacgggcaggctaacaagtggattaaaaatatggagaaggctaataagctggccgtcatcaagttttccgatagcaattacatgagaatgctggagaatgctcttcagctcggcacccctgtcctgattgaaaacattggtgaggaattggatgcttcaatagaaccaattcttctgaaagcgacttttaagcagcaaggcgtcgaatatatgaggctgggtgagaatattatcgagtattctagagactttaagctctacatcacaacacggcttaggaatcctcattacctcccggaagtcgccgtgaaggtgtgtctcctgaacttcatgattacaccactgggactgcaggaccagctcctaggcatcgtggcggcaaaggaaaagcccgagcttgaagagaaaaagaatcagctgattgtggaaagcgccaagaacaaaaaacatctgaaagagatcgaggacaaaattctggaagtgctcagcatgtccaagggaaacattttagaagacgagaccgctatcaaggtactgagctcttctaaggtgctctccgaagagatcagtgagaagcagaaagtagcctcgatgaccgagacacagatagatgagaccaggatgggctacaaacccgtggcggtgcacagcgctaccatttttttttgtatcagcgatctagcaaacattgagcctatgtaccagtactcactgacatggttcattaacctctacatgcactctctgacccacagcacaaaaagcgaagagttaaacctccgaattaaatacatcatcgaccattttactctgtctatctacaacaatgtctgtcggtctttgttcgaaaaagacaaactgctcttctccctgctccttacaatcggaatcatgaagcaaaaaaaggagatcacagaggaagtgtggtacttcctgctaacaggaggcatagccctggataacccctatcctaatcctgccccgcagtggttgagtgagaaagcctgggccgagattgtgcgcgcctcagctctcccaaaacttcatggattaatggaacatctggagcaaaacctgggtgaatggaaactaatttatgactctgcctggccacacgaggagcaactccctggttcttggaagttttctcaggggctcgagaaaatggtgatcttgaggtgcttgcgtccagataaaatggtccccgctgtgagggagtttatcgcggaacacatggggaagctgtacatagaggcacccaccttcgacctccagggttcctataacgatagctcctgttgtgcccccctgatcttcgtgctcagcccatccgcggatcctatggcaggtctcctgaaattcgcagacgatttaggaatgggtggcacaagaacacagacaatctctctgggccaaggacagggtcctatcgcagctaaaatgatcaataacgccattaaggacggtacctgggtggtcctgcaaaactgtcaccttgcagcttcctggatgcctacattggaaaagatctgtgaagaggtgatcgtacccgagagtacgaacgctcgttttcgcctgtggctaacgtcatacccaagtgaaaaattcccagtgagcattttgcaaaacggtattaagatgaccaacgagccacctaaggggttacgcgccaatctgctccgtagctacttgaacgaccctatttccgatccagtgtttttccaatcctgtgctaaagccgtaatgtggcaaaaaatgctgttcggcttgtgtttctttcatgctgttgtccaggagaggcggaatttcggtccattaggctggaacatcccctatgaattcaatgagtccgacctgcgcatttctatgtggcagatccagatgttcctgaatgattacaaagaggtgccattcgacgcattgacctatctcaccggggagtgtaactacggagggagggttacagacgacaaggacaggaggctgcttctgtcgttactctctatgttttactgcaaggaaatagaggaagattattacagcctagcaccgggggacacgtattatattccccctcacgggtcgtaccagtcctatattgactacttacggaacctccctatcaccgctcacccagaagtcttcggacttcatgagaacgccgacattactaaggacaaccaggagacaaaccagctgttcgagggagttctgttaactttgccccggcagtctggcggttctggcaaaagccctcaagaagtggtcgaggagctcgcccaggacattctctcaaaactaccaagagattttgatctggaagaggttatgaagctttatccagtagtctatgaagaaagcatgaatacagtcctcagacaggaattgattaggtttaaccgtctgacaaaagttgtgagacgctccctgatcaacctcggaagggctattaaaggccaggtactgatgtccagcgagttggaggaagtgtttaattctatgttggttggtaaagtgcccgcaatgtgggcggcaaagagctacccgagtctgaagccactaggtggctacgtagccgacttgctggcacgactgacttttttccaggagtggattgacaagggaccacccgtggtattctggatctccggattctacttcacgcagagcttcctgactggagtgtcccagaactacgctcgcaaatacaccatcccaattgaccatataggtttcgagttcgaggttacccctcaggagacggtgatggagaacaacccagaggatggagcatacatcaaggggctttttctggaaggcgcccgctgggaccgcaaaacaatgcaaataggtgaatctctgcctaagatcctgtacgatcctctgcctatcatatggctcaagccaggagagtctgcgatgtttctccaccaagatatatacgtttgcccagtgtataaaactagcgcccgccgggggaccctttccacaacagggcactccaccaattatgtgctttccatcgagttaccaacagatatgccccagaagcactggatcaaccggggtgtggcatccctctgccagctcgacaactag

SEQ ID NO: 186038 - DNA, 2262 bp, synthetic construct
  misc_feature 1..2262: note = Description of Artificial Sequence: Synthetic coding sequence
  source 1..2262: mol_type = other DNA
atgggcgacatggactgcagcagccagaagatcgccaagagcgacagcatccaccatatgtcacacagccaggggcagccagaactgcctcctctgcccgcctctgctaatgaggagccttcagggctgtaccagactgtcatgagtcactctttttatccaccactaatgcagcggacttcctggaccttggctgccccttttaaggaacagcatcatcatagaggtcctagcgattccatagccaataactacagcttgatggcacaggatctgaagcttaaggacctgttaaaggtatatcagccggccaccatcagtgttcctagagatcgcactggacaaggattgccaagcagcggaaataggtcgtcctctgagcccatgcgaaaaaagaccaagttctcctcccggaataaggaggatagtacccgcatcaagctagccttcaagacaagtattttttcaccaatgaaaaaggaagtgaagactagcctcacctttcccggtagtcgccccatgagcccagagcaacagctggacgtgatgttgcaacaggaaatggagatggagagcaaggagaaaaaaccatctgagtccgatcttgagcgctattactattacctgactaacggaattagaaaagatatgattgcccctgaagagggcgaagtgatggtgagaattagcaagctcatttccaatactctgctgaccagcccatttctcgagccactcatggtggttctcgtgcaggagaaggagaacgactattactgtagcctgatgaaaagtatcgtggattacatcctgatggatccaatggagaggaagaggctcttcattgagagcatccccagactatttccccaacgagtgattcgtgcacccgtcccatggcacagcgtgtaccggagcgccaagaagtggaatgaggagcatctgcataccgttaatccaatgatgctgcgcctgaaagagctctggttcgccgaatttcgtgacctccgattcgttcgcacagctgaaatcttggcaggtaagctccctctgcagcctcaagaattctgggatgtgatccaaaagcattgtctggaggcacatcaaacccttctcaataaatggattcccacatgtgcgcagctctttactagcagaaaagaacactggatccatttcgctcctaagagtaattatgacagcagcagaaacatcgaggagtactttgcctcagtggcttccttcatgtccttacagctgcgggagttggtcattaaatccttagaagacctggtttcgctctttatgatccacaaggatgggaacgacttcaaggagccgtaccaagaaatgaagtttttcattccccaattaataatgataaaactcgaagtgagcgaacctatcattgtctttaacccatcatttgacggatgctgggaactcattagggattcattcttggagatcatcaaaaatagcaatggcatcccaaaagtggagagcgtcctctttcccgaactgaagggctataacctgctgctagggaccgtgaatgctgaggagaagctagtgagcgactttttaatccaaacttttaaagtctttcagaagaaccaggtgggtccttgcaagtacctgaatgtctataaaaaatacgtcgatttactcgacaacacagcggaacagaatatcgcagccttcttgaaggaaaaccatgatattgacgacttcgttactaaaataaacgctataaaaaaacggcggaatgaaatcgcgtcaatgaacattacagtgccattggcaatgttttgtctggacgctaccgcgcttaaccacgatctttgcgagcgagcacagaacctaaaagatcatttgattcagttccaggtcgatgttaatcgagatactaacaccagcatctgcaatcaatatagtcacatagcagacaaagtgtccgaagtgcctgccaacactaaggaactggtgtccttgattgaattcctgaaaaaatcatctgctgtcacggtttttaaactccgccgacagctgagggatgcttccgaaagattggaatttctgatggattacgccgacttaccttatgaagacatcaagctcaattctaccctgtttctttggcctgatcaaattgaggatattttcgataactcccggaatctgctcctgcacaaaagggaccaggccgaaatggacctgattaagcggtaccgagagagtctgggtctttcatggaaatag

SEQ ID NO: 186039 - DNA, 5664 bp, synthetic construct
  misc_feature 1..5664: note = Description of Artificial Sequence: Synthetic coding sequence
  source 1..5664: mol_type = other DNA
atgggcgccaccggccggctggagctgaccctggccgcccccccccacccagggccggctttccagaggtctaaggcacgcgagacgcagggtgaagaagagggatctgagatgcagatcgccaagagtgattcgatccaccacatgagccacagtcaggggcagccagagctcccgcccctcccagcgagcgccaatgaggaaccttcgggcctgtaccagacagtcatgtcccacagcttctatccccctctgatgcaacggacaagctggacactggccgccccgttcaaggaacagcatcatcaccggggaccaagcgatagcatcgcgaacaattacagtctgatggcgcaagatctgaagcttaaggacctcctcaaggtttaccagcccgccacgatctctgtgcctcgagatcggaccgggcaaggtctgccttctagcggtaatagaagtagcagcgaaccaatgcgcaaaaagaccaagtttagctcccgtaataaagaggactccacgcggattaaattggctttcaagacctcaatttttagccctatgaaaaaagaagtaaagacttctttgacattcccaggttcccggcctatgagtcctgagcagcagctagatgtgatgttacagcaagagatggaaatggagtcgaaagagaaaaaacctagtgaatccgacttggaacgctattattattatctgacaaatggaataaggaaagatatgattgctccagaagaaggcgaagtgatggtccgaattagtaagctgatatctaacacgctactgacatcacctttccttgagcccctcatggtggtccttgttcaggaaaaggagaacgactactattgttcattaatgaagtccattgtggattacatcctcatggatcccatggaaaggaaaagactattcattgaatcaatcccccgtttattccctcagcgggtgatacgggccccagtcccctggcacagcgtgtatcgcagtgctaagaagtggaatgaggagcacctacacaccgtgaatcccatgatgctgaggcttaaggagctgtggtttgccgaattcagggatctccggtttgtccgaacggcagaaattctcgccggtaagctccctctgcagccacaggaattctgggatgtaattcagaaacattgcctggaggctcaccagaccctgcttaacaagtggatcccaacatgcgcgcagttgtttacttcaaggaaggaacactggattcatttcgcgcccaagtctaactatgacagctccagaaatattgaagagtactttgcttcagtcgccagtttcatgtccctccaactccgggagctcgtcataaagtccctggaagacttagtgtcattgttcatgattcataaagatggaaatgattttaaagagccataccaagagatgaagttcttcataccccaactgatcatgatcaaactggaagtgtcagagccaattattgtattcaatccatctttcgacggctgctgggagctgatcagggattctttcctcgagattattaagaacagcaacggcatacctaaactgaagtacatcccattaaaattctctttcaccgctgcagctgcagaccggcagtgcgtcaaggctgctgagccgggggaaccaagcatgcacgctgcagccactgccatggcggaattgaaaggatacaatctcctcttgggaactgtaaacgcggaagaaaagctcgtatcggactttcttattcagactttcaaggtattccagaaaaaccaggtgggtccctgcaagtacctgaatgtgtacaaaaagtatgtggacctgctcgataacaccgccgaacaaaacatcgccgcatttctcaaagaaaaccacgacatcgacgacttcgtgacgaagattaacgccatcaagaaaaggagaaacgagatcgcctctatgaatataacagtccccctagcgatgttctgccttgacgcaacagctctgaaccatgacctttgtgagcgcgcccagaatctcaaagaccaccttatccagttccaagtggatgtcaacagggataccaacacctcaatctgtaatcagtattctcatatcgccgacaaagtgagcgaggtgccagcaaataccaaagagctggtgtctctcatcgaatttctcaaaaagtcctccgccgtgacagtgtttaagctaagaagacaactgcgtgatgcttctgaaagactcgagttcctcatggattatgccgacctgccataccagatagaggacatttttgacaattcccgcaaccttcttttgcacaaaagggaccaggctgaaatggatcttatcaaaaggtgcagcgagtttgaactgcgtttggaaggctatcatcgtgagctggagtcattccgcaagcgggaagttatgaccactgaggagatgaaacacaacgttgaaaagttgaacgagctcagcaaaaacctaaaccgcgcttttgctgaatttgagctgataaacaaggaggaggaactcttagagaaggagaagtccacatacccccttttacaggccatgctgaaaaataaagtgccatacgagcagctgtggtccacagcttacgagttttcaatcaaatcagaggaatggatgaacggccccctgtttttgctgaacgcggaacagatcgccgaggagatcggtaatatgtggcgaactacgtacaagctgattaagactttgtcggatgttcccgcgcctaggcgcctggccgaaaatgtaaaaatcaaaatcgataagtttaaacaatacattcctattctgtccatatcttgtaaccctggtatgaaagaccgccattggcagcagatctccgaaatagtagggtacgagattaagcccacggaaacgacctgtctgtcgaacatgctagagtttggattcggcaagtttgtggagaagctagaacccataggcgccgctgctagcaaggaatactcgctagagaaaaatttggacaggatgaaactggactgggtcaacgtcacattttcatttgtcaaatatagggacactgacacaaacatcttgtgtgcaatcgatgacatccagatgctgctcgacgatcacgtgatcaagacacaaacaatgtgcggttcacccttcattaaacccatcgaggccgagtgccgtaaatgggaggagaaactcatccgtatccaggataacttggacgcgtggctcaagtgtcaggctacttggctgtatctggagccgatctttagttctgaggacattattgcacagatgcccgaagagggccgcaaattcggcattgtggattcatactggaaatcgctcatgagccaggccgtgaaggacaataggatcctggtcgctgctgaccagccgcggatggctgagaaactacaggaggctaactttctgctggaggatatacagaaggggttgaatgattatctagagaaaaagcggttgtttttccctcggtttttctttttaagcaatgatgaattgctggagatcctcagtgagactaaggacccactaagagtgcagccacacctgaagaagtgtttcgagggtattgctaaattggagtttactgataacctggaaatagtaggtatgatcagcagcgagaaggagacagtcccatttatccagaagatttaccctgccaatgcaaaaggcatggtcgaaaagtggcttcagcaagtggagcagatgatgttggcatctatgagagaagttatcggactcgggattgaagcctatgttaaggtgccccggaaccactgggttcttcaatggcctgggcaggttgtgatatgcgtgagcagtatcttctggacgcaagaggtgagccaggctctagcagaaaatacactgctcgattttttaaaaaagagcaacgaccagatcgcacagattgttcagctggtgcgaggtaaactgagtagcggagcccggcttaccttgggcgccctgacagttatcgacgtgcacgcccgggatgtggtcgccaaacttagcgaggacagagtgtccgatttgaatgatttccaatggatatcccagctgcgctactattgggtggccaaggacgtgcaggtccagatcatcactaccgaagccctatacggctacgaatacttagggaacagtccgaggttggtaatcacccccctcaccgatcgctgctaccgcactttaatgggcgcactcaaacttaacctagggggtgcccctgaaggcccagccgggaccggcaagacagaaaccacaaaggatctcgctaaagctctagccaagcagtgtgtcgtgttcaactgttccgacggtttagactataaggctatgggaaagtttttcaaaggtctcgctcaagccggcgcgtgggcatgctttgatgagtttaatcgtattgaggtagaggtcttgagtgttgtggcacaacaaatcctgtctattcagcaggcaattatccggaagttgaagacctttatcttcgagggtaccgaactgagccttaatcccacatgcgccgtgtttatcaccatgaatccgggttatgccggtagggcagagctccctgataatctaaaggctttgtttagaaccgttgccatgatggtacctgattacgctctgattggtgaaatttcactgtattctatgggatttctagactctaggtctctcgcacaaaagatcgtggccacataccggctctgttccgagcagctgagctcccagcatcactatgattacggcatgcgcgcagtgaaatctgtgctaacggcagccggaaacttaaagctgaagtaccctgaggagaacgaatccgtactccttctgcgtgccctactggatgtaaacctcgccaaatttttagcccaggatgtgcctttgtttcaaggcattatctcagaccttttccctggcgtggtccttccaaagcctgactatgaagtgtttctgaaggtgcttaacgacaacatcaagaaaatgaaactccaaccagtgccctggttcattgggaaaatcattcagatctatgagatgatgctcgtcagacacggctacatgattgtcggggaccctatggggggtaaaacatctgcctacaaggttctcgcagctgcactgggcgatttgcacgccgccaatcagatggaggagtttgccgtggagtacaagattataaatcccaaagcaattacgatgggtcagctgtacggctgttttgaccaggtttcacacgagtggatggacggagtgctggctaacgcgttcagggagcaggcttcatctctgtccgatgatcggaaatggattattttcgatggccccgtggacgctatctggatcgagaacatgaataccgtgctggacgataacaagaagctgtgtctcatgagtggtgaaatcatccagatgaacagcaagatgtcactgatctttgagcccgcagacctggagcaggcttcccctgctaccgtgtcgaggtgtggcatgatttacatggaaccacatcagctcggatggaagccccttaaggactcatatatggatactctgcccagttccctgactaaagaacataaggagctgatgaagagcggccagtag

SEQ ID NO: 186040 - DNA, 462 bp, synthetic construct
  misc_feature 1..462: note = Description of Artificial Sequence: Synthetic coding sequence
  source 1..462: mol_type = other DNA
atgctgcacatgggcctggcccacgtgaagcggatgccccggagcagccggctccaatgtaaggaagctcaggcgttctttagtcttcagagcggcacatacagggtgttatcgactccactcaaacttggtgtgtgggaagagaagaagcattgggcagcactgctccagcctgtcagtcttggacggaagtggaaaaagagaccctgtaatctggacgactacgtctggggtcagttaaagtatatccccctgaaattctccttcacagcagcggcagcggatcgacagtgcgtgaaggctgccgagccaggggagccttcgatgcatgcagcggctaccgctatggcagggactagagctggtaccactttcgatgaactgcagtgtcaggaagatatggtctgtacaaggttcgaaaacaaggcttatgtcaacaccaatgactttacgcggcagtag

SEQ ID NO: 186041 - DNA, 13875 bp, synthetic construct
  misc_feature 1..13875: note = Description of Artificial Sequence: Synthetic coding sequence
  source 1..13875: mol_type = other DNA
atgttccggatcggccggcggcagctgtggaagcacagcgtgacccgggtgctgacacaaagattgaaaggggaaaaggaggccaaaagagctctccttgatgccagacataactatcttttcgccattgtggcatcctgtcttgacctgaataaaacagaggtcgaggacgcaatcctggaaggaaatcaaattgaacggatcgatcagttgttcgccgttggcggattgagacatctcatgttttattatcaggacgtggaagaggccgagactggccaactgggaagcctggggggggtcaatttggtaagcggaaagatcaagaaacctaaggtgttcgtgaccgagggtaacgatgtggccctcacgggcgtgtgcgtgttctttatacgaactgacccttccaaagctatcactccagataacattcatcaagaggtctcctttaacatgttagacgccgcagacgggggcctcctgaacagcgttcgaagattactgtctgacattttcataccggctctgcgcgcgacaagccacggctggggggagctcgaggggctccaggacgcagcgaatattaggcaagagtttctgagcagcctggaagggtttgtgaacgtcctctctggcgcacaggaatcactgaaggagaaagttaacctgcgcaaatgcgacatcctagagctgaagactctgaaggagcccacagactacctaactttagccaataatcccgagactctaggaaagattgaagactgtatgaaggtttggatcaagcagacagagcaggtgctggctgaaaataatcaactcttaaaggaagcggacgacgtaggaccgagagcggaattggaacactggaagaagaggttgtccaagttcaactatctgctggaacagctaaagtcccctgacgtgaaagccgtgctcgctgtgttggccgccgcgaagtctaaactgctgaagacatggagggaaatggatatccggattaccgacgcaactaacgaagcaaaggataatgttaagtatctctatacacttgaaaaatgttgtgatcccctttattcttcagaccccctgtccatgatggatgctatccctactcttataaacgctatcaaaatgatatactccattagccactactacaatacctccgagaaaataacttcactgtttgtgaaagtgacaaaccagatcatctcagcatgtaaggcctatatcacaaacaatggaaccgccagtatttggaatcagccacaggacgtagtggaagaaaagattctgagtgctatcaaactgaagcaggagtaccagctctgtttccacaagaccaagcagaaacttaagcagaaccccaacgcaaaacaatttgacttctctgaaatgtatatattcgggaaattcgagacttttcacaggagactcgctaaaatcatagatatcttcaccaccttaaagacctatagtgttctgcaggatagcactatagaagggctcgaggacatggccacaaagtaccagggcattgtcgctactataaagaaaaaggaatacaacttccttgaccagagaaaaatggactttgatcaggattacgaagagttttgcaagcaaaccaacgacctgcataacgagctgcggaagttcatggacgtcacttttgccaaaattcagaacaccaaccaggccctgaggatgctcaaaaagtttgagagactcaacatacctaacctcggaattgatgataaataccaactgattctggaaaattatggtgctgatatcgacatgatatccaagctttatactaaacagaaatatgaccccccactggccaggaatcagcctcccattgccggcaaaatcctgtgggcgcggcagctgtttcaccgaatccagcagcccatgcagttattccaacagcatcctgctgtcttgtcaactgcagaagccaagcccatcattaggagctacaaccgcatggcgaaggtcctcctagagtttgaagtattatttcatcgcgcatggctacgtcagattgaggaaatacacgtggggcttgaggctagtttattggttaaggcgcctgggaccggagagctcttcgtgaactttgacccgcagatcttgatcctattcagagagacagaatgcatggctcagatgggcctggaagtgtctcccctggctaccagtttattccaaaagcgagatcggtataagcgcaatttctccaacatgaagatgatgctagctgaataccagcgtgttaagtctaaaataccagcagctatcgaacagcttatcgtcccccacctggccaaggtggacgaggcactgcaacctgggctcgctgcgctcacttggacgagccttaacattgaagcctacctcgagaataccttcgcgaaaataaaggatttggagctgttactggacagagtaaatgatctcattgagtttagaattgacgcgattctcgaagagatgtcttccacacctctttgccagctgccacaggaagagcccctaacttgtgaggaattcctccaaatgacaaaagatttgtgcgtgaacggggctcagatcctccacttcaagagtagtcttgtggaggaggccgtcaacgagctggtgaacatgctcctggatgtagaagtgttgtctgaggaggagtctgagaaaatctcaaacgaaaattccgtgaattataaaaacgagagcagcgccaagagagaggaggggaactttgacactctcacctcttcaatcaatgcacgagccaacgcccttctcctcaccacggtgactaggaagaaaaaggaaaccgagatgttaggtgaggaggcgagagagctgctttctcatttcaaccaccagaacatggatgctttactgaaagtgaccagaaataccctggaagcaattcgcaagcggattcattcatcgcacaccataaacttcagggattctaattctgcctccaatatgaagcagaactcccttccaattttccgcgccagcgtaacattggccatcccaaacatagttatggcacctgccctagaggatgtgcagcagactcttaataaggcagtggagtgtatcatcagtgtgcctaaaggcgtaagacaatggtcttccgagctgctttctaagaagaagatccaggagcgtaagatggctgctctgcagagtaacgaggactcggacagcgacgtggaaatgggggagaatgagctgcaggacaccttggagatagcttccgtcaacctgcccatccccgtgcagacaaagaattactacaagaatgtcagtgaaaataaagaaatcgtcaaactcgtgagcgtactttcgacaataataaattcgaccaagaaggaagttataaccagtatggactgttttaaaaggtataatcacatctggcaaaaaggtaaggaggaagccattaagacctttatcacccagtctcctctactgagcgaattcgagagccagatcttatactttcaaaacctggaacaggagatcaacgcagaaccagagtatgtttgtgtgggttccatcgctctttatacagccgacctcaaattcgctctcaccgccgaaacaaaggcatggatggtcgtgattggtcgccactgtaacaagaagtatagaagcgaaatggagaatattttcatgttgatcgaggaatttaacaaaaaacttaaccgacccattaaggatttggacgatatcaggatcgcaatggcagcgctgaaggaaataagggaagagcaaatctctattgactttcaggtaggtccaatagaagaatcttatgcgctcctgaataggtatggccttctcatcgctcgcgaagagatcgataaagtggatacactgcactatgcttgggagaaactgttggcccgggcaggggaagtccagaataagcttgtgagcctgcaaccgtcttttaaaaaggaattgatctcggctgtggaagtgtttctgcaggattgtcaccagttttacctggactacgaccttaatggaccaatggcctccggactcaaacctcaggaagcctccgatcggctgatcatgtttcagaaccagtttgataatatttatcgtaagtatattacctacactggtggcgaagaactgttcggcctgcctgcaactcagtacccacaacttttagaaattaagaaacagctcaatctgttgcagaagatatatacattgtacaatagcgtcatcgagaccgtgaatagctattacgacattctgtggagcgaggttaacattgagaaaattaacaacgagctcctcgaattccagaacaggtgcagaaagttgccgagagcactgaaggattggcaagctttcctcgacttgaagaagatcatagacgacttctcagaatgttgtccattgctggagtacatggcctccaaggccatgatggaaaggcactgggaaaggattaccaccctgactgggcatagtctggacgtcggaaatgagagttttaaactccgcaacatcatggaagcgcccctgttaaaatataaggaagagatagaagacatttgcatctcggctgtgaaagagagagatattgaacaaaagctcaaacaagtgatcaatgagtgggacaataagacatttacttttggatcgtttaaaacaaggggggagctcctgctacggggcgatagcacctccgaaatcatcgcaaacatggaggacagcctaatgttactggggtcactgctctccaacagatacaacatgccctttaaggcccagatccagaagtgggtccaatatctctccaactctacagacattattgagtcttggatgactgttcaaaacttatggatctacttggaagccgtttttgtcgggggtgatatcgccaagcagttgcctaaagaagctaaaaggttttcaaatattgataagtcttgggttaaaatcatgacacgagcccacgaagtccctagcgtggtgcagtgctgcgtcggcgacgagacattaggacagctgctgccgcacctactcgatcagctggaaatatgccaaaaatcacttaccgggtatctggagaaaaagcgactgtgttttccacgattttttttcgttagcgaccctgctttactcgagatactggggcaggcttccgacagccacacaatacaggcccatctgttgaacgtgttcgacaacatcaaaagtgtcaaatttcacgagaaaatatacgaccgtatccttagcatctcgagccaagaaggggagactattgagctggataaaccggtgatggccgagggaaacgtggaggtctggctgaacagtctgctggaagagtctcagagcagtctgcatctcgttattcggcaggccgcggctaacattcaggaaaccgggtttcagctgacggaattcctgtcatccttccctgcccaggtcggactgctcggaattcaaatgatttggacaagagactctgaggaggctttaaggaatgccaagttcgacaagaagataatgcagaaaacaaatcaagccttcttagagctgcttaataccctgattgacgtgacgacaagggacctgagtagcactgagagagtgaaatatgagacccttattactatccacgtccatcagcgggatatttttgacgacctgtgtcacatgcacattaaatctcccatggacttcgagtggcttaagcaatgtcgattctacttcaacgaggactcagacaaaatgatgatccacatcacagacgtggcattcatttaccaaaacgagttcctgggatgtaccgacaggcttgtgataacaccactgaccgacaggtgctatatcactctcgcccaggccctgggcatgagcatgggcggtgcccctgccggacccgcagggaccggcaaaacagaaaccacgaaagatatgggtcggtgtctgggaaagtacgtcgtcgtgttcaattgttccgaccagatggactttcgcggcctggggcggattttcaaagggctggctcagtccggatcatggggctgtttcgatgaatttaacagaatcgatcttcctgtgttgtctgttgccgcacaacagattagtattatcctgacatgtaagaaagaacacaaaaagtccttcatatttaccgacggggacaatgtcacaatgaacccggagttcggcttgtttctgactatgaacccagggtatgccgggcggcaggagttgccggagaacttaaagatcaattttaggtccgtagccatgatggtgcccgacagacagataatcatacgcgttaaattagcgagctgcggatttatcgataacgtggtactagctagaaaatttttcactctctacaagctgtgcgaagagcagctgagtaaacaagtccactacgattttgggctgcggaacattctcagtgttcttcgcacactcggcgccgccaagcgcgccaatcctatggacacggaaagcactattgtaatgagggttctccgggacatgaatctcagcaagttgattgacgaggacgaaccgctgttcctttcactgattgaggacctgtttccaaacatcctgctggacaaggccgggtatcccgaattggaggccgcgatcagcaggcaggtagaggaggcaggtctgataaatcaccctccctggaagctgaaagtgatccaactgttcgagacacagagagttcgccacggtatgatgaccctggggccctccggagccggcaagacgacttgtattcatacactcatgcgggccatgactgactgtgggaaacctcatagggagatgcgtatgaacccgaaagctattaccgctccacagatgtttgggagactcgacgtcgccaccaacgactggaccgacggaatctttagcaccttatggcgtaagactttgcgagccaaaaagggagagcatatctggatcatcttggacggtccagtcgatgccatatggatcgagaacctgaactccgttctggacgacaataaaacactgaccctggccaatggggatagaatcccaatggctccaaattgcaaaattatttttgaaccacacaatatcgacaacgctagtcctgcaactgtgtccaggaatggtatggtgtttatgagctcatcaattctggattggtcgccgatcttagagggattcttaaaaaaacgatctccacaagaagcagaaatcctcaggcagctctataccgaatcatttcctgacctttacaggttttgcattcagaacctcgaatacaaaatggaggtgctggaagccttcgttataacccaatctatcaacatgctgcaaggtctgatccctctaaaagagcagggcggcgaagtcagtcaggctcaccttggacggttatttgttttcgcactgctgtggtccgccggggcggccttagagctggatggtagacgccgcctcgaattgtggctgagatcgagaccgactgggacccttgagttgccccctccagccggtccgggggataccgcttttgactattacgtcgctccggacggaacctggacccattggaacacccggacacaagagtatctctacccttcagacaccacaccagaatatgggagcatcttagtgcctaacgtggataatgtccgcacagacttcctaattcagacaatagccaaacaggggaaagccgtgctgctcatcggcgagcaggggaccgccaagactgtcatcataaagggatttatgtccaagtatgaccctgagtgccacatgatcaaaagtctgaatttttctagtgcaacaaccccactaatgttccagcggaccatcgagtcctacgtggataagaggatggggaccacctatggacccccagccgggaagaaaatgaccgtttttattgacgatgtgaacatgcccataataaatgaatggggagaccaggtgacaaacgaaatagtcagacagttgatggagcagaacggattctacaacttggagaaacctggagaatttaccagcattgttgatattcagtttctggccgcgatgatacaccccggaggcggcagaaacgacatacctcaacgactgaaacgtcagttctccatatttaactgcactcttccttccgaggccagcgtggacaagatctttggtgtcatcggggtgggccattactgtacacaacgcggctttagcgaggaggtgagagactcggtgactaaactggtgccactcaccagacgcctgtggcaaatgaccaaaataaaaatgctgcccacaccagcaaaatttcattatgtgtttaatctgcgcgatttatccagggtgtggcagggcatgctaaacacgacctcggaggttatcaaagaacccaacgatctgctgaaactatggaagcacgaatgcaagagagtgatagcggaccgctttaccgtgtctagtgacgtgacctggtttgataaggccctcgttagcctggtggaagaagagttcggggaggaaaaaaagctgcttgtggactgcgggatagatacctactttgtcgattttttgcgcgatgcccctgaagcggccggagaaacttctgaggaggcggacgctgagacccccaaaatttacgagccgatcgagagcttttctcatctgaaagagcggcttaacatgtttctgcagttgtacaatgagagcattcgaggtgccgggatggatatggtgttctttgccgacgccatggtgcatcttgttaaaatttcgagagtgatccgtacaccgcagggtaatgccctgctcgtgggtgttggtggttcgggcaagcagagcctgaccagattggcatccttcattgctggctatgttagcttccaaataacccttactaggtcgtataacacatccaatctgatggaagacctcaaagtattgtacagaacagctggccagcaggggaaagggattaccttcattttcacagacaacgagatcaaggacgagtccttcttggagtatatgaacaatgtccttagttctggggaggtgagtaacctcttcgcaagagacgaaatcgacgaaatcaacagcgatctcgctagcgtcatgaagaaggagttccctcgatgcctgcctacaaatgagaacctgcacgactactttatgtcccgggtgcggcaaaacctgcacatcgttctgtgcttttcccccgtcggggaaaagtttcggaaccgggccctcaaatttccggcgctgatcagcggctgtaccattgactggtttagcagatggcctaaggatgcccttgtggctgttagtgaacactttttgacatcgtatgacatcgactgttctctggagatcaagaaggaggttgtgcagtgcatgggaagttttcaggacggagtggctgaaaaatgcgtggactacttccaacggttccgacgatccacccacgtcacccctaaatcttatcttagtttcatccagggctataagtttatttacggcgagaagcacgtagaggtgaggaccctcgccaaccgaatgaatacaggactggaaaagctgaaggaggcatccgaatctgttgcagctctaagcaaggaactggaggctaaagaaaaggagctccaggtggccaacgacaaagcagatatggttctgaaggaggtgacaatgaaggcgcaagccgcagagaaggtgaaagcagaagtacagaaggtcaaagaccgtgcccaggcaatcgtagactcaatttctaaggacaaggctattgcggaggagaagttggaggcagccaaacccgctctggaggaagcagaagcagccctgcagactatacggcccagcgacatcgccacagtccggaccttggggcgtcctcctcatctgatcatgcgaatcatggactgtgtgctgttattgtttcagaggaaggtgtcagcagtaaagatagatctcgaaaaaagttgtactatgccctcctggcaggagtccctgaagcttatgaccgcgggtaatttcttgcagaatcttcagcagtttccaaaagataccatcaacgaggaggtgattgagttcttgagcccctacttcgaaatgccagactacaatattgaaacagctaagcgggtgtgcgggaacgtggccggcctgtgctcttggactaaggcaatggcttctttttttagcattaacaaggaggtccttcccctgaaggccaatctcgtggttcaggagaaccgacacttgctggcaatgcaggatctccagaaggctcaggccgaactcgatgacaagcaggcggaattggacgtggtccaggcggagtatgagcaggccatgacagagaaacaaactctgttggaggatgcggaaaggtgtaggcacaaaatgcagaccgctagtactttgatctcaggactcgctggagaaaaagaaaggtggactgaacaatcgcaggagtttgccgctcagaccaagaggctggtgggggatgtgttgttggcaaccgctttcttaagctactccggtccatttaaccaggaattccgagatttgctgcttaacgattggaggaaagaaatgaaagctcggaagattccttttggcaaaaacctgaatctctccgagatgctgatcgacgctcccaccataagcgaatggaacttacaggggctacctaatgatgatctgagcattcaaaacggcataatcgttacgaaggcatctcggtatccactgcttatcgacccacaaactcaggggaaaatatggataaagaacaaagagtcccgcaatgagcttcagatcacctctttaaaccataagtacttccggaaccacctggaagatagcctgtccctggggcggcccttactgatcgaggatgtcggtgaagagcttgatcctgccttggataatgtactggagagaaacttcattaagacaggaagtaccttcaaagtaaaagtgggggacaaggaagtggatgtccttgacggatttcgcctgtatattacgacaaagttgcccaatccagcttatacccccgagatttctgcacggacaagcatcatcgacttcacagtgactatgaaaggcctagaagatcagctgctgggccgcgttatcctgaccgagaaacaggagcttgaaaaggagcgtacacatctcatggaggacgtcacagccaacaagaggcgtatgaaggagttagaggataatctgctttatagattgacctcaacacaaggttcactcgttgaagatgaatcgttaatagttgtgttgtcgaacacaaagcgcaccgctgaagaggtcactcagaaactcgaaatctctgctgaaacggaggtgcagataaactctgcccgggaggaataccggccagtggcaacaaggggctccatcctctactttctcatcacagagatgcgtctagtcaatgagatgtatcagacctctctgcggcaatttctggggttgtttgacctcagtctagccagaagtgtgaaaagccctatcacctccaaacggatcgcaaatatcattgagcacatgacatatgaggtttataagtacgctgcccgaggattgtatgaggaacacaagttcctgtttacactcttactgacactcaaaatagatattcagcgaaatcgtgtcaagcacgaagagtttctaactctgattaaaggcggggcttcattagatctcaaagcctgcccaccgaagcctagcaaatggatactggacatcacgtggttaaatctagtggaattgagcaagttgaggcaattttcagatgtactggatcagatttcaagaaacgagaagatgtggaaaatatggttcgataaagaaaaccctgaggaagaaccgctgccgaatgcctacgataagtctctggattgttttcggcggctgctgttgatacgatcctggtgtccagaccgcacaatcgctcaggctaggaaatacattgtggacagcatgggcgagaagtacgctgaaggagtaattctggatctcgagaaaacctgggaggaaagcgacccccggacccccctcatatgtcttttaagcatgggttccgaccccaccgactctattattgctctgggtaagaggcttaagatagagacgcggtatgtctcaatgggacagggtcaggaagttcatgccaggaagctgctgcagcagaccatggccaatggcggctgggcgctgcttcaaaactgccatctgggattggacttcatggacgagctgatggacataatcatcgaaactgaactggtacacgatgcctttcgtctctggatgactaccgaggcacataaacagttcccgattactcttcttcaaatgtccattaagttcgcaaacgacccgccccagggtctcagagctggactgaagcgcacttactccggagtatcccaggatctgctggacgtgagcagtggatcgcaatggaagcctatgttgtatgcggtcgcctttctccactcaaccgtgcaggagagacggaaattcggtgccttaggttggaatataccctatgagttcaaccaggctgacttcaacgccacggtccagttcattcagaaccacctggacgacatggacgttaaaaaaggtgtgagttggactactattagatacatgatcggcgaaattcagtatggaggtcgagtgaccgatgactacgataagaggcttctcaatactttcgccaaggtatggttcagcgaaaatatgttcggcccagattttagcttctaccagggttataacatcccaaaatgtagtactgttgataactacctgcagtatattcagagtttgcccgcatacgatagccctgaggttttcgggctccatccaaatgccgacataacataccagagtaagctagcaaaagatgtgttagacacaatcctggggattcagccgaaggatacttctgggggtggcgacgagacacgtgaggcggtcgtggcccgactggctgatgacatgctggagaagctaccgcccgattacgtgccctttgaagttaaagaacggttgcagaaaatggggcctttccaacccatgaacatctttttacgccaggaaatcgataggatgcagcgtgtcctctctctggtgagatcaaccctcacagagttaaagctcgctatagatggcactattatcatgtccgagaatcttcgcgacgccttggactgtatgttcgacgcccggatacccgcgtggtggaaaaaggcctcttggatctcttcaaccttggggttttggttcactgagctgatcgagagaaacagtcaatttacatcctgggtgttcaatgggagaccacactgcttttggatgacggggttttttaacccccaggggtttctcacagccatgagacaggagattacacgcgccaacaagggatgggccctcgacaatatggttctgtgcaatgaggtcacaaaatggatgaaggatgatatttccgctcctcctaccgagggagtttatgtttatggattgtacctggaaggagccgggtgggacaagaggaatatgaaattaatcgagtcgaagccaaaagtcctgttcgaactgatgcctgtgatcagaatttatgctgaaaacaacacccttagggatcctcgattctactcatgtccaatctataaaaaacccgtgaggacagacctgaattacatagctgcagttgatcttaggaccgcccaaacacctgaacactgggtattgcgtggagtggcccttctgtgcgatgttaagtag

SEQ ID NO: 186042 - DNA, 12477 bp, synthetic construct
  misc_feature 1..12477: note = Description of Artificial Sequence: Synthetic coding sequence
  source 1..12477: mol_type = other DNA
atgaccttccgggccaccgacagcgagttcgacctgaccaacatcgaagagtacgcagaaaattcagcacttagtcggctgaataacatcaaggctaaacagagggttagttatgtcacctcaactgaaaatgagtcagacactcagatactgacctttagacacattaccaaagcccaggaaaaaacccgtaagcgtcaacagccaataaaactggaaccgctccccgtgctgaaggtgtatcaggaccataagcagcctgagtatatacatgagcagaatcgtttccagcttatgactgccgggattattaaaaggcctgtgagcatcgctaaaaagtcatttgccacttcctctacgcagttcctggaacaccaggatgcggtgaaaaaaatgcagattcacaggccgtacgttgaagtattctccccatcaccaccgaaattgccacacacgggcatcggaaagcgaggccttttcggtacccgcagcagcgcctacccgaagtacacctttcacgacagggaggaagtagtcaaagcgaatatcagggatccactgcagattatcaagataatcagagagaacgaacaccttggctttctttacatgatcccagccgtgccccgtagctcaatcgaatatgatacctataatctgaaggtggtgtcttacgagaacattaacaaaaacgactattatacaatctctcagcgcgcagtcacccacatctacaacgaggatatcgaattcatcgaaatcgatcgatgggaacaggaatatctgtaccatagggaattaacaaaaattccaattttcagtctgttcagaaagtggaaggcattttccgtatggaggaaaaatgtacggagcaagaagatcacaggatgtcaaaaatctctacaaaagaatctttttatcgtcaatcctcacctccggccagcactgctgaagatcaatgaattgtgttaccacctgtcgtttatggggctgtgctacattgagaagtgccacacctatacacttcaagaattcaaagcggcccaggtgatccggctagccgaggtcaccgagcggcttggggagttcaggaatgaagctaaatacgtggtgagaagggcctgtaggttcgccttacgcgcagccgggttcgtccccgacgattgcgcatttggtccttttgaggactaccataaggtccagtcatccggaagtttcataaacaccccccacgagcttcccacctatggagatagcgaaaagatgacctacacagaacaggcgagcaagcggcactactgtatgcgactgacatgttttatccgtttaaatgattacctgatcgagaataccatgcatatcctgacagttaatgcagttaattctttactgaaccacttgacagacaagttgaaacgaacacctagtgctgacgtcatccagaaatggatcactgaagagaaacctgaagtgcctgacaagaaaggcacattgatggtcgagaagcaggaagaagatgagtctttaatccccatgtttcttacggagttgatgctgaccgtccagtccctactgttcgagccgtcgctggaagacttcttggatggcattttaggtgcagttaaccattgccaaaacaccgtgctgtctgtcccaaaccttgtgcctgactcctacttcgacgcattcacctcaccatacatcaacaataagctggaagggaagacgtgtggcaccggaccatccttagcagctgtgttcgaagacgacaaaaatttccacacgatcatctctcagatcaaagaaaccatccaagccgcatttgaatccgccagaatctacgcagcaacattcgagaagtttcagatcttctttaaagaaaacgaatccttggacctccaggcgctgaaactgcaggagccagacatcaactttttctccgaacagctggaaaaatatcataagcagcacaaggatgcggtggcgctccgacccacgagaaacgttggccttctcttgatcgatacccgactcctgcgcgagaaactcattccctcccccctccgatgtctcgaggtcctgaattttatgcttccgaggcagagcaaaaagaaggtggacgctattatctttgaggcacaggacgctgagtataaattagagtttgtgccaacaacaaccacggaatacgtacattctctgctgttcctggacgagattcaagagaggattgagtccttggaagatgagggtaatattgtcacccagatgtataaactgatggagcagtaccaggtccccacaccccccgaagatttcgctgtgtttgccacaatgaaaccctccattgtggcagtccggaacgccattgacaagtccgtaggcgatagagaatcttctattaagcagttttgcgttcatctgggttctgacctggaagagctaaataatgaggtcaacgaggttaagctgcaggcgcaggacccacagatcctggacatatccgccgaccaagataagattcgcctgattctgaataatctgcagtccgtgctggctgacttgcaaaaacgcgcatttcagtacaaaagctaccagaagaattttaaggttgaggtgagcaaattcgaagcgttggaggaagtgtcggcagaacttaaattgaaacaactgctctgggattcattttccgagtgggataagctccaacaggagtggctgaagtcaaagttcgactgcctagacccagaggttcttaatgggcaggtgagcaaatacgccaaatttgtgacccagttggagaaggggctgcctccaaacagcgtcgtcccccagttaaagtataaagttgagaagatgaaggagaagttgcccgtaattatagacctgcggaacccaactttgaaggctcgacattgggccgctattgagcaaactgtagatgctacactggtggatgcagagatcccactcactctggaacgtctaagccagctccacgtcttcgatttcggtcaggagattcaggatatctcaggtcaggcctcaggcgaggccgcactggaggccatattaaagaaggttgaggacagctggaagacaacagagttcgtgatattacctcatcgcgattccaaggacgtgttcatcctggggggaaccgatgacatccaggtgctgttggatgacagtaccattaatgtagctacactcgcatcctcacgctatctggggcccctcaagacccgggtagacgagtggcagaagcagctcgctctatttaatcagaccctcgaggagtggctgacctgtcagcgcaattggctatatctcgagtctatattcaatgcgcctgacattcaaaggcagctgcccgccgaggcgaagatgtttctccaagttgacaaatcctggaaggagattatgaggaaagttaaccgtctgcctaatgcattacgcgccgccacgcagccgggtctgctggaaacctttcaaaataataacgccctgttggatcagatacagaaatgtttagaagcatacctggagtctaagcgtgttatctttcctagattttattttctgtccaatgacgaactgctggaaatattagctcagactagaaacccacaggccgtgcagccccatctccgaaaatgttttgattctatttctaagttggagtttgccttgatgcctcccgcggagggaaaaatcccaggaatagatggcgagcccgaaaaggtttacaccaatgatattctggctatgctcagccccgagggcgagcgggtctctctgggcaaaggcctgaaggcccgaggaaatgtagaagaatggctggggaaggtggaggaggctatgtttacttccctccgtcggttatgcaaagccgctatagctgattaccagggcaaactgagaactgattgggttgtcgctggtcatccatctcaagtgatcctcacggtatcccagattatgtggtgcagagatctgactgagtgcttggagactgaacactccaaccatattcaagcactgaagaacttcgagaaggtaaactttgaacggctgaacgctcttgctgccatcgtgcagggatcgctcccaaaattacataggaacatattaactgccttgataactatcgacgtgcatgcaagagatattgtcacagaacttgtccagtcaaaggttgaaactgtggaatcttttgattggcagcggcagttgcgatattattgggatatcgatttagataattgtgtcgcccgtatggcgctgagccagtatacttatggatatgaataccttggagcatgccccaggcttgtcatcacccctctgactgaccgctgttacttgtgtttgatgggcgctctccagctcgatctgggcggcgctcctgcaggccctgccggaacaggtaaaaccgaaactaccaaagacctggccaaggccttggcaatccaatgcgtagtctttaactgcagtgatggactcgactacaagatgatgggtagatttttttcaggactagctcagtccggagcatggtgctgcttcgacgaattcaacaggattgacatagaagtgctttccgtaatcgctcaacagctcataacaatccggaatgccaaggcggctaagctcagtagattcatgttcgaaggacgagaaattaagttggtcatgacatgcgcagcctttatcactatgaacccaggctatgcggggaggacagaactgccagacaacttaaaggcattattccggccttttgctatgatggtgccaaattacgctttgatagccgaggtaatactgtacagcgaaggcttcgagtctagcaagatcctggcacgaaaaatgactcagatgtacaagctttgtagcgaacagctgagtcagcaagatcactatgatttcggtatgcgggcagttaaaagcgtgttggtcatggccggtagcttgaagagagagaatcctgatctcaatgaggatgttgttctgattagggccttacaggattcaaacctaccaaagttcctcaccgatgacgcgttactgttcagcggtattatcagtgacctgtttcccggggtccaaatccctgaacacgactatggcatccttcagtctacaatcgtggatgtgatgaatcgccagaacttgcagcccgagatgtgtatggtgcggaaggtgatccagttctatgagacaatgctggtgagacacggtgtcatgctagtcggccctacgggcggcggcaagacgactgtgtaccgcatcctggcagagacactcggaaatttacagaaactcgggatagaaaactcattctaccaggcagtgaagacatacgtccttaatccaaagagcattaccatgggggagctgtacggcgaagtgaacaatctgacacttgagtggaaggacgggctaatggcgctctctgttcgggcagctgtcaatgatacctccgaggatcacaaatggattatcagcgatgggcctgtggatgctttgtggatcgagaatatgaatactgtgctggacgacaacaagatgctgtgcctggctaatagtgaacgcataaaactgaccccacagatccacatgctgttcgaagtacaggatttaagagtagcttctcccgctaccgtatctaggtgtggcatggtcttcgtcgatcccgaagaactgaaatggatgccatacgtcaagacttggatgaaggggatcagcaaaaagttgacagaggagactcaggaatatatactcaatcttttccagagatacgtggacgagggcctgcactttattaacaagaaatgttctcaggccattcctcaagtcgatatttctaaagtcacaacgctctgttgcctgttagaaagccttatactcggaaaggacggagtgaacctcgccatggaacagaccaaactgaacactatattgtgtcagacatttgtgttctgctatctgtggagcctaggagggaatctgacagagaactactacgatagctttgatacattcattcgaacacagtttgatgacaatccagatgcaaggctgcctaattccggggacctatggagcatccacatggacttcgatacaaagcgacttgatccgtgggagcgcatcattccgactttcaaatacaaccgtgatgtgcctttcttcgagatgctggtgccgactactgacaccgtccggtacggctacttgatggagaagctgctagcagtgaagcacagcgttctttttactgggattaccggggttggcaaatctgtgatagccaagggcctgctaaacaagattcaagagagcgcagggtacgtccccgtgtaccttaatttcagcgcacagacgtcctctgccagaacacaagagataatcgaatctaagttggagcgaaaaaggaaaaacatcctgggagcgcccggtaacaagagaatcgtcatattcgttgacgacctcaatatgccccgattggaccgctatggatcacagcctccaatcgagctgcttcgacaataccaagactttggagggttctacgaccgcaataaactgttctggaaggagatccaggatgtgactataatcagtgcctgcgcacctcccgggggcggcaggaaccctgttacccccaggttcataagacacttctctatgctctgtctgcccatgccatccgagcattccttgaaacagatcttccaggctatcctcaacgggttcctgagtgatttccctccggctgtcaagcaaacagcgagttctattgttgaagcaagcgttgagatctacaataaaatgagcgtggacctgttgcctactcccgctaagagccactacgtgttcaacctccgagacctgagcaagtgcgtccagggcatcctccagtgcgaccctggcactattcgcgaagagatccagatattccggcttttttgtcacgagtgtcagcgagtcttccacgacagacttattaataacgaggacaaacattactttcacgtgatacttaccgaaatggccaataagcatttcgggatcgcaatcgacctagagtacttcctgaacaagcctattatcttcggcgattttatcaagttcggggcagacaaagcagacaggatatacgatgatatgccggatattgaaaaaacagcgaatgttttgcaggactacctggatgattataatctgactaatccaaaggaggtaaagctcgtgttcttccaggacgccatagagcacgtttcaagaatcgctagaatgatcaggcaggagaggggcaacgcactgctcgtcggagtcggaggcaccggcaaacagtcactgacccgacttgctgctcacatctgcgggtacaaatgcctccagatcgagttgtcccggggctacaattacgattcctttcacgaagacctgaggaagttatataagatggctggcgttgaggacaaaaatatggtctttctatttacagatacgcagatcgtagttgaagaattcttagaggacatcaataacattctaaattctggagaggtaccaaacctattcgagaaagacgaacttgagcaagtgctggccgcaacccgccctcgtgccaaggaggtaggcatctcagaaggcaacagggacgaagtttttcagtatttcatttcaaaagtcagacaaaagctgcatatcgtcctgtgcatgtccccagtgggtgaggccttcaggtccaggtgtaggatgtttcctagcttagtgaattgttgcaccatagattggttcgtgcagtggcctagagaagcactactgtccgttagtaagacttttttcagtcaggtcgacgccggcaatgaagagcttaaagaaaagctgccattaatgtgcgtgaacgtacatctgagcgtgtcttctatggccgagagatactataatgagctcaggagacgttactataccacacccacaagctaccttgagctgattaacctgtatctctccatgttatccgagaaaaggaagcaaataatctctgcccgagatagagtgaaaaacggcctcacaaagctgctcgagaccaatatcctggtggataagatgaagctggatctgtcagcactcgagcctgtgctgctagctaagtccgaggatgtggaggcactgatggagaagcttgctgtcgaccaagaatccgctgatcaagtccgcaacaccgtgcaggaagatgaggctaccgcgaaggtaaaagctgaagagacccaagcgatagccgacgacgcgcagcgcgatctcgacgaggctttgcctgccctggacgctgccaacaaagcgctggatagccttgacaaggcagacatatcggaaattcgcgtattcactaagccaccagacctggtgatgactgttatggaggctatctccatcctactgaatgctaagcctgattggccatccgcaaagcagctgctgggcgattcaaacttcttaaagcgcctgcttgaatacgacaaggaaaacatcaaaccccagattctggctaagcttcagaaatatattaacaaccctgattttgtcccggagaaggtggaaaaggtctctaaagcttgtaagagcatgtgcatgtgggtcagggccatggatctgtactctcgcgtcgttaaggttgtcgagcccaaacggcagaagcttcgtgcagcgcaggcggaactcgacattaccatggccacgttacgtgaaaaacaggctctgctgcggcaggtagaggaccagatccaggctctccaagatgagtacgataagggtgtaaatgagaaggagagcctcgccaaaactatggccctgaccaaagcacgattggtgcgcgctggtaagctaaccgcggcactggaagatgaacaagtgagatgggaggaatccattcagaagtttgaggaggagatctccaacatcaccggaaatgtgttcattgctgcagcctgtgttgcctattatggtgctttcactgctcagtatcgccaatctcttatcgaatgttggattcaggattgtcagagtctagagatacctattgatcctagtttcagcttgattaatatcctgggcgacccttacgaaatcagacagtggaacaccgacggcctgccaagggatctgatttcaaccgaaaacggcatactcgtcacccaggggaggcggtggccgctgatgattgatccgcaggatcaggccaatcggtggataaggaacaaagaatccaaatctggcttgaagatcattaaattgaccgacagtaatttcctgcggatcttggagaactccatcaggttgggccttccggtcttgcttgaggagttgaaagaaactttggaccccgccttggagcctattcttctgaaacaaatctttatatcaggaggaagacttttgattcgactgggcgattccgatatcgattacgataagaactttcgattctacatgacaacgaaaatgcccaacccacattatctgcccgaagtctgcattaaggttacaatcatcaacttcaccgtcacaaagtcagggctagaggatcagctgttgtcggatgtggtgcgccttgaaaaaccccgtctagaggaacagcgtatcaagctaattgtccgcatcaatactgataagaatcaactcaagacgatcgaagaaaagatactgcgaatgctgttcacgagcgaagggaatatccttgacaatgaggaactgattgacacgctgcaagactcgaagataacaagcggggcgattaaaactcggctagaagaggctgaatctaccgagcagatgattaatgtggccagggagaaataccggcctgtagccacgcagggatccgtcatgtatttcgtgatcgcaagcctctccgaaatcgacccaatgtaccagtacagtctgaagtacttcaagcagctgtttaatacaaccatagaaacatccgtgaaaactgagaatctgcaacagaggttggacgttcttctggagcagacgctgctcaccgcatatgtcaacgtctctagagggctcttcgagcagcataagcttatatacagcttcatgctgtgcgtagaaatgatgcgccagcaggggactctatcggacgctgaatggaatttctttctcaggggcagcgccggcctggagaaagagaggccaccaaagccagaagcaccttggctgcccactgccacctggttcgcgtgctgcgaccttgaggagagcttcccagtattccatgggttaacacaaaacattctgtcgcatcccataagcatccggttgggctctttcgagacttacattaacccacagaaatgggagggttattcaaagatgaagcacgaggataagcatatgcgacaggagaaagaggccgcccatcaggacccgtggagcgcaggactgtcatcctttcacaaactgatcctgattaagtgttgtaaggaagaaaaagtcgtgtttgccctcactgactttgtcattgaaaatctaggcaaacaattcattgagacgccacctgtcgacctgcccacattgtaccaagacatgtcctgtaatacaccactagtgttcattttatctacaggatccgatccaatgggagcgttccaacggttcgctagagagtccggatacagcgaaagggtacagagtatctctctgggccagggacagggaccaatcgcagaaaagatggtgaaagatgctatgaagtcgggcaattgggtgtttctgcaaaattgtcatctggccgtgagctggatgctcgcaatggaggagctcatcaaaactttcactgacccggattctgccatcaaggatacattccggctgtttttgagctctatgccttctaatacttttccagtgacagtgctacagaacagtgtcaaagtgaccaatgaaccgcctaagggactgcgtgcaaacatccgacgtgcttttaccgagatgacaccatcttttttcgaggaaaatatcttgggtaagaagtggcggcagatcattttcggcatttgctttttccatgctattattcaagagagaaaaaaatttggacccctaggttggaatatctgttatgagtttaacgacagtgatagagagtgcgccttgctgaatctgaagctctattgtaaagaaggaaagataccatgggacgcactaatttatattaccggcgaaattacttatgggggcagagtcaccgacagttgggaccagcggtgtctgaggactattctcaagaggttcttctcccctgagacccttgaggaagactacaagtattcagagtcaggcatttattttgcccccatggcggactctctgcaggagtttaaggattacatcgaaaacctgcccctgattgacgaccctgagattttcgggatgcacgaaaacgcgaacctggtctttcagtataaagaaaccagcacgctgatcaacaccatacttgaggtgcagcccaggtccagtactgggggagagggtaagtccaatgacgaaatagtgcaggagttggtggccagcgtccagacacgagtccccgaaaagctcgagatggagggagcaagcgaaagccttttcgtcaaagacctgcagggtagattaaactcactgacaacagtactcggccaagaagtggaccgattcaataaccttctcaaactcatacacacttctctggagaccctgaataaggccatcgcaggctttgtagtaatgagcgaagaaatggaaaaggtgtataactctttcctaaataatcaggtacccgccctgtggagcaacaccgcatatcccagcttaaagcctctggggtcttgggtaaaggacctcatacttcggacatcctttgtggatctgtggctcaaaagaggacagccgaagagctactggatttctggatttttcttcccacagggatttctgaccggcacgcttcagaaccacgcgcgtaagtacaacctgcccattgatgagctgagcttcaaatacagtgtgatcccaacctatcgagatcaggctgctgtgatcgaggccgcaaaaacagtgcagtttggccaggagctgcctatggatatggagttgccaagccctgaagacggggtgctagtgcatgggatgttcatggatgcgagcagatgggacgataaggagatggtcattgaggatgccttgccaggtcagatgaaccccgtgctgcctgtggtgcatttcgagccacagcaaaactacaaaccgtcccctacgctataccactgtcccttgtataaaacaggagctagagcaggaactctcagcacaacgggacactctaccaactttgtggtgactgttctgctcccttctaaaagatctaaggactattggattgccaaggggagcgcattgctatgtcaactcagcgagtag

SEQ ID NO: 186043 - DNA, 12477 bp, synthetic construct
  misc_feature 1..12477: note = Description of Artificial Sequence: Synthetic coding sequence
  source 1..12477: mol_type = other DNA
atgaccttccgggccaccgacagcgagttcgacctgaccaacatcgaagagtacgcagagaacagcgcattgagcaggctgaataatattaaggccaaacagcgggtctcttatgtaaccagtactgaaaacgagagcgacactcagatccttactttcagacacatcacaaaggctcaggaaaaaacacgaaagcgacagcagcccatcaaactcgagcctctccccgtcttgaaggtttatcaagaccataaacaacctgagtatattcatgagcagaatcggtttcagctgatgactgccggtatcattaagcgcccagtcagcatcgccaaaaagagctttgccacctcttccacacagttcctggagcaccaggatgctgtgaagaaaatgcagatccatcgcccctacgttgaggtcttcagtcccagccctccaaagttgcctcatacaggtataggaaagcggggcctttttggcaccaggtcgtctgcctatcctaagtataccttccatgaccgcgaggaagtcgtgaaggctaatatccgagatccactgcagatcattaaaattattcgtgagaacgaacacctgggattcctctatatgataccagctgtgcctcgatcaagcatcgagtacgatacgtataacctgaaggtggtgtcctatgagaacattaataagaacgattattacacaattagtcaaagggcggtaacccatatttacaatgaggacattgaattcatcgaaatcgaccgatgggaacaggaatacctgtatcatagagagctgactaagatccccatcttctccctgtttcgcaagtggaaagccttttcagtctggcggaagaacgtgagaagtaaaaagatcaccgggtgtcagaagtccctgcagaagaatttattcatcgttaatccccatttgcgtcccgcccttctgaagatcaatgaactgtgctaccatctctcttttatggggctctgctatatcgagaagtgccatacatacacacttcaggagttcaaggccgcacaagtgattcggcttgccgaagtgacagaaagactgggggagttccgaaatgaagccaagtacgtggttcggcgcgcttgcaggtttgcactgagggccgccggctttgtgccggacgactgcgcattcgggccattcgaggactaccacaaggttcagagcagcggatcctttatcaataccccccacgagttgcccacttatggcgactctgagaagatgacttacactgagcaggccagtaaaagacactattgtatgcgcctgacatgcttcattaggctgaacgattaccttattgaaaacactatgcacatcctgaccgttaatgcagtgaactctctgctgaaccacttgacggacaagctcaaaaggaccccatcggccgatgttatccagaagtggattaccgaagagaaacctgaggtgcctgacaagaagggtactctgatggtggagaaacaagaggaggacgaaagcctgatccccatgttcctgacggagctcatgcttacagttcagagtctgctcttcgaaccctcgctggaggacttcctggacgggatactgggcgccgtgaaccattgccagaacactgtcctcagtgttcctaaccttgtgccagattcctacttcgacgcctttacgtcaccttatatcaataacaagctagagggaaaaacctgcggaacaggcccctcgttggcagcagtgttcgaggacgataagaacttccatacaatcatatcacagattaaagagacaatacaggcagcgtttgagagcgcaaggatatacgccgcgacttttgaaaagtttcagatcttctttaaggagaatgagtctctggacttgcaggccctaaaactccaggaaccagacatcaacttcttttctgaacagctcgagaagtaccacaaacagcataaagatgcagtcgccctgcgaccaaccaggaacgtaggcctgctccttatcgatacacgcttgcttcgcgagaagctgatcccaagcccactgaggtgtctcgaggtcctaaactttatgcttcctaggcagtctaaaaagaaagtggatgccattatctttgaggcccaggacgcagagtataagctagagttcgtcccaacaaccaccacggaatacgtgcacagcctgctgtttctggacgaaattcaggaaaggattgaatcccttgaagacgaaggcaatatcgtcacccagatgtataagctgatggaacagtaccaagtgccgacgccccccgaagattttgccgtgtttgccacaatgaaaccttccatcgtggcagtgagaaacgcaatcgataagtccgtcggagacagggaatcttctataaagcagttttgcgttcacctaggatcagacctggaggaactgaataatgaggtcaatgaagtgaagctgcaggcccaggacccccagatccttgatatcagtgcagaccaggataaaatccgcttgatattgaacaatctgcagtctgtcttggctgatctgcagaagagggctttccagtacaaaagctaccaaaagaatttcaaagtggaggtgagtaaattcgaagccctggaggaggtttctgcggagctgaaacttaaacaactcctctgggattcctttagcgagtgggacaaactgcagcaagagtggctgaaatctaaattcgactgcctcgaccccgaagtactgaatggccaggttagcaagtacgccaagtttgtcactcagctggaaaagggattgccgcctaactctgtcgtgccccaactgaaatataaggttgaaaaaatgaaagagaagctccccgttatcatcgacttgcgaaatccaacactgaaggcccgccactgggccgccatagagcagacagtggacgctaccctggtggacgctgagattccactgacactggaaagattgagccagctgcatgtgtttgattttggtcaggaaattcaagatatatctggccaagcctctggggaagcagcattggaggccattctgaaaaaggtggaggatagttggaagactactgagtttgtgatcctgcctcacagggacagtaaggatgtgttcatcctcggtggtacagacgatatacaagttctgcttgacgactctaccattaatgtggcaacacttgcctcctctcggtacctgggccctctgaagaccagagtcgatgaatggcagaagcaactagctctgtttaatcagacacttgaggagtggctgacttgtcagagaaattggctttacctggaatcaatattcaatgctcccgacatccagcgtcagctccctgccgaggccaagatgttcctgcaggttgataaaagctggaaagaaataatgcggaaggttaatcggctgccgaacgccctgcgagcagctacacagcctgggcttctcgagactttccagaacaataacgcgctgttggatcagatccagaaatgtctagaggcctatctcgagtctaagagagtaatattcccgcgtttctactttctctccaatgatgagttgctcgaaatcctggctcagacaagaaatcctcaggcggttcaacctcatctgcgcaaatgcttcgattctatatcaaaactggagtttgcattgatgcccccagcagaggggaagattcctggaatcgacggggagcccgaaaaagtgtacacgaatgacattttagccatgttatcccctgagggagaacgcgtgtcactgggaaagggactgaaggctcgtggaaacgttgaggagtggctgggaaaggtggaagaagccatgttcacttctctgcggaggctttgtaaagccgccatcgctgactaccagggcaagttgaggactgactgggtggtggcgggtcatccctctcaggtgatattgacagtttctcagattatgtggtgcagagacttgaccgaatgtctggagaccgaacatagcaaccacattcaggcccttaaaaactttgagaaggtgaatttcgaacgactgaacgcactagctgcaatcgttcagggcagcctgccaaagctccatagaaacatcctgaccgccctcattactattgatgtgcatgcaagggacattgtgactgagctggtgcagtctaaggtggagaccgtcgagtccttcgattggcagcgacagctcagatactattgggatatcgacctcgacaactgtgttgcaaggatggccttgtctcagtatacctacggctatgagtatctgggggcgtgcccacgcctcgtgatcacccctctgaccgacagatgctacctgtgtctgatgggtgcactccaactcgacctggggggtgcacctgctggccctgcagggacagggaagactgaaacaaccaaggacttggcaaaggcgttagccattcagtgtgtcgtctttaattgttccgacgggcttgattacaagatgatgggtcgattctttagcggtctggcccagtcaggggcttggtgctgttttgacgagtttaatcggatcgacatcgaggtcctgagtgtgatcgcccagcagctgataaccatccgcaacgcgaaggccgctaagctctccagattcatgttcgagggccgagagatcaagctggtgatgacgtgtgcagcattcataactatgaaccctggttacgccgggagaaccgagctgccggataatctcaaagcgctgtttaggccgtttgccatgatggtacctaattacgccctgattgcagaagtgattctgtatagcgagggattcgagtcaagcaagatattggcacgcaaaatgactcagatgtataagctgtgcagcgaacaactgagccagcaggaccactacgattttggaatgagagctgtcaaatcagttctggtcatggcgggatcactgaagcgtgagaacccagacttaaacgaggacgtggttctcatcagggctttacaagactctaatctccctaagtttttgacggatgatgccctgttgttttcaggaataatctccgacctgttccccggcgttcagatacctgagcacgactacggaattctacaatcaaccattgtggatgtgatgaacaggcagaatttgcagcccgagatgtgcatggtccggaaagtgatccaattttatgaaactatgctggtgcgccatggcgttatgctggtgggacccacaggcggcggcaagacaacagtgtacaggattctggcagagacgctggggaacctgcagaaactcggaatcgaaaatagtttctaccaagccgtaaagacttacgtgctgaacccaaagagcattaccatgggagaactatacggcgaagtgaataaccttaccctggagtggaaagacggcctgatggcactgagcgttagagcagccgtgaacgacacatccgaggatcataagtggattatctccgacggtccagtggatgccctttggattgaaaacatgaataccgtgcttgacgacaataaaatgctgtgccttgctaactcagaacgcatcaagctcacgccccagatccatatgctgttcgaggtacaggatcttcgtgttgcgtcccctgcaaccgtatcccgttgtggaatggtgttcgttgatccggaggaactgaagtggatgccatacgtgaaaacatggatgaagggaatcagcaagaaactgactgaggagacacaggaatatattttaaacctcttccagagatacgtggacgaaggattacattttattaacaaaaagtgtagtcaggcgatccctcaggtggatatatccaaagtgacaaccctttgctgcctcctcgaatccttaatcttgggaaaagacggtgtcaacctggcaatggaacaaacaaaactcaatacgattctgtgtcagacttttgtattctgttacttgtggagtctcgggggaaacctgacagagaactactacgacagcttcgatacttttattcgcactcagtttgatgataaccccgacgcgaggctcccgaattccggagacctgtggagcatccacatggactttgacacgaaacgcttagatccctgggagaggatcattccgaccttcaagtacaaccgggacgttcccttttttgaaatgctcgtgcccactacagatactgtcaggtatggatatttgatggagaaattgctagctgtgaagcacagtgtactattcacaggcatcaccggcgtcggcaaatcagtgattgcaaaagggttgctcaacaaaatccaagaatcagccggatacgtgcctgtttacctgaattttagcgcccaaacctcatccgccaggacccaggaaataatagaatccaagctcgaaagaaaacggaagaatattttgggcgctccgggcaacaaacggattgttatctttgtagacgacctgaacatgccgcgcctggaccggtatgggtcccagccacctattgagctgctgcggcagtaccaagacttcggtggattctacgatcgaaataaactcttttggaaggaaatacaagacgtgaccattatctctgcatgcgcccctcccggaggcggccgaaatccggtgaccccacgattcattaggcatttcagtatgctatgtctcccgatgccttccgagcactctttaaaacagatattccaggccattcttaacgggtttctctcggactttccccctgcagtcaaacagaccgcttccagcattgtggaagcgtccgttgagatttacaataagatgtccgtggacttacttcccacccccgccaaatctcactatgtgttcaacctccgcgatcttagcaaatgtgtacaaggcattctgcagtgcgaccctggaaccatcagggaggagatccaaatctttagactcttttgccacgaatgtcagcgtgtctttcatgatcgtctgattaataatgaagacaagcactattttcatgtgatactaacagagatggctaataagcattttggaatcgcaattgaccttgagtactttctgaataaacccataatctttggagacttcatcaagtttggtgccgataaggccgaccgaatttatgatgacatgccagacatagaaaaaacagccaatgtgctgcaggactacctcgatgactacaatctcactaatcccaaggaggttaagcttgttttcttccaggacgccatcgagcacgtgagtagaatcgctcggatgattcggcaggagagggggaacgctctgttggtgggagtgggaggtaccgggaaacagagtctcacgcgtctagccgctcatatctgcgggtacaaatgcctgcagattgagctttcacgcggctacaactatgatagctttcacgaagatctgcgcaaactttacaagatggctggggtagaagacaaaaacatggtcttcctgttcaccgatacccagattgttgtcgaggagttcctcgaggacataaataatatcctgaacagcggcgaagtgccgaacctgttcgagaaggacgagctggaacaggtgctggcggccacgaggcccagggcgaaggaggtaggcatttcggagggtaacagggatgaggttttccagtacttcatcagcaaagtgcgccaaaagttacacattgtgctatgcatgtcgcccgtcggtgaagcttttcgctccagatgtcgaatgtttccctccttggttaattgttgcactattgactggtttgtacagtggcctcgggaagccctgctgagcgtcagcaaaactttcttctcccaggtggacgccggcaatgaggagttgaaggagaaactgcctttaatgtgcgtcaacgttcatctttccgtgtcctcaatggcagagcggtactacaatgagctccgccgaaggtactatactacacccacctcctatctggaactcatcaacctgtatctttccatgctatccgaaaaacgcaaacagatcatctctgcacgtgatcgagtgaaaaacggcttgacaaagctcctggagacaaatatcctagtcgacaagatgaaactggacctgagcgctttggagcccgtgctgttagccaagagcgaggacgttgaagcactgatggaaaagttagcagtggatcaggaatccgctgaccaggtgcgtaatacagtccaagaagacgaggccacagccaaggtgaaagccgaggagacgcaggccattgcagacgacgcccaaagggatctggatgaagcgctgccggccctcgatgctgccaacaaagctcttgacagcctggataaagccgatatcagcgagattcgcgtttttactaagcctccagatctggtgatgacggtcatggaagcaatttcgatcttattgaacgctaagccagattggccttctgcaaagcagcttcttggcgacagcaatttcctcaagagactgctggaatatgacaaagaaaacatcaagcctcagatcctggcaaagttgcaaaagtatatcaacaaccccgactttgtgccggagaaagtggagaaagtaagtaaagcttgcaagagcatgtgtatgtgggtgagagctatggatctgtacagcagagtggtgaaggtggtggagccaaagaggcagaaactgagagctgcccaggccgaactggacattactatggccaccctcagggagaagcaggctcttctccgccaggtcgaagaccaaattcaggctttacaggacgagtacgataaaggagttaacgagaaagaatccctggctaagactatggcattaacgaaagctaggttggtgcgggccggtaaactgactgccgctctggaagacgagcaagttagatgggaagagagcattcaaaaattcgaggaggagatctcaaatataacaggcaatgtattcatcgctgctgcgtgcgttgcatattacggggctttcacagcccaataccggcagtcccttatcgagtgctggatacaggactgccagagcttggagatcccaatcgatccaagcttttctctgataaatatcttgggggacccttacgagatacgccagtggaacacggacggactgcctcgcgaccttatttctacagagaacggcatcttggtcacccaaggccggcggtggcccctcatgatcgatcctcaagaccaggccaaccgatggattcggaacaaagagtcaaagtccggcctgaagattatcaaactgactgacagcaacttcctgcgtattctcgagaactctatccgcctgggtttgcccgttcttctggaagaactgaaagagaccctggaccccgctctcgagcctatattgcttaaacagatttttatttccgggggacgtttactgattcgtctgggcgatagcgatatcgactatgataagaacttcagattctacatgaccactaagatgccaaaccctcactacctacctgaggtatgcataaaggtgacgattattaatttcactgtgactaagtctggcctggaggatcagctgctgtcagacgtagtgagactcgagaagccccggctagaagagcagcggattaagctcatagtgcgcataaatacggacaaaaaccaattgaaaaccattgaggaaaagatcttgagaatgttatttacctcagaagggaatatcctggataatgaggaacttatcgacaccctccaggacagtaagataacgtctggggccatcaaaacacgccttgaagaggccgaatccactgaacagatgatcaatgttgcaagggaaaaatatcgtccagtcgctacccaggggtcggtcatgtacttcgtcattgccagtctgtccgagattgatccgatgtaccagtacagcttgaagtattttaaacagctgttcaacaccacaatcgaaacctctgtaaagaccgagaatttacaacagcggcttgatgtgctcctagagcagaccctgctaaccgcctatgttaatgtgtctaggggcttatttgagcagcataagctgatttacagcttcatgctctgcgttgagatgatgagacaacagggcacacttagcgacgccgaatggaatttttttctgaggggctctgccggtcttgaaaaggagcggccgcctaagccagaggccccctggctgcccactgcaacgtggtttgcatgttgtgacttggaggagagcttccccgtattccacgggctgacccagaatattctttcccacccaatcagtatccggctgggtagctttgagacatacatcaatccgcagaagtgggagggatatagcaagatgaaacacgaggacaagcatatgcggcaagaaaaggaggcagctcaccaggatccttggtctgccggcttgagcagttttcataagttgatcctgatcaagtgctgtaaagaagaaaaagttgtgttcgctctgacggactttgtcatcgagaacttggggaaacaatttatcgaaactccaccggtggacctgccaacgctataccaggatatgtcttgcaacacacccttagttttcatactaagcacggggagcgacccaatgggcgcgtttcaaagattcgcacgggaaagcgggtatagcgagcgggtccagagtatcagcctgggtcagggacagggtccgatcgctgagaaaatggttaaggacgcaatgaaaagtggtaactgggttttcctgcagaactgtcaccttgccgtgagttggatgctcgccatggaggagctgataaaaaccttcaccgacccagacagcgctattaaggacactttccgactgtttttgagcagtatgccttcaaatactttccccgtgacagtgttgcagaattccgttaaggtgaccaacgagccccccaagggattgcgggccaacattcgtcgcgcctttacagagatgaccccctcatttttcgaggaaaacattcttgggaaaaagtggcgccagatcatatttggcatctgctttttccatgcaatcattcaggagcgaaagaagttcggtcctttaggctggaatatttgttatgaattcaacgacagcgaccgggagtgtgctctccttaatctgaagctttattgtaaagaaggaaagattccctgggatgctcttatttacatcaccggggagattacgtatggggggagggttacagactcctgggaccaaaggtgcctgaggactatccttaagcgctttttttctccagagactctggaagaagattataaatactccgagagcggaatctattttgcacccatggccgatagcctccaggaattcaaagactatattgaaaatttgcccttaatcgatgaccctgagattttcgggatgcacgagaacgctaacctcgtctttcagtataaagagacgagcacgcttatcaacaccatattagaagtccaaccccgtagttctaccgggggggaagggaaatctaatgatgagattgtgcaggaattggtggccagcgtgcagacgagggtgccagaaaagctggagatggagggagcgagtgagagcctcttcgtgaaagacctccaggggcgtctgaattcgttaacaacagtgctagggcaggaggtggacagatttaacaacctcctgaagcttatacatacgagcctcgagacactgaacaaggcaatcgcgggctttgttgtgatgagtgaagagatggaaaaggtgtacaatagtttcctgaacaaccaggtgcctgcactctggtctaatactgcataccccagcttaaagcccctcggctcctgggtcaaagatctgatactgcggacatccttcgtggacctctggctgaaaagaggacagcccaaatcatactggattagcggttttttttttcctcaaggatttctgactggcactttacaaaatcacgccagaaagtacaatctacctattgacgaactgagctttaagtattccgtgatccctacctatcgggaccaggcggccgtcattgaggctgcaaagactgtgcagtttggccaggagcttcctatggacatggagctgccatccccagaggatggcgtgctggtgcacggtatgtttatggatgcgtcacggtgggacgataaggagatggtgattgaagatgccttacccggccagatgaaccctgtactcccggtggtgcatttcgaaccacagcagaactacaagcctagccccacactgtaccactgtcctctgtacaagacgggagctcgcgctggaacacttagcaccaccggacatagcacaaacttcgtcgtaaccgtgttactccccagcaaacggagtaaagattattggatcgctaaaggcagcgccctgctctgccagctgtccgaatag

SEQ ID NO: 186044 - DNA, 7593 bp, synthetic construct
  misc_feature 1..7593: note = Description of Artificial Sequence: Synthetic coding sequence
  source 1..7593: mol_type = other DNA
atgaccttccgggccaccgacagcgagttcgacctgaccaacatcgaggaatatgcggagaattctgccctttccaggctgaacaacataaaggcaaagcagcgtgtgagctatgtcaccagcacagagaatgaaagcgatacccaaatcctgacttttaggcacatcactaaggcgcaggagaagaccaggaaacgacagcagccaatcaagctagagccactacctgtgctgaaagtataccaggatcataaacagcctgaatacatacacgagcagaaccgatttcagttaatgacagctggcatcataaagcgccccgtaagtatcgccaaaaaatcgttcgcaaccagcagtacccaatttttagagcaccaagacgctgtgaagaaaatgcaaattcaccgaccctacgtggaggttttttcaccatctccccctaagctgcctcacacggggatcggtaagagaggactgtttggcaccaggtcctccgcttatccgaagtatacattccatgaccgggaggaggttgtaaaagccaatatccgcgacccactccagataatcaagataatccgcgagaacgagcacctgggctttctgtatatgattcccgccgtccctcggagctctatcgaatacgacacctataatctcaaagtggtaagctacgagaatatcaataagaacgactattacactatttctcagcgcgctgtcacccacatctataacgaggacatcgagtttatagagatcgatcgctgggaacaggaatacctgtatcacagggaactcacgaagatccccatttttagcctgtttcgcaaatggaaggcattcagcgtttggcgcaagaatgtgaggagcaaaaagattaccgggtgccagaaaagtctccagaaaaacctgtttattgttaacccgcacctgcgccccgcccttctgaagattaacgagctgtgttatcatttgagtttcatgggcctgtgctacattgagaagtgccacacttatacactgcaggagttcaaggctgctcaagtcattcggctagccgaggtcacggagaggttgggggaattcagaaatgaagccaagtatgtcgtccggcgagcatgcaggttcgctctgcgagcagcaggcttcgtgccggacgactgtgccttcggaccctttgaggattaccacaaggtgcagtcctccggttcgtttatcaatactcctcacgagctgcccacatatggcgatagcgaaaaaatgacctataccgagcaggcctcaaagagacactactgcatgcgactgacatgttttattcggttgaacgactaccttatcgaaaacaccatgcacatcttgacagtcaacgccgtaaactctttgttaaatcatcttactgacaagctgaagcgaactccttctgcagatgtgatccagaaatggattacggaagagaagcccgaggtccccgataaaaagggtacactgatggtggaaaagcaagaggaagacgagtcccttatccctatgttcctgaccgaattgatgctaactgttcagtctctcttgtttgaaccaagtttagaagatttcttagatggaatccttggagctgtgaatcattgccaaaatactgttctctcagtgcccaacctggttccagatagttactttgacgcttttacttcgccgtacattaacaataaactagaaggtaagacctgcggtacgggtccatccctcgcagctgtgttcgaggatgacaaaaacttccacactatcatctcccagattaaagagacgatccaagccgcgtttgagtccgctcggatctacgcggcgaccttcgaaaagttccaaatctttttcaaggaaaatgaatctctggacttacaggcacttaaactgcaggagccggacattaattttttcagtgagcagctcgagaagtaccataaacaacacaaagacgctgtagctctgcgccctacgcgaaatgtggggctgttactgattgacacacgtctcctaagagaaaagctgatcccatccccgcttcgctgtctcgaggtgttaaacttcatgcttccaagacagtcaaaaaaaaaagtggacgccattatttttgaggcccaagacgcagagtacaaattagaatttgtgccaactaccaccactgaatatgtacacagcctgctttttctcgacgagattcaggagaggatcgagtctctggaggatgagggtaacatcgtgacacagatgtacaaactgatggagcaataccaagttcccacccctcctgaggatttcgccgtttttgccaccatgaaaccctccatcgtagctgttaggaacgccatcgataagtcagtaggggaccgtgaaagctcaatcaaacagttctgcgtgcatctgggaagtgacttggaagaattgaacaacgaagttaacgaagttaaacttcaggctcaagatccgcagatcctagacatcagtgcagatcaagataagatccgactcattttgaacaacctgcaatccgttctggcagatctccagaaacgggcttttcaatataaatcctaccaaaaaaactttaaggttgaagtgagcaagtttgaagcgctagaggaggtgtccgccgagctgaaactgaaacagcttctgtgggactcattctccgaatgggataaactccagcaggaatggctgaaatctaagttcgattgcctggatcctgaggtccttaatggacaggtgtctaagtatgcgaaattcgtgacccagttggaaaagggcttacctccgaacagtgtggtaccgcagttgaagtacaaggttgaaaaaatgaaggaaaagctccctgtgatcattgacctgagaaacccaactttaaaagctagacactgggcagcgatcgagcagaccgtggatgcaacgttggtcgacgccgaaataccactcacacttgagaggctgtcccagctgcatgtcttcgacttcggccaagaaattcaagacatttctggacaagccagcggggaggccgccctggaggccattctcaagaaggtggaagatagctggaaaaccaccgaatttgtgattcttccacaccgagactctaaagacgtcttcatactcggcggcaccgacgacattcaggtcctgcttgacgattcaaccatcaacgtggccaccctagccagtagtcggtatctggggcccctaaagaccagagttgacgaatggcagaagcagctggcactctttaatcagaccctggaagagtggctgacctgtcagagaaactggttgtacctggagagcatcttcaacgcccctgacattcagcggcagctgcccgcagaggctaagatgttcttacaggtggacaagtcttggaaggagataatgcgaaaagtgaaccggctgcctaacgcactgcgcgccgcaactcagcctggactgctagagacatttcaaaacaacaacgcacttctcgatcaaatccagaagtgtcttgaagcttatttggagtcaaaacgtgtcatttttcctaggttctatttcctgtctaacgacgaacttttggaaatactcgcccaaacccgcaatcctcaggccgtgcagccacatttaaggaagtgttttgacagcatatccaaactcgagtttgcgctgatgccgccagccgaggggaagatcccagggatcgacggcgaaccagaaaaggtgtatacaaatgatatcctggctatgctttctcctgaaggagaacgagtatcccttgggaagggtcttaaagcccggggcaatgtcgaagaatggctcggaaaggtggaagaggccatgttcacatccctacgccgattatgcaaagccgcaattgccgattaccaggggaaactcaggaccgactgggtggtcgcaggccatccctctcaggttatcctaaccgtcagccagatcatgtggtgccgcgatttgaccgagtgcctggagaccgaacattctaatcatatccaagctctcaagaacttcgagaaggtgaatttcgaacggctgaatgcactggcggctatagtccaaggcagtctgccaaaactccacaggaatattttaacggctctgatcacgattgatgtccacgctagggacatcgtgaccgaactggtgcagtcaaaggtcgagaccgtggagtcttttgattggcagcgacaattacggtactactgggacatcgacctggacaattgcgtcgcccgtatggccttatcacagtacacatacgggtacgagtatttgggggcatgccctcgcctcgtgataactccactgaccgaccgatgttacttgtgtctcatgggtgcccttcaacttgaccttggaggagcccctgcaggaccagccggtactgggaaaacagaaactaccaaggatctcgccaaggccctggcgattcaatgcgtggtattcaattgttccgacggccttgattacaagatgatgggtcgctttttttccggcctcgcgcagtccggagcgtggtgctgctttgatgagttcaaccgcatagacatcgaggtgctgagcgttatcgcacagcagctcataactatacggaacgccaaggccgctaagctgagtagattcatgtttgaggggagagaaatcaagctggtaatgacctgtgcagcctttattaccatgaacccagggtatgccggccgcacagagcttccagacaatctcaaggcattattccgaccctttgccatgatggtgcctaattacgccctgatcgccgaggtgatcctgtattctgagggttttgagtcatccaaaatcctcgccaggaagatgacacagatgtacaagctgtgctcggagcagctcagtcagcaagatcactacgacttcgggatgcgcgccgtgaaaagcgtcctggttatggctggcagcttgaagcgcgagaatcctgatctgaatgaagacgtcgtgctcataagagctttacaggatagtaatcttcctaagttcctaacagatgatgccctcctgttttcgggcattatttcagaccttttccccggggtgcagatccctgagcacgattatgggatccttcagtctaccattgtagacgtgatgaacagacaaaacctgcagcctgaaatgtgcatggtgagaaaagtgattcagttctacgaaacaatgctggtgcgtcacggtgtgatgttggtgggccccaccggcgggggtaagaccaccgtatatcgaatcctcgcagaaactctgggtaacttacagaaactcggcattgagaactcattttaccaagcggtaaagacatacgtcctgaaccccaagtcaatcaccatgggagaactctatggggaggtcaacaatttgacactggagtggaaagacggacttatggctctcagtgtaagagcagctgttaacgatacatcagaggaccacaaatggattatatcagacggaccagtggatgctctgtggattgagaatatgaacacagtgcttgatgacaataaaatgctgtgcctggcgaattcagaaagaattaaactgacaccacagatccatatgttattcgaggtacaggacctgcgcgtcgccagcccagccactgtcagtcgatgcggcatggttttcgtcgacccggaagagttgaagtggatgccctatgtaaagacatggatgaaaggtattagcaagaaactcacagaggaaacccaggagtatattctgaacctcttccagcggtatgtggacgaagggctccattttatcaataaaaaatgttcacaagccattccccaggtagacattagtaaagtgactacactgtgctgtttgttggagagcctaatcctggggaaagatggagtgaacttggcaatggaacagactaagctgaatactattctctgccagacatttgtgttctgttatctatggtctctaggtggcaacctcactgaaaattattacgatagctttgatactttcatcaggacccagtttgacgataacccagacgcgcgtttacccaactcgggcgacctgtggagcattcacatggattttgacacaaaacgtcttgatccgtgggaacgcatcattccaacctttaagtataacagggatgtgccttttttcgaaatgctggttcctactactgacacagtgaggtacggatacctcatggagaagctgttagccgttaaacactcagttctctttaccggcatcaccggagttggtaaaagtgtgatcgcaaagggactccttaacaagatccaggaaagtgcggggtacgttcctgtatatctcaatttcagcgcccagacatcaagtgctaggacccaggaaataattgagagcaaactcgagcgaaagagaaagaacattctgggggccccaggaaataaacgcatcgtgattttcgtggacgatctgaacatgcctcgcctagaccggtatgggagccagcccccaattgagttgctgcggcagtatcaggatttcggcggcttctacgaccgcaacaagctgttctggaaagaaattcaggacgtgacaatcatttctgcttgcgcgccacccggtggcggtcgcaatcccgtcaccccccggtttatccgacattttagtatgctatgtcttcccatgccatccgagcactccctgaaacagattttccaggctattctaaacggatttttgagtgatttcccacctgcagtgaagcagactgccagcagcatcgtggaggcttcagtggagatttataacaaaatgtcagtggacctactcccgacacccgctaagagtcactatgtgttcaatttgcgtgatctgtcaaagtgcgtgcaggacaagcattttggcatcgccattgatctcgagtattttctgaataagccaattatttttggagactttatcaagttcggtgccgacaaagccgaccggatttacgacgacatgcctgacattgaaaaaaccgccaatgtgctccaggattatctggatgattacaatctgaccaaccctaaagaagttaaactggtatttttccaggatgccatcgaacacgtatcacgaatagcacgtatgatacggcaggagaggggcaatgcgctcctcgtgggagtgggcggcaccggcaagcagagtctgacgcgacttgctgcccacatatgtggctataagtgcttgcagattgagttaagtagaggttacaactacgacagctttcatgaagacctgagaaaactatacaaaatggctggcgtggaagacaaaaacatggtatttctcttcaccgatactcagatcgtagtcgaagagtttctggaagacattaataatattctgaattcaggggaggttcctaacttattcgaaaaggacgagttggagcaggtcctcgcagccacacgcccaagagcaaaagaggtaggaatcagtgaaggtaatagagacgaggtgggctgtgctagagtagtcatgtggctctaccacaagaacgtatccagcccctttatttag

SEQ ID NO: 186045 - DNA, 14088 bp, synthetic construct
  misc_feature 1..14088: note = Description of Artificial Sequence: Synthetic coding sequence
  source 1..14088: mol_type = other DNA
ggcgccgaggccccccccagcaccgaggaggccgcccccccccggtccgaggaagaggaagcccctcgacctccaacagtcgaagcacccgccgaggacggctttagcccctctgcggaagacgccgtgagtagcgtggtggactaccgcgatcttattccgtctgaggaagggatcgtgctccccgacgatcatgaagcggacctcaacagagtcaggcagcggctagcgccccgccctgttcaaagcgtcattagtgaagtcctgagcctgcccagcagtagacggagtagtagatatcggagatcgatgagcggcctgcccaacttacaggagactctgaaggagaggcaagcccgatttcgggaggctcgggagtctcggcgccttaagatagatccctcatacaagtatatttttgagattctcgctgagaacctgggtctggacattgttacagtagaggagctcatacttgattgcccctctttggaggccttcaccaatttcttcgctaaggacggctgtaaaacccttaaattcctgtatcaggagggcgacgtacccggcatcgagtgcggacggaccattgccggcgcgacaaagggcgctaaaatgatgaagttgtacattgacaatgccgcaccagacaaacttaaaggcctgtgcatcttcttcgtgagatgccgtaacgacgtagcaataaatgtgaaaacgatccaggaagaggctctcttcaccgttttggacgccagcaaaggcctcttgaatgggataagagacatgctggcgaatattttcctgcccgccgtcctcgcgaccaataactggggggcactaaaccagtcaaaacagggtgaatccgagaagcatatttttactgagactatcaaccggtacctgtcattcctcgacggtgcgcgcatatccatagagggaacagttaagctcaaaaccatcgacaacgtcaatttcagcaagttgcataccttcgaggaggtgacggcagccgcctcaaatagcgagacggtccatcaactggaagaggtgcttatggtgtggtacaagcagatcgaacaggtcctgatcgaatccgagcagatgcgcaaagaggccggcgacagcggccccctgacagagctggaacactggaaaaggatgtcagcgaagttcaattacatcatagagcagattaaagggccgtcttgcaaggccgtaataaacgtgcttaacgtggcacactcaaagctcctaaaaaactggagagacttggacgcaagaataacagacacagctaatgagtcgaaggataatgtgcgatatctctatacgctggaaaaagtttgtcagcctctgtacaaccacgacctggtgtccatggcacatggaattcagaatctgataaacgccatacgcatgatccatggagtgtctaggtactacaacacaagcgaacgaatgacctccctgttcataaaggtaactaaccagatggttacagcttgtaaagcatacatcacagatggcggcctgaatcacgtgtgggatcaggagaccccagttgtcctcaagaagatccaagactgtattttcttattcaaggagtatcaggcttccttccataagactcgaaaactcatcagtgaaagcagcggcgagaagtcttttgaagtgtctgagatgtacatcttcggtaagttcgaggctttttgtaagcgtctcgaaaaaatcaccgaaatgatcactgtcgtgcagacttacagcacactgagtaatagcactatcgaaggaatcgacattatggctattaagtttcgcaatatatatcagggcgtgaaaaaaaagcaatatgacattctggacccacgacggactgagttcgacactgattttctggattttatgacaaaaatcaatggacttgaggtgcaaatccaagccttcatgaattctagtttcgggaagatcctgagttcacagcaggcgttgcagctgctccagcgctttcagaagctcaacatcccttgtctggggctagaaatcaatcacaccatcgaaagaattctgcaatactacgtagctgagctggacgcgactaaaaagttataccacagtcagaaagatgatccccctctcgctcggaatatgcctcctattgccggcaaaatactgtgggttcggcaactctatcgccggattagtgagccaattaattatttctttaaaaattccgacattctgagtagtcctgacggtaaggcagtcattagacaatacaacaaaatatcttacgtgcttgttgaatttgaagtcgtttaccacactgcttggataagagagatttcccagttacactatgcattgcaggcgaccctctttgttagacaccctgaaactggcaaactgcttgtcaactttgaccccaagattctcgaggttgttcgcgagacaaaatgtatgataaagatgaaacttgacgttccagagcaggcaaaacgcctgctcaagctcgaaagcaagctgaaggctgacaaattatatttgcaggggctgctccagtactacgatgagctgtgtcaggaagtgccaagcgtgttcgttaacctcatgactcccaaaatgaaaaaggttgagtccgtgctgaggcagggacttaccgtcctgacctggtcctcactgaccttggagtccttcttccaggaagttgaactcgttttggacatgttcaaccagctgttaaagaagatttccgatctgtgtgaaatgcacatagacacggtcctgaaggagatcgctaaaacagttcttatctccctcccagaaagcggtgccacaaaggttgaggacatgctgacactcaacgaaacctatactaaggagtgggcggacattctgaatcacaagagtaagcacgtggaagaggctgtaagagagctcatttcgatcttcgagcaaatctacgaggtgaagtacacagggaaagtgggcaagcaatcagagcagcggaagcatgtagtgtttggatccgagactggagagggcgagaataacgactatgaagccaacatcgtcaatgagttcgacacccatgacaaggaagacgagtttaagaaggagtgcaaggaagtgtttgcattcttcagccaccaactccttgattctctgcagaaggctacaagactatctctggatactatgaagcggcggatttttgtggcatcactgtatggacggaagcagtcagaagacattatcagcttcatcaagtcagaagtgcacctggcaatccctaacgtagtcatgattccttcgctggacgacattcaacaggcgatcaataggatgatccagctcaccctcgaagtgagccgcggggtggcgcattggggccagcagcagattcgccctattaagagcgtcattccctctccgactacaactgatgtcacccaccaaaacacaggaaaactcttgaaaaaggaggagcggtcatttgaggaggcaataccagcgaggaagctcaagaacttttacccaggtgttgctgaacacaaggacatttcaaaactggtccttctgctttcatctagtgttaattctcttcgtaaggccgcccacgaggcgctccaggactttcagaaatataagactttgtggaccgaggaccgcgatgtaaaggtcaaggaatttctcgcaaataacccatctctgacagagatccgatccgagatcctccactatgctacctttgagcaggaaatagacgaacttaaacctatcattgttgttggagcacttgagctccatacagaacccatgaagctggccctgtcaatcgaagcaaaagcatggaaaatgctgttgtgtagatacctgaacgaagagtataaaaaaaaaatgtcttacatgatcgccttcataaatgaatatctgaagaaactgtccaggcccatacgagatttggatgatgtaaggtttgccatggaagctctgagttgtattcgggataatgagattcagatggatatgaccctgggccctattgaggaggcatatgccattcttaaccgctttgaggttgaagtgacgaaggaagaatccgaagccgtggacacccttaggtactccttcaacaagttgcagtctaaggctgtcagtgtacaagaggacctggtgcaggtgcagccgaagtttaagagcaatcttctggagtccgtggaagtcttccgagaagatgtgattaactttgcagaagcatacgagttagaaggtcccatggttcccaacatcccaccccaggaagcctctaataggctgcagatctttcaggcatcgttcgatgatctatggcgtaaatttgtgacatattccagcggagagcagctgttcggcctccctgtcactgactacgaggtgctgcacaagaccagaaaggagttgaatctgctccagaaactctacggtctgtacgatacggtgatgagctcaatcagtggatactacgagatcctgtggggcgacgtggacatcgagaagatcaacgctgagctcctggagtttcagaaccgctgcagaaaattacctaagggcctcaaggactggcaggcctttttagaccttaagaaacgcatcgacgacttttcagagagctgtcccctcctggagatgatgacgaacaaagccatgaagcagcgccattgggaccggatatccgaactcaccggcactccattcgatgtggagtcagattcattttgtctgcgaaacatcatggaggcaccccttctaaagcataaggatgatatcgaagacatctgcatctcagccatcaaagagaaggacatcgaggctaaactcacacaagtgattgagaattggacaaaccagaatctatcttttgctgccttcaaggggaagggcgagttgttgctgaaggggaccgagtccggggagatcattaccttaatggaggatagcctaatggtgctgggaagtctgctatccaatcggtacaacgcgccatttaagaagaacatccagaactgggtgtataagctgtctacgtcttccgacatcatagaggagtggctagtggtccagaacttgtgggtgtacttggaggcagtatttgtcggcggcgatatagcaaagcagttacctcaggaagccaaacgctttcagaacatagataagagctggatcaaaattatgcagcgcgcacatgaaaatccaaacgtgatcaactgctgtgtaggcgatgaaaccatgggccaactcttgccacacctgcacgagcagctggaggtttgccaaaaatccctgactggatatctagagaagaaaaggctgttatttccacgatttttctttgtgtccgatcccgtgctcctggagattctagggcaagcctcagattcgcacacaatccagcctcacttacctgctgtgagcgacaatatcaacgaagttacatttcacgcaaaagattatgaccggataatggctgtgatcagtcgggaaggagagaaaatcgtattggataactccgtcatggcaaagggacccgtggaaatatggctactggacttgctcaaaatgcagatgtcatcccttcacaatatcataaggtcagccttttaccagatcagtgactccggatttcagctcctgccattcctctcacatttcccggcccaggtcgggctcctaggcatccaaatgttgtggacccatgacagcgaggaggctctgcggaatgctaaggatgatcgcaagattatgcaggtgactaatcagaagtttttagatattcttaacaccttaatttctcagaccacgcatgatcttagcaagtttgatagggtcaagttcgaaactcttatcactattcacgtgcaccagcgggacatcttcgatgatctggttaaaatgcacataaaatcacctacggactttgagtggctcaaacagtcccggttttattttaaggaagatctagatcagactgtggtgtctataacggatgtggattttatttaccagaacgaatttttggggtgtaccgaccggcttgtaataacgcctctgacagataggtgctatataacactcgcccaggcactggggatgaacatggggggcgcccccgcaggccccgcgggaacagggaaaactgaaactaccaaggacatgggccgctgtctcggcaaatacgtcgttgtttttaactgttctgaccagatggattttcgtggcctcggtagaatatttaagggtctagcccagagtggctcttggggctgttttgatgagtttaatcgaatcgagctcccagtcctcagtgtcgctgcccagcaaatttacattgtcttaacggctcggaaagagaggaaaaaacagtttattttctctgacggagactgcgtcgatctgaacccggaatttggcatctttctgaccatgaacccaggctatgctggccggcaggagctaccagagaatcttaagatccagttccgaaccgtagccatgatggtcccagaccgccagattatcatgcgagtcaagctcgctagctgcggcttcttggaaaacgtgatcctggcacaaaagttctacgttctgtataaactgtgcgaggagcagctgacgaagcaagtccattatgacttcggactcaggaacatacttagtgtgcttcgcaccctgggttctcagaagcgtgcaagacctgaggattcagaactttctatagtgatgcgtggcttgagagatatgaatcttagtaaattggtggatgaggatgaacctctgttcctaagtctaataaacgacttgtttcctggattgcaactcgattctaacacctatgccgagttacagaatgctgtggcacaccaggtccagatagaaggactgatcaaccatccaccctggaatttaaagttggtccagctgtatgaaacttccctggtgaggcacgggctgatgacactgggtccctccggatcaggcaagactacagtcatcactatcttgatgaaagcccagactgaatgcggccggccccatcgggaaatgcggatgaatcccaaagctatcaccgcacctcagatgtttggacgactcgatacagctactaatgactggaccgatgggatcttctcaactttgtggcggaaaacattaaaggctaaaaaaggagaaaacatcttcctgattttggatggccctgtggacgccatatggattgaaaacctgaactcagtactggacgataacaaaaccctcaccctcgcaaacggcgatagaattcccatggccccaagctgtaagttgttgtttgaagtccataatatcgaaaatgcctcacccgcaacggtctcaagaatgggtatggtatacattagcagctccgcattgagctggcgcccaatcctccaggcctggctcaaaaaaaggaccgcgcaagaagccgcagtgttcctgacactgtatgaaaaagtgttcgaggacacatacacatatatgaaactgaacctgaatccaaaaatgcagctgctagaatgcaactatatcgtgcaatctcttaacctgctcgaaggcctgattcccagcaaagaggaaggcggcgtgagttgcgtggaacaccttcataaactctttgtgttcggcctcatgtggtcgttaggagcccttcttgagctcgaatccagggagaagctcgaggccttcctgcggcagcacgagtctaagttagaccttccagaaattccaaagggttctaatcagactatgtacgagttctatgtgacagattacggtgactgggaacattggaacaagaagctccagccctactattaccccacagactctataccagagtactctagcattctggtgcctaatgtggataacatccgaacaaattttctgatcgacactatcgccaagcagcacaaagccgtgcttctgactggcgagcagggcaccgccaagactgtaatggtgaaagcatacctaaagaaatatgaccctgaggtgcagctgagtaagtccctgaatttttcaagtgccaccgaacccatgatgtttcagcgtacaatcgaaagttacgttgataagaggatcgggagcacctacggcccaccaggcggccgcaagatgacagtatttattgatgatatcaatatgcccgtaatcaacgagtggggcgatcagatcacaaacgagatcgtcagacagatgatggaaatggaaggtatgtacagtctggataagcctggggatttcacgactatagtggacgtgcagctcatcgccgcaatgattcatccgggcggcgggcggaacgatatcccccagagactaaagaggcagtttacagtcttcaactgcaccctgcccagtaacgccagcatcgataagatctttggcattataggatgtggttattttgacccatgcaggtcattcaagccccagatttgcgaaatgattgtaaaccttgtgtctgtgggccgggtgctctggcagtggaccaaggtgaaaatgttgcccactcccagcaaattccattatatattcaatctgcgggatttgtccagaatttggcagggcatgcttacaatcaaagccgaagagtgtgcgagcatccctacgctcctgtccctgttcaaacacgagtgcagcagagttatcgccgaccgatttataaccccagaggatgagcagtggtttaatgcgcacttgactagggctgtagaagaaaatataggaagtgatgcggcctcatgtatcctgcctgagccatacttcgtggactttctgcgcgaaatgccggagcccactggggatgaacccgaagactcagtctttgaggtcccaaagatctatgagctgatgccctctttcgactttctggccgagaaacttcagttctatcagaggcagttcaacgagataatcagaggcacctctctcgaccttgtattctttaaagatgctatgactcatctcattaagatctcccggattattcgcacttcttgcgggaacgccttactcgtgggcgtgggcggtagtggcaaacaaagcttgtcccggctagcctccttcatagccggctaccagatcttccagatcaccctgacgcgaagctataacgtgaccaatctgacggatgacttgaaagctctgtacaaggtcgccggagccgatggaaaggggattacttttatcttcaccgactctgaaatcaaggacgaggccttcctggaatatctgaacaacctcctttccagcggcgagattagtaatctcttcgcgcgggacgaaatggatgagattacacaggggcttatcagcgtgatgaagagggaactccctagacatccgccaacctttgacaatttgtatgagtatttcatttcgaggtcgaggaaaaatctccatgtcgtgctctgcttctctcccgtgggtgaaaagtttagagcccggtccctgaagtttccgggactgatttctgggtgcacgatggactggttcagtaggtggcctcgcgaagcgctcatagctgtcgcctcctattttctttctgattataacattgtctgcagcagcgagatcaaacgccaggtggtggagactatgggcctgttccatgacatggtgagtgaaagctgtgagtcctacttccaacgctatcgccgtagggctcatgttaccccaaagagctacctgtccttcatcaacggatataagaacatctatgctgaaaaagtcaagtttattaatgaacaagctgagagaatgaacatcggattagacaagctgatggaggccagtgaaagcgtggctaagttatcccaggacctggccgtcaaagagaaggagctcgcggttgcctcaatcaaagcagatgaagtgctcgccgaagtgacagttagcgcccaggctagcgcaaagattaagaacgaggtgcaggaggtaaaagataaggcacaaaaaatagtggacgaaatcgattcagagaaggtcaaggcagagagtaaactcgaggcagcaaagccagcactggaggaggccgaagctgcccttaacacgatcaaacccaatgacatagcaactgtccgcaagctcgccaaaccgcctcacctcattatgcggatcatggattgcgtgcttttactgttccaaaaaaagattgatcccgtgaccatggacccagaaaagagttgctgcaagcctagttggggtgaaagtctgaagttaatgtccgcgacaggatttctgtggtccctgcagcagttccctaaggatactataaatgaagagacggtggaattgctacagccctatttcaacatggacgactacacatttgagagtgcaaaaaaggtgtgtggtaacgtcgctgggctgctgtcctggacattagctatggcgatattctacggcatcaaccgcgaggtcttaccgctgaaagccaacctggcgaagcaggaggggaggctagcggttgccaatgctgagctgggaaaagctcaggcactgttagatgagaaacaagctgagcttgataaagtacaggccaagttcgacgcagctatgaatgaaaagatggatcttttaaatgacgccgacacttgccgcaaaaagatgcaggcagcatccacgcttatcgacggactcagcggcgagaagatccgatggacacagcagtctaaggagttcaaggctcagatcaaccgcctagttggagacatactgctctgtacggggtttttatcatatctgggacctttcaaccagattttccggaattatctgttgaaggatcagtgggaaatggaactgagagcccggaaaatcccctttactgaaaaccttaacctgatttccatgctagtggatcctcccacaattggagagtggggtttgcaaggactgccgggggacgacttaagtattcagaacggtattatagtcaccaaagcaactagatacccactcttaattgacccacagacccagggcaagacctggattaagtctaaagagaaggagaatgacctccaagtgaccagccttaatcataagtacttcagaacacacctagaagatagcttgtctctcggacgacccctcttgattgaagatattcatgaagagctcgatccagccctggacaatgtgttggagaaaaatttcatcaagagtggaacaacgtttaaagttaaggtcggcgacaaggaatgcgatatcatggacacatttaagctgtacatcaccaccaagctgcctaaccccgccttcacccccgagatcaatgcgaaaacttccgttatcgatttcacggtcaccatgaagggcctcgagaaccaattactcaggcgggtgatcctcaccgagaaacaggagctggaagcagaaagggtgaaattactagaggacgtgacctttaataagcgtaaaatgaaggaactggaggataacctgttgtataaactctctgctactaagggcagcctggttgacgatgagagtttgattggcgttctacgcactaccaagcagaccgccgctgaggtctcagaaaaattacacgtcgctgctgagaccgaaattaaaatcaatgccgcccaggaggagtttagaccggcagctacccgaggtagcatcctgtatttcctgattaccgagatgtccatggtaaatatcatgtaccagactagcttagcacaattcttgaagctgttcgaccagtcaatggcgaggtcggaaaagagcccactgccgcagaaacgaattaccaatattatagagtatctgacctacgaagtcttcacttatagcgttcgcgggctttacgagaaccacaagttcctcttcgtgcttcttatgactctaaagattgacctccagcgcggtaccgtgaaacatagagaattccaggccttaatcaagggcggagctgcactagatctgaaggcgtgtccgccgaaaccgtaccgctggatcctcgatatgacatggttgaatcttgtggagctctcaaagctgcctcagttcgctgaaattatgaatcagataagccggaatgaaaagggatggaaatcttggtttgataaggacgcccctgaagaagaaatcattcccgacggctataatgactccctagacacgtgccacaagttgctccttattagaagttggtgtcccgacagaacagtcttccaggcacgcaaatatatagccgacagtttggaggagaagtatactgaacctgtgatccttaatctggaaaagacgtgggaagaatcagatacccgaaccccactgatctgtttcctctcaatgggatctgaccccactaaccaaattgacgccctggccaaaaagcttaagttagaatgccgtaccattagtatgggccagggacaggaagtgcacgctagaaagcttatccagatgtctatgcagcagggaggctgggttctcctgcagaactgtcacctcggtctggagttcatggaagaactgttagagacactgatcacgacagaagcatccgatgacagctttcgggtctggatcaccaccgagccccacgacaggtttcctattaccctactgcagactagcttgaagtttacaaatgagcctccccagggggtgagagcaggcctgaaacgcacctttgcggggatcaaccaggacctgctcgatatatctaacctgccgatgtggaagccaatgctatacacggttgccttcttgcacagcactgtccaggagagacgtaaatttggtccattgggatggaatattccttatgaattcaacagcgctgatttttcagcttcggtgcagttcattcagaaccacttagacgaatgtgatatcaaaaaaggtgtgtcgtggaataccgttcgctatatgattggcgaagtacaatacggcgggagggtgactgacgattttgacaaacgtctgctgaactgcttcgcacgggtatggttctctgagaagatgttcgaaccctccttctgcttctacaccggttacaaaatccctctgtgcaaaacgctcgaccagtattttgaatatatccagtcactaccctccctggataaccctgaggtgtttggcctccaccctaatgccgacattacataccagtccaacacagcgtcagcggtcctggagactatcacaaatattcagcctaaggaatctggcgggggcgtgggcgaaacccgagaggccatagtgtatcgcctgtcagaagatatgctgtccaagttgccgccagactacattccccacgaggtgaagtcacggctaattaagatgggccatctgaatagtatgaatatctttcttaggcaggaaatcgataggatgcagagggtgattagcatcctcagatcatctctttcagacttgaaactggctatagaggggacaattattatgtctgagaatctgcgcgatgccctcgacaacatgtatgacgctcgcattccccagctttggaaaagggtaagctgggactcgagcacactaggattctggtttaccgagctgctggaacgtaatgcacagttttctacttggatattcgaaggcagaccaaacgtgttttggatgaccggcttctttaacccccagggtttcttaacagcaatgcgacaggaagtaactagggcgcataaaggatgggcattggacacagtcacaattcacaatgaggtcctgcgccagacaaaagaggagattacaagccctccaggcgaaggcgtttatatctatggactgtatatggatggtgcagcctgggataggagaaatggcaaactcatggaatccactccaaaggtcctcttcacccaactgcccgtgttgcacatctttgcaatcaattccaccgctccaaaggacccaaaactttacgtgtgtcccatctacaagaagccacgacgtaccgatctgaccttcatcaccgtcgtgtacctgcgaacagtactcagccctgaccattggattctgaggggcgttgctctattatgtgatatcaagtag

SEQ ID NO: 186046 - DNA, 13473 bp, synthetic construct
  misc_feature 1..13473: note = Description of Artificial Sequence: Synthetic coding sequence
  source 1..13473: mol_type = other DNA
atgatgaagctgtacatcgacaacgccgcccccgacaagctgaagggtctgtgcatatttttcgtgaggtgtcggaatgatgttgccataaatgtcaagacaattcaggaggaagccctgtttacagtgctagacgctagtaaaggcctgctgaacggcattagagacatgttggctaatattttcctacctgctgtcctagcaacaaataattggggtgcacttaaccaatcaaaacagggtgagtcagagaagcacatctttaccgagacaatcaatcgctatctgagtttcctcgatggcgcacgcatctccatcgagggcacggtcaaactgaagaccatcgataacgtgaactttagtaaacttcacacattcgaagaggtgacagccgctgctagcaatagtgagaccgtacaccagctggaggaggtgctgatggtttggtataaacagatcgaacaagtgcttatagagtcagagcagatgcgcaaggaggccggggatagtggacccttaactgagttggagcactggaagcgaatgagcgcgaagtttaactacataatcgagcaaatcaaaggcccatcatgcaaagcggtcatcaacgtcctaaacgttgcccactcaaagttgctcaagaattggagagatttagatgccagaattacggatactgcaaacgagagtaaggataatgtgaggtatctctacaccctggagaaggtctgtcagcctctgtacaaccacgatcttgtgagcatggcccatggtatacagaatctgattaatgcaattaggatgattcatggggtgtctaggtactataatacctctgaacggatgacatccctgtttattaaagttacaaatcagatggttacggcctgcaaggcttatattaccgacggtggtttgaatcacgtgtgggatcaggagacccccgtggttctgaagaaaattcaggactgcatatttctctttaaggagtatcaagcatccttccataaaacgcgcaagctaataagcgagagttccggcgaaaaatcctttgaggtgtccgaaatgtatatatttgggaagttcgaagccttctgcaagcggctcgagaaaatcacagagatgattacggtcgtgcaaacatacagtaccttgtctaactccacgatcgaagggatcgatattatggcaataaaatttcgcaacatttaccagggagtcaagaagaaacagtacgacatcctggatcccaggaggacagaattcgacacagactttctcgatttcatgacgaaaataaatggactggaagtgcagattcaagccttcatgaactccagctttggcaagatactgtcaagccagcaagcactgcaactactgcagcgcttccagaagctgaatatcccgtgcctgggcctggagatcaaccacacaatcgagagaattctccagtactatgtggcagagctggacgctaccaagaaactgtaccattctcagaaggacgatcctccactcgcgcgcaacatgccccctattgccggaaaaattttgtgggtaaggcagttatatagacgcatcagcgagccaatcaactatttcttcaagaactcagatattctttcctcaccagatggtaaggccgtgattaggcaatacaataaaatttcctacgttctcgtggagtttgaggttgtctatcatacagcttggatccgcgaaattagtcagttgcactacgctctgcaggctactctttttgtacgccaccctgagactggtaagctgctggtaaatttcgatccgaagattctggaagttgtgagagaaacaaagtgcatgatcaagatgaagctcgatgtgccagaacaggctaaacgactgcttaaactcgaaagtaagctgaaggccgacaagctatacctacagggactgctgcagtactacgacgagctgtgtcaggaggtgccttccgtatttgtcaacctgatgacacccaagatgaagaaggtggaatcagtcctcaggcaagggctgactgtgcttacctggtcctctcttactcttgaaagcttcttccaggaggtcgaactggtgctcgatatgttcaaccagttgttgaaaaagattagtgatctgtgcgagatgcacatcgatacggtgctcaaggagatcgcaaaaacagtcttaattagcctcccagagtctggggctacaaaggtggaggatatgctcacactgaatgagacctacacaaaagagtgggcggacatcctgaaccacaagtccaagcacgttgaagaagcagtgcgagagctgatctccatatttgaacagatttatgaggtcaagtacactggcaaagtggggaagcagagcgagcagaggaaacatgtagtgttcgggagtgaaaccggcgagggggagaacaacgattacgaagcaaacattgtcaatgagttcgatacccacgacaaagaggacgaattcaagaaagagtgtaaggaggtgtttgccttcttcagtcaccagttactcgactctctacagaaggcaactaggctgtccctggacactatgaaacggaggatctttgttgctagcctgtacgggcgtaagcagtcagaagatattattagttttatcaaatctgaagtccaccttgcaatcccaaatgttgtgatgattccctctctggatgacattcaacaggccataaatcgcatgattcaactaaccctcgaagtgagtcgaggggtggcccactggggccaacagcagattaggcccattaaatcagttattccctcccccaccacaacggacgtcacccatcagaacacgggcaagttacttaaaaaagaggagcgcagctttgaagaggcaatcccagccagaaagctgaagaacttttaccctggcgttgccgagcacaaggacatcagtaaactggtcctattgctctccagctctgttaattcgcttaggaaagctgcccacgaagctttgcaagatttccaaaaatataaaacattatggactgaggatagagacgtgaaagtgaaggaattcttagctaataacccttccttgactgaaattagaagtgagatccttcactacgccacattcgaacaggagatagatgaactgaagcctattatcgttgttggcgcactggaacttcacacagaacccatgaaactagccttgtcaattgaggctaaggcgtggaagatgctgttgtgccgctatctgaatgaggagtataaaaagaaaatgtcatacatgatcgcatttattaatgaatacctgaagaaactttcacggcccattcgggatctcgatgacgtgagattcgccatggaggctctctcctgtattagggacaatgagatacagatggatatgacactcggacccatcgaggaggcctatgccattctgaacagatttgaggtggaagttaccaaggaagagagcgaagcggttgataccttgcggtattcctttaataaacttcaatccaaggctgtgagcgtgcaagaagatttggtccaggtacagcccaaattcaaatcaaatcttctggaatcggtggaagtattcagagaagatgtgatcaattttgcagaagcttatgagctggaaggtccgatggttcccaacatccccccgcaggaggctagcaaccgactgcagatatttcaggccagtttcgatgatttgtggagaaagtttgtgacctattcgagcggtgaacagttgttcgggctcccagtcactgactacgaagtgctgcacaagacacgtaaagagctgaatttattacagaaactgtacggactgtacgacacagttatgagttctatttccgggtactatgagatcttatggggggacgtcgatattgagaaaattaatgccgagttacttgagttccaaaaccgttgccgcaagctgcccaagggcctgaaggattggcaagcctttctggacctcaaaaagcgaatcgacgatttttctgagtcctgtcctctattggaaatgatgaccaataaggcaatgaaacagcggcactgggaccgcatcagcgaacttacggggaccccctttgacgttgagtccgactcattctgcctgcgaaacatcatggaggctcctctgttgaagcacaaagacgatatcgaggatatctgtatttccgccataaaggagaaggacatcgaggctaaactcacccaggttatagagaattggaccaaccagaatctgtccttcgcggcctttaaggggaaaggggaacttctgctaaaaggtacagaatcaggcgagattattaccctgatggaggatagcttgatggtactgggctcactgctgtcaaaccgatataacgcgcccttcaagaagaacattcagaactgggtgtataagctttccacaagctctgacatcatcgaagagtggcttgtagtccagaacttatgggtgtatttggaggccgtgttcgtggggggggacattgccaagcagcttccccaggaggccaaacgcttccaaaatatcgacaagtcatggattaagatcatgcaacgcgcacatgagaacccgaacgtgatcaattgctgtgtgggagacgagaccatgggccagctccttcctcacctccatgaacagctggaagtttgtcagaagagcctaaccggttacctggagaagaagaggctgctgttcccccgattcttttttgtctctgacccggtcctgctcgaaattcttggccaggcatccgactcccataccattcagccacacctgccagcagtgtccgataatattaacgaggttacatttcacgctaaggattacgatagaatcatggccgtcatcagccgcgagggggagaaaattgtgttagacaattctgttatggccaagggcccagtggagatctggctgttggacctgctgaagatgcaaatgtcgtcactgcacaacataatacggtctgcattctaccagatctctgacagcggctttcaactgctgccattccttagccacttccctgcccaggtggggctattgggaatacaaatgctgtggacacacgatagtgaagaagcactccgcaatgctaaagacgacaggaagattatgcaggtaaccaatcaaaagtttttggacatcctgaatacacttatttcacagacgacccatgatttgagcaagtttgatcgagttaagttcgaaacccttatcacaattcatgtccaccaaagagacatcttcgacgacctggtgaagatgcacattaagtctcctaccgacttcgagtggctaaaacaaagcagattttatttcaaggaagacctcgatcagaccgtggtgagcattacagatgtcgacttcatataccagaacgagtttctggggtgcacggataggctagtgatcacccccctaacagatcgctgttatattactctcgcccaggctctgggaatgaacatgggcggggcaccagcagggccagcagggacaggaaaaactgaaactacgaaagacatgggtagatgtctgggtaagtacgtagtcgtatttaactgtagcgaccaaatggatttccgaggtttaggcagaatcttcaaaggcctggctcaatctggcagctggggctgctttgatgagtttaatcgaatcgaattgcctgttctttccgtggcagcccaacagatttacattgttcttactgctcgcaaggaacgcaaaaaacaatttatcttcagcgatggcgactgcgtggatttgaacccagagttcggcatattcctgacgatgaatcctggctacgctggccgtcaggaattgccggaaaacctcaagatccagttcaggactgtggctatgatggtgcctgacaggcagattatcatgagggttaagcttgcctcttgcggttttttggaaaatgttatactagctcaaaaattctatgtgctgtacaagctgtgtgaggagcagctcacgaagcaagtacactacgactttggcctgagaaacatcctgtcagttcttcgcacgctgggcagccagaaacgagccaggccagaggactctgaactgtccattgtgatgcgagggctacgggatatgaatttgtctaagttggtggacgaggacgaaccactgtttcttagcctgattaacgatctattccccggactgcaactggatagcaacacctacgcagaattacagaatgccgtggcgcaccaggtgcagattgagggcctgattaaccacccaccatggaatctgaaactcgtccagctgtatgagacaagcctggtccgtcacggacttatgacccttggtccttctggatctggcaaaaccactgtgatcactattctaatgaaagcgcaaaccgagtgtgggcgtccgcacagggagatgcggatgaatcctaaggccataaccgcccctcaaatgtttgggagacttgacaccgctaccaacgactggactgacgggatcttttctactctatggcggaagactcttaaggccaaaaaaggtgagaacatttttctgattttagacggacccgtcgacgccatctggatcgaaaatctgaacagtgtactcgatgataataagactttgactctcgcaaacggcgatcgcatcccgatggccccgagctgtaagctcctgtttgaagtgcacaacatcgagaatgcaagccctgccactgtttctcggatggggatggtgtatatttccagttccgcactgtcatggcggcctatcctgcaggcgtggctgaaaaagaggactgcccaggaggccgcagtgttcctcactctatacgagaaggtgttcgaggacacatacacctatatgaaactgaacctgaatccaaaaatgcagctgttggagtgcaactacattgtgcaatctctgaacctgctagaagggctcataccatccaaagaagaaggaggagtatcttgtgtggagcacctgcataagctgtttgtattcggcctaatgtggagcctaggggcactgctggagctcgaatctagggagaaactggaagcattcctcaggcagcatgagagtaaactcgatctgcctgagattcccaagggctcgaaccagactatgtatgaattctatgtcactgattacggcgactgggagcattggaacaaaaagctccagccctattattacccaaccgacagtatccccgagtattccagcatcctcgtccccaatgtggacaatatacgcacaaatttcctgatcgacactatcgcaaaacagcataaggctgtccttttgacaggcgaacaggggaccgccaaaactgtgatggtgaaagcgtatcttaagaaatatgacccagaagttcaactatctaaaagtctgaatttctctagtgcgactgagcctatgatgttccaaagaacaattgagtcatatgtggataagagaatcggttctacctatggaccacctggcggccgtaagatgaccgtgttcattgacgacataaatatgccggttataaatgaatggggtgatcagatcacaaatgagatcgtaagacagatgatggagatggagggtatgtatagcttggataaaccgggggatttcacaaccatcgtggatgtccagctgatagctgccatgattcatcctggtgggggcagaaatgatatccctcaacggctgaaacgccagtttacagtgttcaactgcaccctcccctctaacgcctccattgacaagatctttggcatcatcggatgcgggtatttcgatccctgtcggtctttcaagccgcagatctgcgaaatgatagtgaaccttgtgtccgtgggaagagtcttgtggcagtggacaaaagtgaagatgttacccactccctctaagttccattatattttcaatttgcgggatttgagccggatctggcaaggaatgctgacaataaaggctgaagaatgcgcttctatccctacactgctttccttgtttaagcacgagtgctccagagtgattgctgatcgctttattaccccagaggatgaacagtggttcaatgcacatctgacacgggctgtggaggagaatatcggtagcgacgccgcctcctgcatcctccccgaaccatacttcgtggactttcttagagagatgccagaaccaaccggagacgaacccgaggactctgttttcgaggtgcctaaaatttatgaactgatgccatcttttgactttctggccgagaagctccagttctatcagaggcagtttaacgaaattattcgagggacgtcactggacctcgtgttttttaaggatgctatgactcatctcattaagatttcgcgcattatcaggaccagctgcggcaatgcgctcctcgtgggagtgggaggctccggaaagcaatcgttgtcgcggttggcatcgttcattgctgggtatcagatctttcaaataactctcacccggtcttacaacgtaaccaacctcaccgacgaccttaaggccttgtacaaggttgcaggggccgatgggaaaggcatcacattcatatttactgacagtgaaataaaggatgaagcttttcttgaatatttgaataacttactcagtagtggggagattagcaatctgtttgcaagggacgaaatggatgagataacccaaggattgatctcagtcatgaagagggagttgcccagacacccccccacgttcgataatctgtatgagtatttcatctccaggtcccgcaagaatttacatgttgtgctgtgcttctcacctgtgggtgagaaattcagggctcgatcattaaaattcccgggcctgattagtggttgcaccatggattggttttcccggtggccacgggaagccctgatcgccgtggcttcatacttcctgagtgactacaatattgtatgtagcagtgagatcaaacggcaggtagtagagactatgggcctattccacgacatggtttctgagtcatgcgaatcttacttccagaggtacaggcgtcgcgcacatgtcacacctaaatcctatctgtcctttatcaatggttacaaaaatatttatgctgaaaaagtgaagtttatcaacgaacaggcagaacggatgaatattggacttgacaaactgatggaggcaagcgagagtgtggcaaagctcagccaagatttggccgtgaaggaaaaggaactggcggtcgcctctatcaaggcggatgaagtgctggcggaggtaaccgtatccgcacaggcttccgctaagatcaagaatgaggtgcaggaggtgaaggataaggctcagaagatcgtggacgaaatcgattcagaaaaggtaaaagccgaatcgaagctcgaggcggcaaagcccgctttggaggaggctgaagcggccttaaataccatcaaaccgaatgacatagctactgttagaaaattagccaagccaccacacttgataatgcgaattatggactgcgtgctgcttctgttccagaagaaaatcgaccccgtgaccatggatccagaaaaaagctgttgcaaacctagctggggtgagagtcttaaactcatgagtgccactgggtttctctggtccctgcagcagttcccaaaagatactatcaacgaggagactgtggaactcctacagccttactttaatatggacgattacacttttgagagtgcaaagaaggtttgtggcaatgttgcaggcctgcttagctggacactagccatggcgatattttatggtattaatcgtgaggttcttcctctgaaggcgaacctcgccaaacaggagggcagactggcagttgcgaacgctgaactggggaaagcccaagcactcctggacgagaagcaggcagaactggataaagtccaagctaagtttgacgccgccatgaacgaaaagatggacctgctaaatgatgcagacacctgtcgcaaaaagatgcaggcagcgagcaccctgatcgatggtctatctggagagaagattaggtggacgcagcaaagcaaggaattcaaggctcaaatcaaccgtttggtgggcgacattcttctctgcaccggattcctaagttacctgggcccatttaaccagatctttcgcaactatctgttgaaagatcagtgggagatggaattacgcgcccggaaaattcctttcaccgaaaatctcaacttaatcagtatgctggtggatcctcccaccatcggcgagtggggccttcagggactcccgggcgatgatctgtctattcaaaacggcatcattgtgaccaaggccacccgttacccgctcctgattgatccacagacacagggaaagacctggatcaagagcaaggaaaaggaaaacgatctgcaggtgacatctcttaaccataagtacttccgcacccacctggaggattccctctctctcggacgtcctcttctgatcgaggatattcacgaagaactcgaccccgccctcgacaatgtgctggagaagaattttataaagtctggcacaaccttcaaggtcaaggtaggtgacaaggagtgcgacattatggatacctttaaactctatattactactaaactccctaatcctgcttttacgcctgagattaacgcaaagacttcagtgattgattttaccgtcaccatgaagggacttgaaaaccagcttctgcggcgggtaatcctcacagagaagcaggagctggaggccgaacgggtcaaactcctggaagacgttacgtttaataagagaaagatgaaagagctagaggataatctgctgtacaagctgagtgcgaccaagggctcactggtggacgatgagtctctgatcggagtgctgcggacaaccaagcaaactgcagccgaagtaagcgaaaaactgcacgttgcagccgagacagaaattaagattaatgccgcacaggaagaatttaggcctgccgcaactagaggtagtattctgtattttctcataactgaaatgtcaatggtgaatatcatgtaccaaactagcctggcccagttcctgaagctctttgaccagagcatggcccgctcagaaaaatctcctctgcctcagaaacggatcactaacattattgagtacttgacatacgaagtgttcacttatagcgtgcgcggcctgtatgagaaccacaagttcctgtttgtcctgctaatgactctgaagatcgacctacagcgtgggaccgtgaaacaccgggagttccaggctctgattaaggggggggccgcactcgatttaaaggcttgccctccgaagccgtatcgatggatccttgacatgacttggctgaacctcgtcgagttgtcaaagcttccacagtttgctgagattatgaaccagatatcacgcaacgaaaagggctggaaatcctggttcgataaggacgcccccgaggaggagatcatacctgatggctacaatgactccttagatacttgccacaagctccttctgattaggagctggtgccccgaccgaacagtgtttcaggcacggaagtatatagccgactctctggaggagaaatataccgagccagtgatacttaatttagagaaaacctgggaggagtccgatacgcgcaccccccttatttgtttcctgtccatgggtagcgatcccacaaatcaaattgacgcgctggcaaaaaaactcaagcttgagtgccgcactatatccatggggcagggccaagaagtgcatgcgcggaaactcatccagatgtccatgcagcagggagggtgggtgctactgcagaactgtcatttagggctcgaatttatggaagagctgttggagacccttatcacgaccgaagctagcgatgattcattcagagtgtggattacgactgagccccacgaccggtttccaatcactctgttacaaacatcgctgaagttcaccaacgaaccccctcagggggtgagagcgggcctgaagcggacattcgctggaattaatcaagaccttttggacatttccaaccttcccatgtggaaacccatgttgtataccgtcgctttcctgcatagtacagttcaggaacgtcggaagtttggcccactaggctggaacataccttacgagttcaactcagccgatttttcggcgagcgtacagtttatccagaatcatcttgacgagtgcgacattaagaagggcgtgagctggaataccgtgcggtacatgattggcgaagtgcaatacggaggtcgggtgacagacgatttcgacaaaaggctgttgaattgcttcgcacgagtctggttctctgaaaagatgttcgagccttcattttgtttctacactggttataagataccactttgcaagactttggatcagtactttgaatacatccagagtctgccctcactcgataaccccgaggtatttggactgcatccaaacgctgatatcacgtatcagtctaacaccgcaagcgccgttctggagacaatcacaaacatacagccaaaagagtcaggcggcggagtgggcgaaactcgcgaagccatcgtttacaggctgtcagaggacatgctgtccaaactccccccggattacatcccacatgaagttaagagcagacttataaaaatgggccacctgaactcgatgaacatcttcctccgacaggagatagacagaatgcagcgggttatcagcatcctaaggagttccctcagcgaccttaagctcgctatagagggaacaatcatcatgtccgagaatcttagggacgccctagacaacatgtacgacgccagaattccgcagctctggaagcgagtgagttgggattcttctaccctcggattctggttcaccgagctactcgaacggaatgctcaattctccacctggatcttcgagggtaggcccaacgtcttctggatgacagggttttttaacccacagggcttcctgaccgcaatgcgtcaggaggtcacccgtgctcacaagggctgggctctggacactgtcaccattcataacgaagtactccgacagactaaagaggaaattacgagtccccccggtgagggagtttacatctacgggctctacatggacggagccgcctgggataggcgcaatggcaagctgatggaaagtacccctaaggtcttatttacgcagctgcctgttctgcacatatttgccattaatagtacagctcccaaggaccccaagctctatgtgtgtcccatttataaaaagccgaggagaacggacttgacatttatcacagtggtgtacctgaggaccgtgctgtcgcctgaccactggatactgcgaggcgtggcccttctctgcgatatcaagtag

SEQ ID NO: 186047 - DNA, 13365 bp, synthetic construct
  misc_feature 1..13365: note = Description of Artificial Sequence: Synthetic coding sequence
  source 1..13365: mol_type = other DNA
atgatgaagctgtacatcgacaacgccgcccccgacaagctgaagggactgtgtatcttcttcgtgagatgtcggaatgacgtcgctatcaacgtaaagactattcaggaggaggccctcttcacagtgctggacgctagtaaaggtctactaaatgggatcagagacatgctggccaacatttttcttcccgctgtgttggccaccaataactggggagctctgaaccagtccaaacagggcgagagtgaaaagcacattttcactgagaccattaaccgatacctgtcattcctggacggggcaagaatatccatcgaggggacggtgaagctgaagactattgataatgtgaatttcagtaagctgcatacatttgaggaggtaaccgccgccgcctcaaactccgagaccgtgcatcagctagaggaggtcctgatggtgtggtataagcagattgagcaggtgcttatcgagtcggagcagatgagaaaggaggctggtgactcgggaccgcttactgagctggagcactggaaacgaatgagcgccaagtttaactacatcatcgaacagatcaaaggaccttcttgtaaagccgtgatcaacgtactcaacgtggcccactctaagctcctcaaaaactggagagacctcgatgctaggataaccgataccgcgaatgagtcaaaagacaacgtccgttatctctataccttggaaaaggtgtgtcagcccctgtacaaccatgacctggtttctatggcacacggtattcagaacctgatcaatgctatcaggatgatccacggcgttagccggtactataacacctctgagcgcatgacatctctcttcatcaaggtaacaaatcagatggttactgcttgtaaagcgtatatcactgatggtggcctgaatcacgtgtgggaccaggagacaccagtagtacttaaaaagatccaggattgtatctttttattcaaagaatatcaggccagcttccacaaaactcggaaactcataagcgaatcatctggggagaagagtttcgaagtgagcgagatgtacatcttcggcaagttcgaagcattttgcaaacgcctcgagaagattacagagatgatcaccgtggtgcagacatacagtacactgtccaattcaaccattgaaggaattgacattatggccataaaattcagaaacatttatcagggggtaaaaaaaaaacagtatgatattctggatccccggaggaccgagtttgacaccgattttcttgactttatgaccaagataaacggtttggaggtgcagatccaggccttcatgaactccagctttggaaagatcttatcttctcaacaggccctgcagctgctgcaacgttttcagaagctgaacattccatgtcttggcctggaaataaaccacaccatcgagcggatcctccagtattatgtcgccgaactggatgcaaccaaaaaactgtaccatagccagaaggacgacccacctctggcccgtaatatgcccccaattgctggcaagatcctctgggttagacagctctaccggagaatctctgagccaatcaactatttctttaagaatagcgacatcctgagcagtccggacggtaaagccgtcatcagacagtacaacaagatcagttatgtcttagtggaattcgaagtcgtctaccatacagcttggatccgtgaaatcagccagctgcattacgccctccaggcaaccttatttgtgcgtcatcccgagaccggcaaactactggtgaactttgaccccaagatcctggaagtggtaagagaaacaaagtgtatgattaagatgaagctggacgtcccagagcaggccaaaaggctgctgaaattggaatcgaaattgaaggcagataaattgtatcttcagggcctcctgcaatattatgacgagctgtgtcaggaggtccccagcgtttttgtgaatctgatgacccccaaaatgaagaaggtcgagtccgttttgcggcagggtctcacagtgttgacatggagctccctgaccttggagtccttcttccaggaagtagaattggtcctggacatgttcaaccagttgcttaagaagatcagtgacttgtgcgagatgcacattgacaccgtcttaaaggaaatcgccaaaaccgtcttaatctcattaccagagagcggggcgaccaaagtagaggatatgctgactctcaacgagacctacaccaaggaatgggccgatatccttaaccacaaaagtaagcacgtcgaggaggccgtgcgagagcttatttcaatattcgagcagatttatgaggtgaagtacactgggaaggtgggcaagcaatccgaacaacgaaagcacgtagtctttgggagcgaaaccggcgaaggcgaaaacaatgactacgaagctaatattgtgaacgaatttgatacgcatgacaaggaggatgaatttaaaaaggagtgtaaggaggtgttcgcgtttttcagccatcagctgctagactctctgcaaaaagctacccgattgtccctggacaccatgaagcggcgcatctttgtagcatcactctatggcagaaaacagagtgaggacatcatctcctttatcaaaagcgaagtgcacctagctattccaaacgtcgtgatgatcccctcactcgatgatatccaacaggcaataaatcgtatgatacagctgaccctggaagtatcacgaggggtggctcactgggggcagcagcagatccgtcctattaagagcgtgattccctcccctaccacaaccgacgtgacccaccaaaacaccggaaagctgttgaagaaggaagagaggagtttcgaagaagctattcctgcgcggaaactgaaaaacttctacccgggagtcgctgaacacaaggatattagcaaactcgtgctgctcctgagctcaagcgttaactctctgcggaaggccgcacatgaggcgctacaggatttccagaaatacaagactttgtggaccgaggatcgtgacgtgaaagtcaaagagttcctggctaataacccgagcttaacagagattcggtccgagatcctgcactacgcaaccttcgaacaagaaatagacgagctgaaacccatcatcgtggtgggcgctctcgaactccacacagaacccatgaaactggcgctgagcatcgaggccaaggcctggaagatgctactgtgccggtatcttaacgaagagtataagaaaaagatgagctatatgatagcatttattaacgaatacctgaagaagctctctaggccgatcagagacctggatgatgttcgctttgcaatggaggcgctgtcttgcattagagacaacgagatacaaatggatatgactctgggcccaattgaggaggcgtacgcgatcctgaatcgttttgaggtggaggtcactaaagaggagtccgaagcagtggacaccctgcggtattcttttaataagctgcagtctaaggcagtgtccgtccaggaggaccttgtgcaggtacagcccaaatttaaatcaaatttgctggaatccgtggaagtgtttagggaggatgtcattaactttgccgaggcctatgaattggaaggcccaatggttcctaatattcctcctcaggaagctagtaaccggctgcagatattccaggccagcttcgatgatttgtggagaaagtttgtgacatacagcagtggggaacagctttttgggctacccgtgaccgattatgaggtgctccacaaaacccggaaggaactgaatctgctgcaaaaactctacggactctacgatactgtaatgtcctcaatctccggatattacgaaatcctgtggggcgacgtggatatagaaaaaatcaatgccgagctcctagaattccagaatcggtgcagaaagttgccaaaaggacttaaggactggcaggcctttttggacttgaagaagcggattgacgacttctctgaatcttgcccgctgttggagatgatgacaaacaaggccatgaagcagagacattgggatcgcatttctgagctcaccggcaccccattcgacgtagagtctgatagtttctgcctgagaaacataatggaggctccactgctcaaacacaaggacgacatcgaggacatatgcatctcagccattaaggagaaagacattgaggcaaaacttacacaggtgatcgaaaattggacaaatcaaaacctgtcctttgcagcttttaaggggaaaggcgaacttctgctgaaaggcaccgagtctggggagatcatcactctaatggaagacagcctgatggtgctcgggtccttattatcaaacaggtataatgcaccctttaaaaaaaacatccagaattgggtctataagctctccacatcatcagacattatcgaggagtggctggtggtgcagaacctctgggtgtacctcgaagcagtcttcgttggaggggatatcgccaagcagctcccacaggaagccaaacggtttcagaacatagataaatcctggattaagataatgcaaagagcccacgagaaccctaacgtcattaattgttgtgtcggagatgaaacgatgggtcagctcttgcctcacctccacgaacagctggaggtttgtcagaagtcactcactggatacctggagaagaagaggctgttgttcccacgattcttctttgtgtctgacccggtgttgctcgaaatactcggtcaggccagcgactcccatacaatacagccccatcttcccgctgtgagcgataatatcaacgaagtgacatttcatgctaaagactatgaccggatcatggcagtcatctctcgcgaaggggagaagattgttctggacaactccgtgatggcaaaagggcccgttgagatctggctgcttgacctattaaagatgcaaatgtctagccttcacaatattattaggagcgctttctatcaaatctcagattcgggctttcagctcctgcctttcctctctcacttccccgcccaggtcggtctgctagggatacagatgctttggacacatgattcagaggaggccctacgcaatgcgaaagatgaccgtaagattatgcaggtgaccaatcagaagttcttggacatcctgaataccctgatttcccagacaactcacgacctttctaaattcgatcgggtaaaattcgaaaccctcattaccatccatgtccatcagagggatatctttgatgacttggtgaaaatgcacataaagtctcctactgatttcgaatggctaaagcagagtcgcttctacttcaaggaagatctcgatcaaaccgtggtttctatcactgatgtcgattttatttaccagaatgaatttctcggatgcaccgatcggttggttattacccctctcacagataggtgctacatcacactggcacaggctctcggaatgaacatggggggtgcgccagctggcccagccggtacagggaaaacagaaacaacaaaagacatggggaggtgcctgggaaagtatgtggtggttttcaattgcagtgatcaaatggattttcggggcctgggacggatctttaagggccttgcccagagtgggagttggggatgtttcgatgaatttaataggatcgagcttcccgtgctgtcagtagcagcccagcagatctatattgtcctgacagctagaaaggagcgcaagaagcagttcatcttctcggatggcgactgtgtcgatctgaatccagagttcggcattttcctgacaatgaatccagggtacgcggggaggcaggaattaccagaaaacctgaagattcagtttcgaaccgtcgccatgatggtccccgataggcaggttcactacgacttcggcctgcgcaacatcctgtccgtgctccggacactcggcagtcagaagagggcccggccagaggatagcgagttgagtattgtgatgcgggggcttcgcgacatgaatctgtcaaaactagtggatgaggacgagccactttttctgtctctcattaatgatcttttccctggactgcagctggattccaacacctacgcggaattgcagaacgctgttgcccatcaggtgcagatcgaaggcttgataaaccacccaccttggaacctgaagctcgtgcagctctatgaaacctcactggtaaggcatgggctcatgaccctcgggcccagcggctcagggaaaactacagtcatcaccatcctcatgaaggcacagactgagtgcggtagaccacatagggaaatgaggatgaatccgaaggcgatcaccgcaccccaaatgtttgggaggttggacaccgcaaccaatgactggacagacggcatcttctcaacactgtggcgaaagacacttaaagccaaaaaaggggagaatatttttctgatcttggacggcccagtggacgccatttggattgagaatctgaactcagtgttagacgacaataaaactctgacgcttgcgaatggagatcgcatacccatggcaccatcctgcaaacttttatttgaggtgcacaacattgaaaacgcttccccagccacagtgagcagaatgggcatggtgtacatctcttccagcgcactgtcttggagacccatccttcaagcttggctcaagaagaggacagcgcaggaagccgccgtgttcctcaccctttacgaaaaggtgtttgaagacacctacacgtacatgaaactgaatctgaatcccaaaatgcaactgcttgagtgtaattatatcgtacagtctctgaacctgctcgaaggactgattccgtctaaggaggaagggggagtgagctgcgttgagcatctgcataaacttttcgtgtttggcctcatgtggagtctgggtgcactgttggagttagagtccagagagaagctggaagcttttcttaggcagcatgaaagcaaactcgacctacccgagatccctaagggtagcaaccagaccatgtacgagttctacgtaaccgattacggggactgggaacactggaacaaaaaactgcagccctattattatcctaccgactcaattcctgaatatagcagcatactggtccccaacgtggacaatatccgtaccaacttcctcatagatactattgcgaaacagcataaagctgttctactgactggtgagcaggggacagccaagaccgtgatggtgaaagcttaccttaaaaagtatgaccccgaggtgcaactatccaagtccttgaactttagtagtgccaccgaaccaatgatgtttcagcggacaatcgagagttacgtcgacaagcgcataggctcgacatacgggccaccggggggccggaaaatgaccgtgtttattgacgacatcaatatgcccgtcattaatgaatggggagaccagattaccaatgaaattgttcgacagatgatggagatggagggcatgtacagcctggataaaccaggggatttcaccactattgtggacgttcagctcattgctgctatgattcacccaggtggtggtcggaatgatattccacagcggttgaagcggcagtttacggtttttaactgtactctccccagcaatgcctctattgacaaaattttcggaatcataggctgtggttatttcgacccgtgccgctcttttaagccccagatctgcgaaatgatcgttaacctcgtgagcgtaggaagagtgctgtggcaatggaccaaggtgaaaatgctgcccaccccctctaaattccattatatatttaatcttagagatttgtcccggatctggcagggcatgctcaccataaaggccgaagagtgcgccagtattcctactctgctgtccctcttcaaacatgagtgctcccgggtcatagctgaccggttcatcacacccgaagatgaacagtggtttaacgctcacttaacgagggcagtcgaggagaacatcggttccgacgccgcttcctgtatcttaccagaaccatatttcgtggacttcctacgcgaaatgcccgagcctactggcgacgaacccgaagatagcgtgtttgaagtccctaagatttatgaactcatgcctagttttgacttcctggctgagaaattgcagttctaccagaggcagttcaatgagattatccgcgggacaagtttggacctggtgtttttcaaggatgccatgactcacttaatcaagatatcccgaatcatcagaaccagttgcggaaatgccctattagttggcgttgggggctctggcaagcagagcctcagtagactcgcaagcttcattgctggttaccagatttttcagataaccttaacacgctcttataacgtgactaacctcaccgacgatcttaaggccctgtataaggttgctggagcggacggcaaaggcataacctttatatttactgactccgagatcaaggatgaggccttcctggagtatttgaataatcttcttagttcaggggagattagcaatttattcgcaagagacgagatggacgagatcacgcaaggcctgattagcgtgatgaagcgggagctgcctcgtcatcccccgacctttgataatttatatgaatatttcatctcccgttctaggaaaaatttacacgttgttctgtgcttttccccagtgggtgaaaagtttagggcgcgctcactgaagttccccggcttgatatctggttgcactatggactggttttctcggtggccaagagaggccctgatcgctgtggccagttacttcttgagcgactacaatatcgtgtgcagctcagaaattaagcgacaggtcgtcgaaacaatggggttgtttcatgacatggtttcggagtcttgtgagagctactttcagaggtatcggcgtagagcacacgtgacaccgaaatcatatttatctttcattaacggatataagaacatctatgccgaaaaagtaaaatttatcaacgagcaggctgagcgaatgaatattggcctcgacaagctgatggaggccagcgaatcagtcgcgaaactctctcaggacctcgctgttaaggagaaagagctcgccgttgcttctattaaagcggatgaggttcttgcagaggttacggtcagtgcacaggccagcgctaagatcaaaaacgaagtgcaagaggtgaaggacaaggcccagaaaatcgtggacgaaatcgactcagagaaggtgaaggcagagtcaaagctggaggcagctaagccggcactggaagaagcagaggctgccctcaacacaatcaagccgaatgacattgccaccgtgaggaaactggccaaaccaccacatctgatcatgaggatcatggactgtgtgctgcttctgtttcagaaaaaaatcgatcctgtgactatggaccccgaaaaatcttgttgcaagccttcgtggggtgagagcctgaagctaatgtcggccaccggattcctatggtctttacagcagttccctaaagacacaatcaatgaagaaactgtggaattgctccagccgtacttcaacatggacgattatactttcgagagcgccaagaaggtgtgcggcaacgtggctgggctcctcagttggactctggctatggctatattctatggaattaatagggaggtactacctctgaaggccaatttggctaaacaagaggggcgtctggcagtggccaatgctgaactggggaaggcccaagccctgctcgacgaaaagcaagccgagttggacaaggtccaggccaaattcgatgcggccatgaatgaaaagatggatcttctcaatgacgctgatacatgcaggaagaaaatgcaggctgccagcaccctaattgacggtctgtccggagagaaaattagatggacccagcagtcaaaagagttcaaagcccagataaatcgcttagtgggcgacatacttttgtgtaccgggttcctgtcttaccttggcccattcaatcagattttcaggaattacctgctgaaggatcagtgggaaatggagctcagagcacgcaagattccattcaccgagaatctcaatttaatttccatgctcgttgacccgcccaccataggagagtgggggctccaaggtctccccggagacgatctttcaatccagaacggaataatcgtgactaaagcaacacgctaccccctgttgatcgatccccaaacacaagggaaaacctggatcaaatcaaaggagaaggagaacgatctacaggtgacatcattgaatcacaagtactttagaacccatctggaggattccctcagcctggggcgccccttgctaattgaagatattcatgaggagctggatcccgcgttggacaacgtgctggagaagaacttcataaaatcgggcaccacatttaaggtgaaagtgggggacaaggaatgcgatatcatggacacattcaaactatacattaccacaaagctgcctaaccccgcattcacccccgagattaatgccaaaacaagtgtgattgatttcaccgttaccatgaagggtctcgaaaatcaactcctaagaagggttattctgacggaaaaacaggagttagaggccgagcgggtgaagctgctggaagacgttacttttaacaagagaaaaatgaaggaattggaggataatcttctgtacaaattaagcgccactaaggggagcttggtggatgatgagtctctgattggggtcttgcgcactacaaagcagacggccgctgaagtgtcagagaaattgcatgtggccgctgagaccgagatcaagattaatgccgcccaggaagagtttcgacccgccgcaacacgtggctctatcctgtattttctgattactgaaatgtccatggttaacattatgtaccagaccagtctcgctcagttcttgaaattatttgaccagagtatggcacgttccgaaaaatctcctctcccccaaaagcggatcaccaatatcattgagtatctgacgtacgaggttttcacttactccgtccgaggtctgtacgagaaccacaagtttctgttcgtcctgctgatgactctgaaaatcgacctgcaacgcggaacggtgaaacaccgtgagtttcaggccctgatcaaagggggcgccgctcttgacctgaaggcctgtccacctaaaccctatcgttggatactagatatgacgtggttaaatctggtagagctgtctaaattgccgcagtttgctgagatcatgaaccaaattagccgtaatgagaagggctggaagtcatggttcgataaggatgcccccgaggaggagatcatccctgatgggtataacgattctctggacacatgtcacaagcttctccttattaggagctggtgcccagaccgcacagtattccaagcacgaaaatatatcgccgactctctggaggagaagtacacagagcccgtcatcttgaacctcgagaagacctgggaagagagcgataccaggaccccactgatttgtttcttgtccatgggctccgaccccacaaatcagattgatgctttggctaagaagctgaagttagagtgtcgaaccatttccatggggcaagggcaggaagtccacgctcggaagctcatccagatgagcatgcagcagggcggctgggtgctcctccaaaactgtcacctcggcctggaatttatggaggagcttctagaaacactcataacgactgaggcttctgacgattcatttagggtttggatcacaactgaacctcatgataggttccccatcacacttttgcagacttcactgaaattcactaatgaaccaccacaaggcgtgcgcgctggcctgaaacggaccttcgccgggataaatcaggacttactcgacatttccaatctgccgatgtggaaacccatgctttatactgttgctttcctgcacagcacagtgcaggagcggcgtaaattcgggccattaggctggaatattccctatgaatttaactccgccgattttagtgcatcagtgcagtttatccagaaccacttggacgaatgtgatataaagaaaggggtgtcatggaatacggtgaggtatatgatcggcgaggtgcagtatggaggtagagtgaccgatgacttcgacaaacgcctcctgaattgcttcgcccgtgtgtggttctctgaaaagatgtttgaacccagtttttgtttttacacaggctacaagatacccttgtgcaagacgttggatcaatactttgaatatattcagtcactgccatccctagacaaccctgaggtgtttgggctccatccgaatgcagacattacctaccaatctaatacagccagcgccgtcctcgagactattaccaacatacaacccaaagagtccggcggcggcgtgggggaaaccagagaggctatcgtctaccgtctttcagaggacatgcttagcaagctgcctcccgactacatcccgcacgaagttaagtctaggttaattaaaatgggccatctgaactccatgaacatattccttcgacaggagatcgataggatgcagcgggtgattagtattcttaggtcctcccttagcgacctgaagttagccattgagggcacaataatcatgagtgaaaacctgagagacgctctagataatatgtacgatgcaagaattccccagttgtggaagcgggtaagttgggattcatcgacccttgggttttggtttactgagctccttgagcggaatgcccagttctctacttggattttcgaggggcgaccaaatgttttctggatgacgggtttctttaacccccagggcttcctgactgccatgcgtcaggaagttacacgcgcccacaaggggtgggccctggatacggtaacaatccataacgaagtattaaggcaaaccaaggaggagatcacttcccccccaggggaaggtgtctacatctacggcctttatatggatggggctgcctgggatagacggaacggaaagctcatggagtctacacccaaggtcctgtttactcagcttcccgtgctgcacatttttgccataaattctactgcgccgaaagatcccaagctgtatgtatgtcccatctataaaaaacccagacgaaccgacctcacattcattaccgtggtgtatctgagaacggtgctgtcacctgaccactggatcctgcgcggagtcgcgctcttgtgcgacatcaaatag

SEQ ID NO: 186048 - DNA, 12567 bp, synthetic construct
  misc_feature 1..12567: note = Description of Artificial Sequence: Synthetic coding sequence
  source 1..12567: mol_type = other DNA
atggagaaggacgccgaggacggcgcccccagcgagggcgccgaggctcccccctctacggaggaagctgcccccccacgcagcgaagaggaagaggcaccaaggccccccacagtggaggccccggccgaggacggattctcaccgagtgccgaggacgcagtatctagtgtggtcgactatcgtgatctgattccttcagaggaaggcatcgtgctgcccgacgatcacgaagcagatttgaaccgggtcaggcagcgcttagctcctaggcccgtacaatccgtaatctctgaggtgctgtcactaccgtcaagcagaagatcatcccggtacagacgctcgatgtccggattacccaatctccaggagaccctgaaggagagacaggctcggtttcgggaggccagggagtcacgacgcctcaagatcgacccaagttacaaatatatcttcgagatccttgcagagaaccttggactggacattgttactgtggaggagctcatcctggattgcccgagtctagaggctttcacgaattttttcgcaaaagacgggtgcaagactctgaagtttctctatcaagagggcgacgtgcccggcattgaatgtggtcggacaatcgctggtgctacgaaaggcgcaaagatgatgaaactgtacattgacaacgcagcccctgacaaactgaagggcctttgcatatttttcgtgcggtgtagaaatgacgtggccatcaatgttaaaaccatacaggaggaagccttattcacagtgttagatgcatcaaaaggcctgcttaatgggattcgggatatgttggctaatatttttctgcccgctgtcctcgccaccaacaattggggagccctcaatcaaagcaaacagggagagtctgaaaagcacatatttactgaaaccattaaccgctatcttagttttcttgacggggcgcggatctcaatcgagggaactgtgaagctcaaaactatcgacaatgtcaattttagtaaattacacacgttcgaggaggtgactgccgccgcctcaaactctgagaccgtccatcaactggaggaggttctgatggtgtggtataaacagattgaacaggtgttgattgaaagcgaacagatgaggaaagaagctggcgactccggcccacttacagagctggaacattggaagaggatgagtgctaaattcaattacattatcgagcaaatcaaagggccatcctgcaaagccgtaattaatgtccttaatgtggcacatagcaagctcctcaagaattggcgcgaccttgatgcccgaataaccgacacagcaaacgagtcgaaagacaatgttcggtacctgtacacgctggagaaggtgtgtcagccactgtacaaccatgatttggtaagcatggctcatggcattcagaacctcataaatgccatcaggatgattcacggggtttctagatactataacacttccgagcgaatgacatctctgtttattaaggtcactaatcaaatggttacagcatgtaaggcttacatcacagatggaggactgaatcacgtgtgggaccaggagacgccggtggtcttaaaaaaaattcaggactgcatcttcttgttcaaggagtatcaggcctcctttcataagacccggaagttgattagcgaatcgagcggggagaagtccttcgaagtgtcagagatgtatatcttcggaaaatttgaagctttctgtaagaggttggaaaaaattacagaaatgattacagtggtgcagacatattccactctctccaacagcacgatcgaggggatagacattatggccataaaatttcggaatatttatcagggcgtgaagaagaaacaatacgacattcttgacccccgcagaacagagttcgatacagattttctggacttcatgacaaagattaacggactggaagttcagatccaggctttcatgaatagttccttcgggaagatcttatcttctcagcaggccctgcagttgttgcagagattccagaagctgaatattccttgtctgggtctggagattaaccataccattgagagaatcctccagtattacgtggcggaactcgatgccactaaaaaactgtaccattcacaaaaagacgaccctccgttggcccgcaacatgccgcctatagctggcaaaatcctatgggtccgtcagctttacagaaggatttcagagcccataaactactttttcaaaaattctgatattctttcgtccccagacgggaaggcggtcattagacaatataacaaaattagctacgttctcgtggaattcgaagtagtctaccacactgcctggatccgtgaaatatctcagctccactacgcgttgcaggctaccctctttgtgagacatccagagaccggaaaactgctcgtgaattttgatccaaaaattctcgaggtggtgagagaaacaaaatgcatgatcaaaatgaagctggacgtgcccgagcaagccaaaagattgttgaaattggagtcaaaactgaaagctgataaactttatctccaaggactgctacagtattacgatgagttgtgtcaggaagtcccaagtgtctttgtgaatttaatgaccccgaagatgaagaaggtagaatccgttctccgccagggcctgaccgtgttgacctggagctctttgacgctggagtccttctttcaggaggtcgaactggtgcttgatatgttcaaccaactcctgaagaaaattagtgatctgtgtgagatgcacatcgacactgtgctgaaggaaattgccaagaccgttctgatctctctgccagaaagcggagcaactaaggttgaggacatgctcaccttgaatgagacatacactaaagagtgggccgacatcctcaaccataagtccaagcacgtggaggaggccgttcgggagctgatctcaattttcgagcagatctatgaggtcaagtacaccggcaaggttggcaagcagagtgaacagaggaaacatgtcgttttcggttccgaaacgggcgaaggcgaaaacaatgactacgaggcaaacattgttaatgaattcgacacacacgacaaggaagacgaatttaagaaagagtgtaaggaggttttcgcattctttagccatcagctgctggatagtcttcagaaagctactagactgagcctcgacaccatgaagcgtaggatcttcgtggcttctctatacggccgaaagcaaagcgaggacataatttcatttattaaatccgaggttcacctcgctatacctaacgttgtgatgattccaagtctcgatgatattcaacaggctatcaaccggatgatccagctgaccttggaggtctcccgaggcgtggcccattggggccaacaacaaattaggccgataaagagcgtaattcccagccctaccacaacagatgtcacccaccagaacactggaaagctcctcaagaaagaagagcgaagttttgaggaggctattccagctcgcaagctaaagaatttttaccccggcgtggctgagcacaaagacatttcgaaacttgtgttgctgcttagcagcagcgttaacagcctgcgcaaggccgcccatgaggcgctgcaagactttcagaagtacaagactctgtggaccgaggaccgggacgtgaaagtgaaagagtttttggcaaataatccatcactgacagagataagatcagagatcctccattacgcgactttcgaacaggagattgacgagctgaagccaatcatcgttgtaggagccctggagctccacacggagcccatgaagctcgcactaagcatcgaagccaaggcgtggaaaatgctgctgtgcaggtatctgaacgaagagtacaagaaaaagatgagttacatgatcgccttcattaacgagtatttgaaaaagctgagccgccctatcagggacctggacgacgtgcgcttcgccatggaggccctgtcttgcattagggacaatgagatccagatggacatgacccttgggcccatcgaggaagcctatgccatactgaataggttcgaggttgaagtcacaaaggaagaatccgaagcagtggataccctgaggtatagctttaataagctgcagagcaaggctgtgtccgtccaggaggatctcgttcaggtacagcccaaattcaagagcaatctgttagaatctgttgaggtcttcagggaggatgtcattaacttcgccgaggcatatgaattagagggtccaatggtccccaacatcccgccgcaagaagcctccaatagattgcaaatcttccaagcttctttcgacgacctgtggagaaagttcgtcacatactctagcggggaacagctattcggtctacccgttaccgattacgaagtgctgcacaaaacaagaaaggagcttaacttattacagaagctgtacgggttatacgacacagtgatgagctccatctctggttactatgagatcttgtggggcgacgtcgatattgaaaaaatcaatgctgaactgctggagttccagaatcggtgtcgcaagctgccaaagggtttgaaggactggcaggctttccttgacctgaagaaaagaatagacgatttttccgagagttgccctttattggagatgatgaccaacaaggcaatgaagcagcgccactgggaccgcatatcagagctcaccggcacaccttttgacgtcgagtcggactccttctgtttgcgcaatattatggaggcccccctgttgaaacacaaggacgatattgaggatatttgtatcagtgctataaaggaaaaggacatcgaagcgaagctcacccaagtgatagaaaactggacgaatcagaatctgagctttgcagcatttaagggcaaaggagaactgctgttgaaaggaacagagagtggcgagatcatcacactgatggaggattctctcatggttctgggaagtctattgagcaaccggtataatgccccatttaagaagaatatccaaaattgggtctacaagctcagcactagcagcgacatcattgaggagtggctggttgttcagaacctttgggtatacctcgaagcggtctttgtgggaggggatatagccaaacagctgcctcaggaggccaagagattccagaatatcgataagagctggattaagatcatgcaacgggcccacgagaaccctaacgtgatcaactgctgtgtgggcgacgagaccatggggcagctgctcccccacctccacgagcagctcgaagtctgccagaagtctttgactgggtacctggagaagaaacggctattgttcccccggtttttttttgtgagtgatcctgtgcttttagaaatcttaggtcaggcaagcgatagccatacaatacaaccccatctgcccgctgtatcagataacataaacgaggtgacctttcacgccaaggactacgaccgaattatggccgtgatttccagggaaggcgagaagattgttctggataactccgtgatggccaaagggccagtggagatttggcttctggacctgctcaagatgcagatgagttccctccacaacatcatacgcagcgccttctaccagatcagcgacagcgggttccagctgttgccctttctctctcacttcccggctcaggtgggtctcctcggcatccagatgttgtggacacacgactcagaagaagccctgagaaacgctaaggacgatagaaagattatgcaggtgaccaaccagaaatttttggatattctcaacacgctgatttctcagacaacgcatgacctaagcaagttcgatcgggtcaagtttgagaccctgataacaatacacgtacatcagagagacattttcgatgatttagtcaaaatgcacattaagtctcccaccgactttgaatggctgaaacaatcccggttctattttaaggaggaccttgaccagactgttgtaagtatcaccgatgtagactttatttaccaaaacgagttcctgggctgtacagaccgactggtgatcacacccctgaccgatagatgctatatcacactggcccaggctctgggtatgaatatgggcggcgctccggcaggtccagctggcacaggcaaaactgagaccactaaagacatgggccggtgtctcgggaagtacgtcgtggttttcaactgttcagaccagatggattttcgtggtctggggcgaattttcaaggggctggcgcagtcaggctcatggggttgtttcgacgagtttaatagaattgaactccccgtgcttagcgtggccgcccaacagatctatatcgtgttgactgctcggaaagagcgcaagaagcagttcattttttccgacggagactgtgtggacctgaaccccgaatttgggattttccttacaatgaatcccgggtacgccggcaggcaggagctgccggagaacctgaagattcagtttcggacggtggcaatgatggtcccggaccgacagattatcatgagggtgaagttggcgtcttgcggattcctcgaaaacgtaatcctggctcagaaattctacgtgttgtacaaactgtgcgaggagcagttaacaaagcaggtgcattacgatttcggcctgcgcaacatcctttctgtgctacgcacactggggtcccagaaacgagccaggcccgaggactcagaactgagcattgtcatgaggggactgcgtgatatgaacctcagcaaactcgtggatgaggacgaacccctctttctgtctctcatcaatgacctctttcccgggctgcagctcgatagcaacacttatgccgagttacagaatgctgtcgctcatcaggtgcagattgaaggcctgatcaatcacccaccttggaacctgaaactggtgcagctctatgaaacctcactggtgagacatgggttgatgacactgggcccatcaggttcaggaaagaccactgttatcactattctcatgaaagcacagactgagtgtggacgacctcatcgcgaaatgcgaatgaatcccaaggcaattacagcacctcagatgttcggcagattagacacagcaaccaacgactggacagacgggattttttcaaccctgtggcggaagaccctgaaggctaagaagggggagaatatctttttgattcttgacggacctgttgatgccatctggatagagaaccttaactctgtgctggacgacaataagaccctgacactcgcaaatggcgacaggatccctatggcgcccagctgtaagcttctctttgaagtgcataacatcgagaacgcaagtccagccactgtgtccaggatgggaatggtttacatctcatccagcgcgctaagctggcggcctatcctccaggcctggttaaagaagcgaacggcacaggaagctgccgtgttccttaccttgtatgagaaggtgttcgaggatacctatacatatatgaaactaaacttaaatccaaaaatgcagctcctggagtgtaactacatcgtgcagtccctgaatctgctagagggacttattccaagcaaagaggaagggggcgtgtcgtgcgtagagcaccttcataaactgtttgtgttcgggcttatgtggagcctcggcgcacttctggaactggagtctcgagaaaagctggaggcctttctgcgacagcacgaaagcaagctggacttgcccgagattcctaagggcagcaaccagaccatgtacgaattttacgtgacagattacggagactgggagcactggaataaaaagctccagccatattactaccctacagactccattcccgaatacagtagcattctagtgcctaacgtagataatatccgcaccaactttcttatcgataccattgccaaacagcataaagctgtactcctcacaggagaacaaggcactgctaaaacagtcatggtgaaagcctacctgaagaagtacgacccagaagtgcagctgagcaagtctctgaatttttcttcagcgacggagccaatgatgttccaaagaacaatcgaaagctacgtggataagcgtattggctcgacttacggaccacctggcggcagaaaaatgaccgtttttatagacgacattaatatgcccgtaattaacgagtggggcgaccagattacgaatgagatcgtgagacaaatgatggagatggagggcatgtattccctagataagcctggcgacttcacaacgattgtggatgtgcagctgattgctgcaatgatccatcccggaggaggcaggaacgatattccccagcggctgaagcgccagtttaccgtctttaactgcactcttccttctaacgcatccattgacaagatctttggaattattggctgcggatacttcgacccttgtcgtagttttaagccccagatatgcgaaatgattgtgaacctggtctccgttggccgtgttttgtggcagtggacaaaggtcaagatgctgcccaccccctctaagtttcattatatcttcaatctcagggacctatcccgtatctggcagggaatgttgaccattaaggctgaggagtgcgcttcaatcccgaccctgctttctctgtttaagcacgaatgtagtcgtgtgatagccgaccgctttattaccccagaggacgaacagtggtttaacgcccatctgacgagagccgtggaagagaacataggaagcgacgcagcctcctgtatattgcccgaaccctacttcgtggacttcttacgcgagatgcccgagccaactggcgatgagcctgaggacagcgtgttcgaagtgccaaaaatctatgagctgatgccgtccttcgattttctcgccgagaagctgcaattctaccagaggcagtttaacgagatcatcaggggcacatctctagacctcgtattcttcaaagacgccatgacccacttgattaagatctcccgcatcatcaggaccagctgcggtaacgcccttctggtcggcgtcggcggctctgggaagcagtcactgtccagattggcctctttcatcgctggctaccagattttccagatcacactaacccgctcttacaatgtaaccaatctgaccgacgatctgaaggcactgtataaggtggctggcgccgatggcaagggcattaccttcatttttacagacagtgagattaaagacgaggcgtttctggaatatctgaacaaccttctcagctctggtgagataagcaatctattcgctcgcgatgaaatggatgagattacccaggggttgattagcgtgatgaaaagagaactgccaaggcatccgcctacatttgacaatctctacgagtatttcatctctcgcagccgaaagaatttgcacgtggtgctgtgtttttctcctgtcggcgagaagtttcgagcacggtcgctcaaatttcccggattaatatctgggtgcacaatggattggtttagccgatggcctagggaagccctgattgctgtggcttcctattttcttagcgactacaatatcgtgtgttccagtgaaatcaagcgtcaggttgtggaaacgatgggactttttcacgacatggtcagcgaaagttgtgagagctattttcaaagatatcgaagacgagctcacgtaacacctaagagttacctgtcattcatcaacggttataagaacatctatgccgagaaggtgaaatttatcaatgaacaggccgagcggatgaacatcgggctggataagctgatggaggcctcagagtcggtggccaagctgagtcaggacctggctgtgaaagagaaggaactggcagttgctagtattaaggccgacgaagttcttgcagaagttacagtgtctgcgcaggcaagcgcaaagatcaaaaacgaggtgcaggaagtgaaggacaaagcccagaagatcgtggacgagatcgattctgagaaagtcaaggccgagtccaaactggaggcagctaaacccgctctggaagaggccgaggccgcgctcaacaccattaagcccaatgacatcgctactgtcagaaaacttgccaaaccacctcaccttatcatgcgcattatggattgcgtgttgctgctctttcagaaaaagattgaccctgttaccatggatcctgaaaagtcatgttgcaagcccagctggggggagtctttaaagttaatgtccgccaccgggttcctgtggtctctgcagcaattcccgaaggatactatcaatgaggagaccgtcgagttgctacagccttacttcaacatggatgattacacctttgagagtgccaaaaaagtttgtggaaatgtagcgggcctgttgtcctggaccctggctatggccatcttttacggcatcaaccgggaggtgctgccccttaaggccaatttggctaagcaggaggggcgcctcgccgttgcaaatgccgaactaggtaaagcacaggccctgctcgacgagaagcaggccgaactagacaaggtgcaagctaagttcgacgccgcgatgaatgagaaaatggacctgctcaatgatgccgacacttgtcgcaagaaaatgcaagcggctagcacgctgatcgatggattaagcggggaaaaaattaggtggacacaacaatcaaaagaattcaaggctcagattaatcgattggtgggcgatatcctcctttgcaccggctttctctcctatctagggccattcaatcaaatctttcggaattaccttctgaaggatcagtgggaaatggagctccgtgccagaaagattccatttactgaaaatttaaatttgattagtatgcttgtcgacccccctacgattggagagtggggcctgcagggcttgcccggggatgatctatcaatccaaaatggcataattgttacgaaagccacccgttaccccctccttatcgatccccagacacagggcaagacctggatcaaaagcaaggagaaagagaatgacctgcaggtcacatcgctgaatcataagtacttccgcactcacctcgaggattccctgagtctgggtcgcccattgttgatagaggatatccatgaggagctggaccctgccttggacaatgtgctagaaaaaaatttcatcaagtctggtaccacattcaaagttaaagtgggggataaagagtgcgacattatggacacttttaagttatacattaccaccaagctgcctaacccggcttttacccctgaaataaacgctaagacatccgtcattgattttaccgttaccatgaagggcctggagaatcaattactcaggagagtcatccttaccgaaaaacaggagcttgaggccgagcgcgttaaactgctcgaggatgtgacttttaataagcgtaaaatgaaagagcttgaggacaatcttctgtataaactctccgctactaagggttctctagtcgatgatgagtctctcattggcgtgctccgcacgactaagcagacagccgcagaggtgtcggagaagcttcacgttgcggccgagaccgaaatcaagatcaacgccgcccaggaagagtttcgcccagctgccacccgggggtccatcctctacttcttgatcaccgaaatgagcatggtcaacatcatgtaccagacatccctcgcccagttcctgaaactttttgatcagtctatggccaggtctgaaaagagcccgctgccacaaaaaagaatcacaaatattatcgaatatctaacttacgaggtgttcacatattctgtccgagggctatacgagaaccataaatttcttttcgttcttcttatgacactgaagattgacctgcagagaggcaccgtaaaacacagggaatttcaggccctgattaaggggggcgctgcactagatctgaaagcctgtccaccaaaaccatataggtggattctagacatgacatggctgaatctcgttgagcttagtaaactgccacaattcgctgaaatcatgaaccagatctccaggaatgaaaaaggttggaaaagttggtttgacaaggacgctcccgaggaggaaataattccagatggatacaatgacagcctggatacatgtcacaagctgctgcttatcaggtcatggtgcccagaccggaccgtgtttcaggctagaaaatatattgctgattctctggaggagaaatataccgagcccgttattttgaacctggaaaagacttgggaggaatctgatacgcgaacaccccttatttgctttctgagcatggggagcgatcccacgaatcagatcgacgcccttgccaagaaactgaagctggaatgtaggaccataagtatgggacaggggcaggaggtgcacgcccgcaaattaattcagatgagcatgcagcaggtgtgcgataagcggctactcttactccaacattactgttag

SEQ ID NO: 186049 - DNA, 13461 bp, synthetic construct
  misc_feature 1..13461: note = Description of Artificial Sequence: Synthetic coding sequence
  source 1..13461: mol_type = other DNA
atgcggctggccgaggagcgggccgccctggccgccgagaacgccgacggggaaccaggggcggacaggcgattgcgcctgttaggtacctatgtggctatgagcctgcgtcccgcggctggcgcgtgggaacggtgcgccggctcagcggaggccgagcagttgttgcaggctttcctggggcgggacgctgctgagggccctcgcccactactcgtggtgcgccctgggcctcgaggactggccatccgcccaggattggaggtcggtcctgaatccggtctggctggcgctaaagccctcttcttcctcagaaccgggcccgaacctcctggaccggattccttcagaggcgcagttgtctgcggtgacctgccagctgcccccctggaacacctcgccgccttattcagtgaagttgtactgcccgttctggccaacgagaagaatcgtctgaattggccccatatgatttgtgaggacgtgaggaggcacgcccacagcttacaatgtgacctctcggtgattctggagcaggttaagggaaagaccctgctgcccctgccagccggcagcgagaagatggaattcgctgacagtaagtctgaaacagtcctggattcaatcgacaaatctgtgatctatgccatcgagtccgctgttataaagtggtcataccaggtgcaggtggtccttaaacgggaaagcagccaacctctgctccagggggaaaatcctacacctaaggtggaactcgagttctggaaaagtagatatgaggacctgaaatacatttataaccaactcagaacaattacagtccgcggaatggccaaacttttagacaagctgcagagctcatactttccagccttcaaggctatgtatagggatgtggtggcagcactggcggaagcgcaagacattcacgttcatttgatccctctacagaggcatctggaggcgcttgagaatgctgaattcccggaggtgaagccacagctacggccgctgctccatgtggtgtgcctaatttgggccacctgcaagtcttaccggtcgccaggacgacttacagtgcttcttcaggagatctgtaatctgcttatacaacaggcatccaactacctttccccagaagacctcctaagaagcgaagtggaggaatcccaacgtaaactacaggtcgtgtccgacacacttagcttttttaagcaagagttccaggacagacgcgagaacttgcatacctattttaaagaaaaccaagaagttaaggaatgggacttccagagctcactcgtctttgtccgccttgacggattcctcggtcagctgcacgtggtggagggcctcctgaagaccgcccttgactttcacaagctggggaaagtcgagttctcaggcgtgcgggggaatgccctgtcgcagcaggtgcagcagatgcacgaagagtttcaggagatgtacagattactgtccggcagttcaagtgactgtctttaccttcaatctaccgattttgaaaacgacgtgtcggagttcaatcagaaggttgaggaccttgaccgaaggctaggaactatttttattcaagcttttgacgatgccccaggcctggagcacgccttcaagcttttagacatcgccggaaacctcctggagcgcccgttagttgcacgcgatacaagtgataagtaccttgttttgattcagatgtttaataaggaccttgacgccgttcgaatgatttactcacagcacgtgcaggaagaggctgagctggggttttctcctgttcacaaaaatatgcccacagtcgcaggaggactgcgatgggcacaggagctccgtcagcgcatccagggacctttttccaacttcggtcgcattactcacccttgcatggagagcgcggaggggaagcgaatgcagcagaaatacgaggacatgctctcacttcttgagaaatacgagaccaggctgtatgaggactggtgtcgaaccgtgagcgagaagtctcagtacaacctgagtcagccattactgaagagggacccagaaactaaggagatcactattaatttcaacccccagctgatatccgtactgaaagaaatgagttacctggagccacgtgaaatgaagcacatgcccgagaccgccgctgccatgtttagttctagagatttttaccgacaattagttgctaatctggagctaatggctaactggtacaacaaggtcatgaaaaccctcctggaggtcgagttcccccttgtggaggaggaattgcagaatatcgacctgcgactgagggctgctgaggaaaccttgaactggaaaacagaaggcatctgcgactacgtcactgaaatcaccagttcgattcacgacctcgaacagagaattcagaagacaaaggacaatgtcgaggagattcagaatataatgaaaacctgggttacaccaatcttcaagacgaaagacggcaagagagagtccttattatccctggacgatcggcatgaccgcatggagaagtattacaaccttatcaaagagagcggcctgaagatccatgcgctcgtgcaggaaaatctgggcctgttctctgctgaccctacaagtaatatatggaaaacatacgtgaacagcattgacaacttattgcttaacggctttttcttagctatcgaatgtagtctgaagtacctgctggagaatacagagtgtaaggctggcctcacgcctatattcgaggcacagttatcgttggccatccccgaactagttttctatccctctctcgaaagcggtgtgaaagggggcttctgcgatatcgtggaaggcctcatcactagtattttcagaatccctagcttggtaccaagactgtccccccaaaatggatctccacactaccaagtcgatctcgatggtatacccgacctggctaacatgagacgtacactcatggagagagttcagcgtatgatgggtttatgctgtggttatcagtccactttttctcaatactcttacctgtacgttgaggaccggaaggaagtcctgggtcagttcctgctgtacggccatattctgactccagaggagattgaagatcatgtagaggatggaatccccgagaatccaccattgcttagtcagttcaaggtgcagatcgactcgtatgagaccctttacgaggaagtttgtaggttggagccgatcaaggtctttgatggatggatgaagatagatatccggcccttcaaggcatccctgctgaacattattaaacgttggtcccttttgtttaagcagcacctggtggatcacgtaacccactccctggctaacctggatgcctttatcaaaaagtccgaatccggtctgctcaagaaggtcgaaaagggcgatttccagggcctggtcgagatcatgggacatctcatggctgtgaaggagaggcagagtaacacagatgaaatgttcgagcccctgaagcagactatcgaattgcttaagacatacgagcaggaactgcccgagacagtgtttaagcaattagaggagctgccggagaagtggaacaacattaagaaggtagctatcactgttaagcagcaggtcgctccattacaggccaacgaggtgactttgctgaggcagaggtgcacggcattcgatgccgaacaacaacagttctgggaacaattccacaaagaagccccgttccgatttgatagtatccatccacatcagatgttggacgccaggcacatcgagatccaacagatggagagtacaatggcgtctatctcagaaagcgcctccctgtttgaggtgaacgtccctgattataaacaacttaggcagtgtaggaaagaggtgtgccagctgaaggagctttgggacaccattggcatggtgaccagcagcatccacgcctgggagacaaccccgtggcggaatattaacgtggaagcaatggagctcgagtgtaagcagttcgctcgtcacataagaaacctcgataaggaggtccgagcatgggacgcattcacgggcctcgagtctactgtgtggaacaccctcagcagtcttagggccgtagctgagctacagaatcctgcgattcgcgagagacattggagacagctaatgcaggctacgggcgtgagttttaccatggatcaagataccacactggcacacctcttacaactgcagctgcaccactacgaggatgaagtgagaggaatcgtcgacaaagcagccaaagagatgggaatggagaagacactcaaagaactccagactacctgggccggcatggagttccagtatgaacctcaccctcgtactaatgtcccactgctttgcagcgacgaggacctgattgaggtgctcgaggataatcaggtgcaactgcaaaatttggtgatgtccaaatacgtcgccttttttcttgaagaagtttcagggtggcagaaaaagttgagcactgtcgacgctgtgatcagcatttggtttgaagttcagcgtacttggacacacctggagtccatcttcacagggtccgaagacatcagggcccaactgccccaggattctaagcgcttcgaagggatagacattgatttcaaagaattagcctatgacgcacagaaaatccccaatgtcgtgcagactactaataaacctggtctgtacgagaagttggaggatatacagggtcggctctgtctgtgcgaaaaggccctggccgagtacctggacacaaagcggcttgccttccccagattctactttctgtcttctagcgacctgcttgacattcttagcaatggtactgcgccgcagcaggttcaacggcacttgtcaaagttgtttgacaacatggctaagatgcggttccagctggatgcctcaggcgagccaaccaaaacgagcttaggaatgtatagcaaggaagaggagtatgtcgcctttagcgaaccctgtgattgcagtggtcaggtcgagatctggctgaaccacgttttgggccatatgaaagcaacagtgcgacacgagatgacggaaggcgtgacagcatatgaggaaaagccgagagagcagtggcttttcgaccacccagctcaggtcgccctcacatgtacccagatttggtggaccactgaggtcggcatggcgtttgccaggctggaagagggctatgaatcagccatgaaggattactataaaaaacaggtcgcccagctgaagactctcattaccatgttaatcggccagctgagcaagggagacaggcaaaagattatgaccatctgcactatcgatgtccacgcgcgggatgttgttgccaaaatgattgctcagaaggtcgataacgcacaggctttcctgtggctgtcccagcttcgccatcgctgggatgacgaagtcaagcactgttttgctaatatttgcgacgcgcagttcctttacagctacgagtatcttgggaacacgcctcggctggttatcactccactaaccgaccggtgctatatcaccctaacccagagcctgcacttgactatgagtggcgctcctgcaggaccagctggaaccgggaaaaccgagacaaccaaggatttgggccgggcgcttggaatcctcgtgtacgtgttcaactgctctgagcagatggactacaagtcctgcggcaacatctacaagggcttggcccagacaggcgcatgggggtgcttcgatgagtttaacaggatttctgtggaagtcctgagtgtggtggctgtgcaggtgaagtcgatccaggatgccatacgggacaaaaaacagtggttcagcttcctcggagaggagatttctctcaatccctcggtgggtatattcatcactatgaatcccggatatgcgggtaggacggaactccctgaaaatctgaagtcactttttcgcccctgtgctatggtggtgcccgattttgaactgatatgcgagattatgcttgtggctgagggctttatcgaagcccaaagtcttgccagaaaatttattacactgtatcaactgtgtaaggagctgctcagtaaacaggaccattacgattgggggctgagagctatcaagtccgtgctagtggtagccgggagcctcaagcggggggatccagatcggccggaggatcaggtcttaatgaggtctctgcgcgatttcaatatccccaaaatcgtgactgacgatatgccaatctttatgggcctgatcggcgacttatttcccgctcttgatgtccccaggaggcgagatccaaatttcgaggcgctggtgcgcaaagcaattgttgacttgaagctgcaggccgaagataatttcgtcctcaaggtggtgcagttagaggaactgctcgccgttcgtcatagcgtatttgtagtgggcggagctgggacgggcaagtcgcaggtcctgagatcactacataagacctatcaaatcatgaagcggaggccagtgtggaccgatctgaatccgaaggctgtaactaacgacgagctgtttgggattattaatcccgccaccggggagtggaaagacggcttgttcagcagcataatgcgcgagctggccaacatcacacacgatggcccaaaatggatcctccttgacggcgatatcgaccctatgtggatagagagtcttaatactgtgatggatgataataaagtccttaccttggcctccaacgaaaggattcccttgaacccaactatgaagctgttgtttgagatctctcatcttaggactgccacccctgctactgtgagcagggccggaattctctatatcaacccagcagatctcgggtggaatcctccagtgtcatcatggatcgaaaaaagagaaatccagaccgagcgggcaaacctcacaattttgtttgacaagtatctgccaacctgcctagataccctaagaactcgatttaaaaagattatacctattcctgaacagtctatggtccagatggtctgccatttgctcgaatgtctcctgaccacagaagatattcctgccgactgcccaaaggaaatatacgagcattacttcgttttcgcggctatatgggcgttcggaggtgccatggtccaggaccagttggttgattatcgggcggaattctctaaatggtggttaaccgaattcaagaccgttaagttcccttcccaaggtaccattttcgactactatatcgaccctgaaaccaagaagttcgagccctggagcaaacttgtgcctcagttcgagttcgaccctgagatgcccctgcaggcgtgcctggtgcacacgagcgaaaccatccgggtttgctatttcatggagaggttgatggcgcggcagagaccagtcatgttggtcggtacagctggcacgggaaagtccgtcctggtgggggctaagttggcctccctggatccagaggcctatttagtgaaaaatgttcccttcaactactacacaacaagcgcaatgctgcaggccgtgctcgagaagccactggaaaagaaggctggccgaaactacggcccgcccggaaacaagaaattgatttatttcatcgacgacatgaacatgcctgaggttgacgcctacggcaccgtgcagccccataccataattcggcagcacttagactacggccactggtatgacaggagcaaactgtctctcaaggagattactaatgtgcagtatgtgagttgtatgaaccccacagcaggttccttcactatcaatccccgcctgcaacgccacttctccgtcttcgtgctgagtttcccaggtgcagacgctctttccagtatttattctataattctcactcagcatctcaagcttggaaactttcctgcttccttgcagaagtccatcccacccctcatcgatttggctcttgcttttcaccagaaaatcgcgaccactttcctgcccaccggaatcaagtttcattatatatttaacttgcgcgactttgcaaacatattccagggcattctgttttccagtgtggagtgcgtcaaatccacttgggatctgatcaggctctatttgcatgagagtaatcgcgtctatagagacaaaatggtggaggaaaaagattttgacctattcgacaagatccagacggaggtactcaagaagaccttcgatgatatagaagaccccgttgaacaaacgcagagccctaatctgtactgtcactttgccaatgggatcggagagccgaaatacatgcccgtccagtcatgggaattgctgacccagaccctagtagaagcactcgagaatcacaatgaggtgaatacggttatggacctcgttctgttcgaggacgctatgcggcacgtttgtcatattaaccggatcctggagagtccccgggggaatgctctcctcgtgggggtgggtggaagcggcaagcagtcactcactcgtttagcagcgtttatatcgagtatggatgtgttccaaattaccctgagaaaggggtatcagatccaagattttaagatggatctggcaagtctgtgcttaaaagcaggcgttaaaaatctgaacacagtgttccttatgaccgatgcccaggtggccgacgagagatttcttgtactcatcaacgacctcctggcctctggagagatccctgatctctatagcgacgacgaagtggagaacataattagcaatgttcggaacgaggtgaagtcccaaggtctggtagataaccgggagaattgctggaagttttttatagatcgcatcaggcgtcaattgaaagtcaccttgtgcttttcacccgtcggaaacaaactgcgggtcaggtctcgcaaattccccgcaattgttaactgtactgctatccattggttccatgagtggcctcagcaagccctcgagtcagtgtcattgcgatttctgcagaacacagagggcattgagcccaccgtgaaacagagtatcagcaagtttatggccttcgtgcacacctccgtaaaccagacatcgcagtcatacctaagcaacgaacagcgttataattataccactcccaagtcgtttcttgaattcatcagactgtatcagtccttactgcaccgccaccggaaggagctgaagtgcaagacagaacgtctggagaacggcctcctcaagctgcacagtacttcagctcaggtcgacgacctgaaggcgaaactagccgcccaggaggttgaactcaagcagaaaaacgaagatgctgacaagctgatacaggtggtgggcgtggagacagataaggtcagcagagaaaaggctatggccgatgaagaagaacagaaggtcgcagtgatcatgctcgaggtcaagcagaagcagaaggactgtgaggaggatctcgcgaaagcagaacctgctctgacagctgcacaggctgctcttaataccctgaataagacaaacttgactgagctgaaatccttcggaagtccccctttggccgtgtctaacgtcagtgcagctgtaatggtgttgatggccccacggggccgtgtgccgaaggacagaagttggaaagcagccaaggttacaatggccaaggtagacggcttccttgattcccttattaatttcaataaggagaacatccatgagaattgtctaaaggccatccggccatatttacaggatcccgaattcaatccggagtttgtggccacaaagtcctacgctgcagcgggcctgtgctcctgggtaattaatatagttagattctacgaagttttttgcgatgtagaacctaaacgccaagccctgaataaggcgaccgccgatctgactgccgcccaggaaaagctggcagcaatcaaagcaaaaattgctcacctaaatgagaacctcgctaagttaaccgcaagatttgaaaaagccaccgctgacaagcttaagtgtcagcaagaggctgaggtgacggctgtaacgatatccttagccaatagattggtcggcggactcgcctcggaaaatgttcgctgggcagacgctgtgcaaaacttcaagcagcaggaaaggaccttgtgcggagacattctgcttatcacagcattcatttcataccttggcttttttacaaagaagtaccgccaaagtctgctggatagaacctggaggccctatctctcccaacttaagaccccaatccctgtgaccccagcactggatcccttgcggatgctgatggacgacgccgacgttgcggcatggcagaacgaggggctgccagccgatcggatgagcgtggagaatgcaacaattcttatcaattgcgagagatggccattgatggtagacccccaattgcagggcataaagtggatcaaaaataaatacggggaggacctcagggtaacgcagattggacagaagggctacctgcaaattatcgagcaggctctagaagccggcgcagtcgtgctgatagagaacttagaggaatcaatcgatcctgtgctgggacccctgttaggtagggaggttatcaagaagggcaggttcataaaaatcggtgacaaggagtgtgagtacaaccccaagttccgcttgatactgcacactaagcttgccaacccccattatcaaccggaactccaagcccaggctacactaatcaatttcaccgtgacacgcgatggtttggaagaccagctgttagctgccgtcgtctctatggaacgacccgacttagaacagctgaagtccgacctgaccaagcaacagaatggcttcaagatcacacttaaaacactcgaagattcattgttgtcccggctttcttcggcttcaggtaattttttaggtgagaccgtactggtggagaacctggagataactaaacagacagctgccgaagtggagaaaaaagtgcaggaggctaaagtcacggaagtgaagatcaatgaagctcgcgagcattaccggccggcagctgcgagggcatcgctcctgtacttcattatgaacgacctctctaagatccaccccatgtatcagttcagcctgaaagcatttagtatcgtattccagaaagcagtcgaacgggctgcacccgacgagtcgctgcgcgagagagtggcgaacctgatcgatagcattaccttcagtgtttaccaatataccattagaggcttattcgaatgtgataagttaacatacctggcccaactgacctttcaaatcctactgatgaatcgggaagtgaacgccgtagagttggattttttactgcggagtcctgttcagaccggcaccgcaagcccagtcgagtttttatctcaccaagcatggggcgcagtcaaggtgctgagctccatggaagagttttcaaatctggacagagatatcgaaggttctgccaagtcctggaagaagtttgttgagtcagagtgccccgagaaggaaaagcttccacaggagtggaaaaacaagaccgctctgcaacgcttgtgtatgctccgcgccatgcgccctgatcgcatgacctatgcactcagagactttgttgaagaaaaattaggtagcaaatatgtggttggccgcgccctggatttcgccacctctttcgaagaaagtggacctgccaccccaatgttttttattctgagtccgggggtggaccccctgaaagacgtggagtctcagggccggaagctcggctacacctttaacaatcagaactttcacaatgtgtcacttggccagggacaggaggtggtggctgaagccgcgctggacctggcagccaagaaagggcactgggtcattttgcagaacattcacttggtcgctaagtggctgtccactctggagaaaaagctggaggagcattcagagaactcccacccagagttccgagttttcatgtctgccgagcctgctcctagccccgagggacacatcatcccgcaaggcatacttgaaaatagcatcaagattactaatgagccgccaacaggcatgcacgccaatttacataaggccctggacaattttacccaggatactttagagatgtgttccagagaaacggagttcaaatcgatcctgtttgccctgtgctatttccacgcggtcgtggccgagaggcgcaaattcggacctcaaggctggaatcgatcgtacccattcaacaccggggatcttaccattagcgtgaacgtgttatacaactttctcgaagccaacgcaaaagtgccatatgacgatctccgctatctgttcggggaaattatgtacggcggtcacatcacagatgattgggaccggcgcctttgccgtacctacttgggggaattcatccgcccagagatgttggagggggagctgagcctcgcaccagggttccccctccccggcaacatggattataatggctaccaccaatacatagatgctgaactccctccagagtctccttacttatacggcttgcaccctaacgccgagatcggatttctgactcaaacatcggaaaagcttttccgaacagtcctggaactgcagccccgggactcccaggcaagggatggagccggggccactcgcgaggaaaaggtgaaggctttactggaggaaattctggaacgggttacagacgagtttaacataccagaacttatggccaaggtagaagagagaacaccctatatcgtcgtggcgttccaggagtgcggtcgcatgaatatcctgaccagagagatccaaaggtcccttcgggaattggagcttggactgaagggggagctgaccatgactagccacatggaaaatctgcagaatgccttgtattttgacatggttcctgagtcttgggcccgccgtgcatacccgtccactgcaggtctggctgcatggtttccggatttgctcaacaggatcaaagaactggaggcatggactggggatttcactatgccctctacagtgtggcttacaggattcttcaatccccagtcctttcttacggctatcatgcaatccacagcccgcaagaatgagtggcccctagaccaaatggccctccagtgtgacatgacaaagaaaaatcgcgaggagtttagatcacctcctcgggaaggggcgtatatccacggcctcttcatggaaggagcgtgctgggatactcaagcaggtatcattaccgaggctaaacttaaagatctgacacctccaatgcccgttatgtttattaaagccattcccgcggataagcaggactgcaggtctgtatactcttgtcccgtttataagacttcccaacgcgggccgacatacgtctggactttcaacctgaaaacaaaagagaacccaagcaaatgggtgctcgctggagtcgctctgctcctacagatttag

SEQ ID NO: 186050 - DNA, 1002 bp, synthetic construct
  misc_feature 1..1002: note = Description of Artificial Sequence: Synthetic coding sequence
  source 1..1002: mol_type = other DNA
atgaaggacttcgtgctgggccgggacaaggtgcaggaggccaaggtgaccgaggtgaagatcaacgaggcgcgggaacactaccgaccagctgcagctcgcgcgtccctcctgtattttattatgaatgacctgtccaaaatccaccccatgtaccagttctcgttaaaggcgttttctatcgtctttcagaaagcggttgaacgggcagcacccgatgagtcattgcgagaaagggttgccaatctgatagattctataaccttctccgtctatcagtacaccatacgcggcctattcgaatgtgataagctgacatatctggctcagctgacattccagatcctcctgatgaatcgcgaggtcaatgctgtggaactggattttctccttcgctcccctgtgcagactggtactgccagtccagtggaattcctatcccaccaagcctggggcgctgtcaaagtactgtctagtatggaggaattcagcaacctggaccgagacatagaaggaagcgctaagtcttggaaaaagttcgtggaaagtgagtgccccgagaaggagaaactgccccaggagtggaaaaataagaccgcactccagcggctgtgtatgctgagggccatgaggcctgatcgaatgacctatgcccttagagacttcgtggaagagaagctgggatcaaagtacgtggttggtagagccctggattttgcgacgtctttcgaggagtcaggacctgccaccccaatgttctttatcctgagtccgggagttgacccactgaaggatgtggagagccagggcagaaaactcggttacacttttaataatcaaaatttccataacgtttcgctcggtcaggggcaagaggtggttgctgaagcggccctggatctcgctgccaaaaagggtcactgggtcattcttcaagtgaagcgctgtagcttctttacattctatcaccccgcccattgcttggaacactctcgtcactag

SEQ ID NO: 186051 - DNA, 2397 bp, synthetic construct
  misc_feature 1..2397: note = Description of Artificial Sequence: Synthetic coding sequence
  source 1..2397: mol_type = other DNA
atgaacgacctgagcaagatccaccccatgtaccagttcagcctgaaggctttcagtattgttttccaaaaagccgtggaacgggcagcccccgacgagtctctaagggaaagggtggcaaatctgatagatagtatcaccttctccgtgtatcagtacaccatcagaggcctcttcgaatgtgacaagctgacttatctggcccaacttacattccaaatacttctaatgaacagagaagtgaatgccgttgagctggactttcttctgcgatctccagtacagactggcactgcgagcccggtggaatttttatcacaccaagcatggggagcagtcaaggtattgagtagcatggaagaattctcaaatctggatcgtgatatcgaaggcagtgccaagagctggaaaaaatttgtggaatccgaatgtcctgaaaaggaaaaattaccacaggagtggaagaataagacagcactgcagcgcctgtgcatgctgcgcgctatgagaccagaccggatgacatatgcccttagagattttgttgaagagaagctaggcagtaaatatgtggtgggccgcgcactggacttcgccacctctttcgaagagagtggcccagctacccccatgttctttatactctcgccaggggtggatccactgaaggacgtggagtcccaaggaaggaagctgggatatactttcaacaatcagaactttcataatgtctctctgggacagggccaagaagttgtggccgaggctgcgctcgatctggccgcaaaaaagggacattgggtaatcctgcagaatatccatctggttgccaagtggcttagcacacttgagaagaaactcgaagagcacagcgagaacagtcatcccgagtttcgcgtctttatgtctgcagagcctgcaccaagccccgaagggcatataatccctcaagggatcctggagaacagcataaagattaccaacgagccacctacagggatgcacgccaacctgcataaggcgcttgacaattttactcaggacactttagagatgtgtagcagggagaccgagttcaaatctattcttttcgctctgtgctactttcatgcagtcgtcgccgagcgacgcaagtttgggccgcagggatggaaccgtagctatcccttcaacacgggtgacctgaccattagtgttaatgtgttgtacaattttttggaagctaacgcaaaggtaccatatgacgatttgagatatctctttggggaaatcatgtacggggggcacattacggatgactgggatagaaggctgtgccgcacatatctgggcgagtttatcagaccagagatgctggagggtgaattgtcactggccccagggttcccattacccggcaacatggattataacggataccaccagtacattgacgctgagttacctccggaaagcccatacctctacggcctgcaccctaacgcagagattggctttctcacccaaacaagcgaaaaactgtttagaacagtgctcgaactgcagcccagggattcccaggcgcgcgatggggcaggcgccaccagagaagagaaggtgaaagccctgctagaggagatcttggagagagtgacagacgagtttaacattcctgagctaatggcaaaggttgaggagcggaccccctatatcgtcgtcgcatttcaggaatgcggaaggatgaacattctgaccagagagatacagagatcactgcgggagctggagctgggattaaaaggagagctaacaatgacaagccacatggaaaatcttcagaatgctctgtatttcgatatggttccggagagttgggcaagacgagcctatccaagtacagccggtctagcagcgtggttccctgatctcctcaatcgcattaaggaacttgaggcctggactggcgactttaccatgccgagcacagtctggctgaccggttttttcaacccccaatctttcctgacagccatcatgcagtctacagccaggaagaatgaatggcctttggaccagatggcccttcaatgcgacatgactaagaagaaccgggaagaatttcggtccccccctcgagagggtgcctacattcacggcctgttcatggaaggggcttgttgggacacacaggccggcattattaccgaagccaagctgaaggacctgactccgccaatgcccgtcatgtttatcaaagctatcccggccgataaacaagactgtaggtctgtatacagctgtcccgtatacaagacatctcagcgcgggcccacatacgtgtggacctttaacctaaagaccaaggagaatcccagtaagtgggtgttggctggtgtggcactgctgctgcagatctag

SEQ ID NO: 186052 - DNA, 8979 bp, synthetic construct
  misc_feature 1..8979: note = Description of Artificial Sequence: Synthetic coding sequence
  source 1..8979: mol_type = other DNA
gaggtgcggggcatcgtggacaaggccgccaaggagatgggcatggagaaaactctcaaggagctacagacaacctgggccggtatggaattccagtacgaacctcatccccgcaccaatgtccctctactctgttctgacgaggacctgatcgaggtcctcgaggacaaccaggttcagttgcagaatttggtgatgtccaagtatgttgcctttttcttagaagaagtttctggctggcaaaaaaagctgagcactgttgacgccgtaatttctatctggttcgaggttcagcgcacctggacccatctagagtctattttcaccggaagtgaggacatcagggctcagctgccccaggattcaaaacgtttcgaagggattgatatcgatttcaaagagcttgcatatgatgcccaaaaaattccaaatgtcgttcagaccacgaacaagcccggtctctatgaaaaactggaggatattcagggtcgtctctgcctgtgcgaaaaagcacttgctgaatatctggatacaaagcgtctggcgtttcctaggttttatttcctctcaagcagtgacttgttggatatcttgagcaacggcaccgctccgcagcaggtccagaggcatttaagcaaactgtttgacaatatggcaaagatgagatttcagcttgatgcatccggcgaacctacgaagaccagcttgggtatgtactcgaaggaggaggagtacgtcgcttttagcgagccctgtgattgttcgggccaggtggagatatggctgaatcacgtgctgggtcacatgaaggccacggttcgtcacgagatgacagaaggtgttactgcttacgaagagaagccgagagaacagtggctctttgatcacccggctcaggtcgccctgacatgtactcagatttggtggaccaccgaggttggcatggcctttgcaaggctcgaagaaggatacgagagtgcaatgaaggattactataaaaagcaggtggcccagttaaagacactgatcaccatgcttattggacagttgagcaagggagaccgacagaagatcatgaccatttgcacaatagacgtccatgcccgggatgtagtagcgaagatgatagcccaaaaggtcgacaacgctcaagccttcttatggctatcccagctcaggcatagatgggatgatgaggtgaaacattgttttgccaatatctgcgacgctcagtttttatacagttacgaataccttggcaacactcctagacttgtgatcactcccctgacagataggtgttacattactctcacacaatcactgcacctaaccatgtcaggcgccccggccgggcccgccgggacgggaaagaccgaaacgaccaaagacctgggacgagctctcgggattctggtatacgttttcaactgttccgagcagatggactataagtcctgcgggaatatttacaaggggttggcccaaaccggggcctgggggtgcttcgacgagtttaatagaatatccgtggaggtcttgtccgtggtggccgtccaggtgaagtcgattcaagacgcaatccgagacaaaaagcaatggttctcctttttgggcgaggaaattagtctcaatccgtccgttggcatcttcatcactatgaatccaggatacgctggccggactgagctgcccgagaatctgaagagtttgtttcgaccatgcgcaatggtcgtccccgactttgagctcatctgtgagattatgttggtggctgagggcttcatcgaagcacagagcttggcccgcaagtttataaccctctatcagctctgcaaagaactgctatcaaagcaggaccactacgactggggcctgagggcaataaagagtgttttggtcgttgctgggtctctgaaaagaggtgatccggataggcctgaggaccaggtcctgatgagaagcctacgcgactttaacataccgaagatcgtaactgacgacatgcccatctttatgggccttatcggcgacctgttcccggccctggacgtgccacgccgcagagacccaaacttcgaggcccttgtccgcaaagcaatcgtggacctaaagcttcaggccgaagacaacttcgtcctgaaggttgtgcagctcgaagagctcttagccgtccgccactcagtgtttgttgtagggggagccggaacgggtaaaagtcaagttctccgcagtctacataaaacgtaccagattatgaagcgccgcccagtgtggacagatctgaatccaaaggctgtgacaaacgacgaactcttcgggatcataaatcccgcgactggtgagtggaaagatggcctcttttcgtcaatcatgcgtgaacttgcaaatatcacgcatgatgggccaaagtggatcctgcttgacggggacattgacccgatgtggatagaatccctaaacactgtgatggacgacaataaggtcttgacgttagctagtaacgaacgcattccactgaatcccactatgaagctcttattcgaaatctcccatcttcgcaccgccacacccgccaccgtgagccgcgccggcatcctgtatattaaccctgctgatctgggttggaacccacctgtgtcatcatggattgaaaagagggagattcagaccgaacgcgcgaatttgaccattctgttcgacaagtatttacccacctgtctggatacactgaggactcggttcaaaaagatcatccctatccccgaacagagcatggtgcagatggtgtgccacctgctggaatgtctcctgacaaccgaagacatcccagcagattgccctaaggagatctacgagcactatttcgtgtttgccgccatctgggctttcggcggcgctatggtgcaagatcaattggtggactatagggccgagttttcgaaatggtggcttacagaattcaagactgtcaagtttccctcgcagggcactatctttgattattatatcgatcccgagacgaagaagttcgagccatggagtaaattagtgcctcaatttgaattcgaccctgagatgcctctccaagcttgtctggtccacacgagcgaaactattagggtatgctactttatggaaaggctcatggcccgtcaacgtcccgtgatgctggtgggcactgccggcacagggaaaagcgttctggttggggctaagttggcctcactcgaccctgaagcttatttggtcaagaacgtacccttcaattactacacaaccagcgcaatgctccaggctgtcctcgaaaaacccttggagaaaaaggccggtcgcaactacggcccccccgggaataaaaagttaatttattttatcgatgacatgaacatgcctgaggttgatgcttacggtacagtccagccccacacaatcatacgccaacatctggattatggacattggtatgacaggtccaaactttctctcaaggagataacaaacgtgcagtatgtgtcctgtatgaaccccacagcagggagtttcactataaatccccgacttcagcgacacttcagcgtgtttgtgctttccttccccggcgccgacgcgctcagctccatctattccatcatattaacccagcatctcaagctgggaaacttccctgcatcactgcagaaaagcattccacctttaatagaccttgccttggcattccatcagaaaattgccacaaccttcttgcccaccgggattaagttccattacatttttaacctgagagattttgcgaacatttttcagggtatactgttttctagcgtggaatgtgtgaagagcacctgggatctcattcggttatatctgcatgaatcaaatcgggtgtatcgggataaaatggtagaggagaaggatttcgacttgttcgacaagatacagactgaggtgctgaagaaaacttttgatgacattgaggacccggtcgagcaaacccaaagtccgaacttatactgccacttcgctaatggcatcggcgaaccaaaatacatgccagtgcagtcctgggagctgctgacccaaacactggtagaagcgttagagaatcataatgaggttaatacggtgatggacttagttctctttgaggatgcaatgaggcatgtgtgtcacatcaacaggatcctggagtctcctcggggcaacgcactattagtgggagtgggaggctcaggaaagcagtcactgacacggctggcagcctttatctcctccatggatgtgttccagataaccctgaggaaaggataccaaattcaggattttaagatggacttagctagcttgtgtctaaaagcgggcgtgaaaaacttgaacactgtcttcctaatgactgatgcccaggtggcagacgaacgctttctggtgttgatcaacgatctgctcgcgagtggagagattccagacctgtattccgacgacgaggtggagaacatcatctctaacgtccgcaacgaggtgaagagtcaaggcctagtcgataaccgcgaaaactgctggaagttttttattgatcggatacgacgccagcttaaggttactctgtgcttctctcctgtgggaaacaaactcagagtgcggagtagaaagttcccagcaatcgtgaactgtactgccattcactggtttcacgaatggcctcaacaggccttggagtctgtcagtctgcgatttcttcaaaataccgagggaatagaaccgaccgtgaagcaatctattagcaagttcatggcctttgtccacaccagtgtgaatcagacctcgcagtcatatttaagcaatgaacaaagatacaattacacaaccccgaagtcttttctcgaattcatccggctgtatcaaagtcttctccacaggcaccgtaaagagctgaaatgtaaaacagagaggctagagaacggcctcttgaaactccattccacaagcgcccaggtggatgacttgaaagccaaactggccgcccaggaagtcgagttgaaacagaaaaatgaagatgctgacaaactgatccaggttgtgggtgtggagaccgataaggtgagccgggaaaaggccatggcagatgaggaggagcaaaaagtggcagttataatgttagaggtgaaacagaagcagaaggattgtgaggaagatctggccaaagctgaacctgctttgactgccgcccaggccgctcttaatacactcaacaagactaatctaaccgagctcaaatcatttggatctcctccactggcagtcagtaacgtatctgccgccgttatggtgctgatggccccccgcgggagggttcccaaagaccgcagttggaaagcggccaaggttactatggctaaggtggatgggttccttgattcattaattaatttcaataaagagaatatacacgagaactgccttaaggcgataagaccttacctgcaggaccctgaattcaaccctgaatttgtagccaccaagtcctatgctgctgccggactgtgcagctgggttataaatattgtgaggttttacgaagttttctgcgatgtggagccaaaacgacaagccttgaacaaggccacagctgacctgaccgcagcccaagaaaaactggctgctattaaagctaagattgcgcatttaaacgaaaacttagctaagctgacagcgcgcttcgaaaaagcaacagccgacaaactgaaatgccaacaggaggctgaagttacggccgtcaccatcagtctggcaaatcgccttgttggcgggttggcgagtgagaacgtgaggtgggccgatgccgtgcagaatttcaagcagcaggaaaggactctctgtggagacattcttctgatcactgctttcatctcctacctgggattcttcacaaagaagtacagacaatccctgctggacagaacatggaggccatatctgagccagcttaaaactccaatccccgtgactcctgccttagacccacttcgcatgctcatggacgatgctgacgtggccgcatggcagaatgaaggtctgcccgctgaccggatgtctgtcgagaatgcaaccatcctgatcaactgcgagcgctggccactcatggtggatccacagctgcaggggatcaaatggattaagaacaaatacggtgaggatctccgggtcacccaaatcgggcagaagggttatctacagatcatcgagcaggctctggaggcaggggctgtcgtgctgatagagaacctcgaggagtccattgacccagttctgggacccctgctgggccgagaggtcataaaaaaagggcgatttataaagatcggcgataaggaatgcgagtataacccaaagttcagactcatcctgcacaccaagcttgctaacccccactatcagcccgaactgcaggctcaggcaacactcatcaacttcaccgtaacccgtgacggactggaggaccaactgctggcagcggtggttagtatggaaagaccagacttggagcaacttaagagtgacctgacaaagcagcagaatggctttaaaataactttaaaaaccctggaggattcactgcttagcaggttaagctctgcttcagggaattttttaggggagaccgtgctggtcgagaatctggagattactaagcaaacagctgcagaggtggagaagaaggtgcaggaagccaaagtgactgaagtgaagattaatgaagccagggagcattatcgtccagctgctgccagggcttccttgttgtacttcattatgaatgatctctccaaaattcaccccatgtaccagttcagtctgaaagcgttttctatcgtctttcagaaagcggtggaacgcgctgcccccgacgaaagcttgcgtgaacgggttgccaacctcatagacagcatcacattcagtgtctaccagtataccattcggggattattcgaatgtgacaaactgacatatctagcccagttaacatttcagattcttctgatgaatcgggaagtgaatgctgtggagctggatttcttgctgaggtcaccagtgcagaccggtactgccagccctgtagagttcctcagccaccaggcttggggcgccgtgaaagtcctctccagtatggaggagttcagcaacctagatcgggatatcgaaggatcggctaagagttggaaaaagttcgtcgagagcgagtgtcctgagaaggagaaactcccccaggaatggaaaaataaaaccgctttacaacggttgtgcatgctgcgcgccatgcgccctgatcgcatgacgtacgccctaagggacttcgtggaagaaaaattaggctccaagtatgtcgtgggtcgagccttggattttgccaccagctttgaagagtccgggcctgcgactccaatgttctttatcctatctcccggcgtagatccgctcaaggacgtcgaatcgcagggccggaaacttgggtacaccttcaacaatcaaaacttccacaacgtctctctggggcagggccaggaagtcgtagcagaggccgcgttagacttggctgccaagaaaggacattgggtcattttgcaggatacactagaaatgtgtagccgcgagacggagtttaagagtatcctcttcgcgctgtgctattttcatgcagtagtagctgagaggcggaagttcggcccacagggatggaaccgctcttatcccttcaacaccggggaccttactattagtgtcaatgtgttatataattttctggaggctaacgcgaaggtgccctacgatgacctaagatacctgttcggggaaatcatgtacggggggcacataactgacgactgggaccggcgtctatgccgcacctatttgggcgagtttatcaggcccgaaatgcttgagggcgaactgagcttggccccgggcttcccgctgcctgggaacatggattataatggttatcaccagtacattgacgcagaactgcctcccgagagtccatacctgtacggcctccatcctaacgccgaaatcggtttccttacccagacatcagagaagttgttcaggacagtcctggaactgcagcccagggactcccaggctagggacggagctggggccacacgcgaggagaaagtcaaggccttgctggaagagatcctcgaacgtgtgacggatgaatttaacattcccgagctgatggcaaaagtcgaggagagaactccttatatagttgtcgcgtttcaagagtgtggtagaatgaatattctgacccgggagattcagagatcactccgcgaattggagctgggcctcaagggagagctgacaatgacatcacatatggaaaatcttcagaacgccctgtattttgacatggtgcctgaatcatgggcgagacgtgcttatccaagcacagcaggactcgcagcgtggttcccggatctgttaaatcggatcaaagaactggaagcctggacgggcgattttaccatgccctccaccgtatggttaactgggtttttcaatcctcagtctttcctgacagcaatcatgcagagtactgccaggaaaaatgaatggccactggatcagatggccctgcaatgcgacatgaccaaaaaaaaccgcgaagagtttcgctctccccctagggaaggagcgtacattcatggtctcttcatggaaggggcctgctgggacacacaggcaggaattataacagaagccaagctgaaagatctcaccccgccgatgcctgtgatgtttattaaagctataccagcggacaaacaagactgcaggtccgtctacagctgtcctgtttataaaacttcacaacggggacccacgtacgtttggaccttcaatttaaagaccaaagagaatccctccaaatgggtactggcaggagtggcactcttgttacagatttag

SEQ ID NO: 186053 - DNA, 13233 bp, synthetic construct
  misc_feature 1..13233: note = Description of Artificial Sequence: Synthetic coding sequence
  source 1..13233: mol_type = other DNA
atgcggctggccgaggagcgggccgccctggccgccgagaacgccgatggggagcccggagctgacaggaggctgagactgctcggtacctacgttgccatgagtctgcgccctgctgcaggggcttgggagagatgtgccggaagtgctgaggcagaacagctgctgcaggcgtttctgggcagagatgccgccgagggacctcggccccttcttgtggtgcggcctgggccaagaggtctggcaattcgccccgggctcgaagtcggtcctgagtcaggcctggcgggcgctaaagctctgttctttctgcgaactgggccagagccgcccggacccgactctttccgaggcgccgtggtctgtggagacctccctgcagccccattagaacaccttgcggctcttttctcagaggtggtacttcctgttctggccaacgagaagaatcggttgaattggccccacatgatttgcgaggatgtgagaaggcacgcacattcactgcaatgcgacttgtcagtcatcctcgagcaggtgaaaggaaaaactctgctcccactgcccgctggatctgagaaaatggagttcgccgattctaagtctgagaccgtgctcgactctatagacaagtcagttatatatgccatcgagagcgctgtgataaagtggtcctaccaagttcaagtcgtactgaaacgtgagagttctcaaccattgctgcagggcgaaaatccaacgcccaaagtggaactggaattctggaaatctcggtacgaagatttgaagtacatctacaaccagctccgcacgatcaccgtccgcggaatggctaagttgctcgataagttgcaaagcagttattttcctgccttcaaggccatgtatcgcgatgttgtcgccgcactggccgaggcacaggatattcatgtgcacctcatcccccttcagaggcacctagaggcacttgagaatgccgagtttccagaggtaaagccacaactgcggcctcttcttcatgttgtttgcctgatttgggccacatgcaagagctaccggtcaccaggtaggctcacagtcttgctccaggagatttgtaatctgctgattcagcaggcgagcaattatctgtcacccgaagatctgctgcgttctgaagtcgaggaaagtcaacgcaagcttcaagttgtttctgacacactatccttttttaagcaggaatttcaagaccggagagaaaatctgcatacctacttcaaagaaaatcaggaagtgaaagagtgggactttcagtcctctctcgtctttgtgcgcttagatggcttcctgggccagcttcacgtggtggaagggctgctgaagactgcgttagatttccataaacttggtaaggtggagttttcaggggtgcgtggcaatgcactgtcacagcaggtccaacagatgcacgaggagttccaggagatgtatcggctgcttagcggctctagcagtgactgtctctacttgcaatctaccgacttcgagaacgacgtcagcgagttcaaccagaaagttgaagacctggacaggagactcgggacgatcttcattcaggcctttgatgatgcccctgggttggaacatgccttcaagctcctcgacattgctggcaacctgctcgagagacctttagtggcaagagacacctctgataagtaccttgtcttgatccagatgttcaataaagacctggatgctgtcagaatgatttactcccagcacgtgcaggaggaagctgagttagggttcagcccggtgcacaagaacatgccaacagtcgcaggggggctcaggtgggctcaggaacttcgccaacgcatccagggccctttctcaaactttggacgaattacacatccttgtatggagtcagccgagggaaagcgcatgcagcaaaagtatgaagatatgctcagtcttctggagaagtatgagacccgcctttacgaggactggtgtcggactgtttcagaaaaatctcaatataacctttctcagcctctgcttaagcgcgatccagagactaaggagataactattaatttcaatccgcagcttatttctgttctgaaggagatgtcctacctggaacctcgggagatgaagcatatgcccgagaccgctgccgctatgttcagctctagagacttttatcggcagcttgtggctaacctggagctgatggctaactggtataataaagtcatgaaaacgctgttagaagtggagttccctctggttgaggaggagcttcagaacattgacttgagactgagggcggccgaggagacactgaattggaagacagagggaatctgtgattatgtcacggaaatcaccagcagcatccatgaccttgaacaaagaattcagaagaccaaggataatgtcgaagaaatacagaacatcatgaaaacatgggtcacacccatttttaaaaccaaggatggcaaacgagaatccctgctgagcctggatgatcgccatgataggatggagaagtactacaacctgatcaaggaaagcggattgaaaatccatgccctggttcaggagaatctagggctgtttagcgcagacccgacctctaatatttggaaaacctacgtgaactcgattgataatttactgttgaatggcttcttcctcgcgatcgaatgcagtctcaaatacttgctggagaacactgaatgcaaagccggcctgactcccattttcgaagcacagcttagcctggccatccctgagctcgtattttatcccagtctcgagagcggcgttaaagggggattttgcgatatagtggagggcttaatcacttctatcttccggatcccctctctggttccaagactctccccacagaatggttccccccattaccaggtggacctggatgggatcccagatctcgctaacatgcgtcgtactttgatggagagggtccagcgcatgatgggcctatgctgtggctaccagtctactttcagtcaatacagctacctctacgtggaagatagaaaggaggtactggggcaatttttgttatacggccacattctgaccccagaagaaatcgaggaccacgtggaggatgggattcccgagaatcctcctctgctgagccagttcaaggtgcagatcgacagttacgagaccctgtacgaagaagtctgcagattagagccgattaaagtgttcgatggatggatgaagatcgacattcgccctttcaaggccagtctcctcaatatcatcaagcgctggtctttgctgttcaagcagcatttggtggaccatgtgactcacagtctcgccaacctggatgccttcattaagaagtctgagtctggattgcttaaaaaggtggagaaaggcgactttcaagggctcgtcgagatcatgggccatctgatggctgtgaaggaacgtcaaagtaatacagatgagatgttcgagcccttgaagcagacaatagaactgctgaagacttatgagcaggagttaccggaaacagtctttaagcagctggaagagctgccggagaaatggaataatatcaagaaggtagccattaccgttaagcagcaagtcgctcctttacaggcgaacgaagtgacgctgctcaggcaacggtgcaccgccttcgacgccgagcagcaacagttttgggaacaattccataaggaagctccattcagatttgactcaatccaccctcaccaaatgctggacgcccgccatattgagatccagcagatggagtccacaatggcctcgatctctgagtccgctagtttattcgaggttaatgtgcccgattacaaacagttgagacagtgccgcaaagaggtttgtcaactgaaggagctatgggacacgattgggatggttacttccagtatccacgcgtgggaaaccaccccatggagaaatataaacgttgaagccatggagctggaatgcaaacagtttgccaggcatattaggaacctggataaggaggtccgggcctgggacgccttcacaggcctagaaagcactgtgtggaatacgctttcatctctcagggctgtggcagaattgcagaatcctgcaatcagggaacggcactggcggcaactcatgcaggcaacaggagtgagcttcacaatggaccaggataccaccctcgcccatctgctgcagctgcagctacaccactatgaggatgaagtgcggggcatcgttgacaaagccgccaaggaaatgggaatggaaaaaaccctgaaagaactgcaaaccacatgggccggaatggaatttcaatatgagcctcacccaagaacaaacgtgccactgctgtgtagcgacgaggacctgatagaagtcttggaagataaccaggtgcagttacagaatctggtgatgtccaagtacgtggcatttttcctagaggaggtgtccggctggcagaagaaactgtcaactgtggatgctgtaatctcgatctggttcgaagttcagcggacttggacccacttagagtcaatcttcacaggctcagaagacattagagctcagcttcctcaggattcgaagcgcttcgaagggattgatattgattttaaggaactggcatacgatgcacagaaaataccgaacgtggtccagaccaccaataagccaggcctttacgaaaagttggaggatattcaggggaggctgtgtttgtgtgaaaaagccctggctgaatacttagataccaagagactggctttccctcgattctactttctgagctcaagtgacctccttgatatccttagtaacggaacggccccgcaacaagtgcaacggcatctgtcaaagctttttgacaacatggcaaagatgcgctttcagctcgatgcttccggggaacccacaaagacaagcctgggtatgtatagcaaggaggaagagtatgtggcatttagcgaaccctgcgactgttctggacaggtggaaatctggttaaatcatgttctgggtcacatgaaggccacggtgcgacacgaaatgactgagggggtcactgcttacgaagagaagccgcgtgagcagtggttatttgatcaccccgcacaggtggcccttacctgcacacaaatctggtggactaccgaggtggggatggcctttgcgaggctcgaggaggggtatgagagcgccatgaaagattattacaagaaacaagtggcgcaactgaaaactcttatcaccatgcttatcggacaactgagcaaaggcgacagacagaagatcatgaccatttgcaccatcgacgttcacgcacgcgatgtcgttgccaaaatgattgcacagaaggtcgacaatgcccaggctttcctgtggctctcacagctccgtcatagatgggacgacgaagtgaagcattgtttcgccaacatttgtgatgcccagtttctatatagctacgagtaccttggtaacaccccccgattggttatcactcctttgactgaccgctgctatatcaccttgacacagtcattacaccttactatgagcggtgccccggcgggcccggctggcacaggcaaaactgagactacgaaagatctgggacgcgccttaggtatccttgtgtatgtgtttaactgttctgagcaaatggattataagagctgcgggaatatctacaaaggtttagcacagaccggtgcctggggctgtttcgacgagtttaaccggatcagtgtggaagttcttagcgtcgtggctgttcaagtcaagtccatccaggacgctatacgggataagaagcagtggttctccttcctgggagaggaaatctcactgaacccgtccgtggggatctttatcactatgaaccctggctacgccggccgaactgagctgcccgaaaacctcaagagtctgtttagaccctgcgcaatggtggtacccgactttgaactgatctgcgagattatgctggtcgctgaggggttcatagaggcacagtcactggccagaaaatttataacgctttatcagctttgcaaggagctgttgagcaagcaggatcactacgactggggccttcgcgctattaagagcgtgcttgtcgttgccggctccctgaaacggggggatcccgacagacccgaagatcaggtgttgatgcgcagtttaagagatttcaacattccgaagatcgtgacagatgacatgcctattttcatgggtttgattggcgatctcttccccgcactcgacgttccaagaagacgcgaccctaactttgaggccctcgttagaaaggcaatcgtcgacttgaaacttcaggctgaagataacttcgtgctgaaggtcgttcagctagaggagcttctcgctgttcgacattctgtgttcgtggtgggcggagctggcacaggcaaaagtcaggtgcttagatccctgcataagacgtaccaaattatgaagagacgcccagtttggacagatctaaacccgaaagccgtcaccaatgacgagctgttcgggattatcaatccagccacaggggaatggaaggacggactgttctcatctatcatgagagaactggctaatatcactcacgatgggccgaagtggatcttgcttgacggtgacattgaccctatgtggatcgaatctctaaacaccgttatggacgataacaaggttctgaccttagcctctaacgaaaggatacctctgaacccgactatgaagctgctgtttgaaatctctcatctgagaactgccactccggcaacagtgagcagggcaggaatcctgtatattaatcccgccgacttagggtggaaccctcccgttagttcttggatcgaaaaacgagaaatccagactgagcgagcaaatttgaccatcctgttcgacaagtacctgccgacttgccttgatacgcttcggacaagatttaagaagattatacccattcccgaacagagcatggtgcagatggtgtgtcatttgcttgaatgcctgctgacaaccgaagatattccagccgactgtccgaaagagatctatgagcattactttgtctttgcagcgatctgggcatttggaggagctatggtgcaggaccagctcgtcgattacagggcagaattcagcaaatggtggttgaccgaattcaagaccgtgaagttccctagccaaggtacgatctttgactattacattgatccagagaccaaaaagtttgagccctggtctaaactcgtcccacagtttgagttcgaccctgaaatgccgctgcaagcttgcctcgtgcacacttctgagaccatccgagtgtgttactttatggagaggctcatggccaggcagcgacccgtgatgctggtcggaacggccgggaccggaaaaagcgttctggtcggggccaaactggcatcacttgatcccgaggcgtacttggtgaagaatgtgccgtttaattactacaccactagcgcgatgcttcaggcggttttggagaaacctctcgagaagaaggcgggcaggaactatggccccccaggaaataagaagctgatttatttcattgacgacatgaacatgcctgaggtggacgcctacggtacggtacagccacatactataatcagacaacatttggactacggccattggtacgacaggtctaagctgagcctgaaggagatcacaaatgtgcagtatgtttcctgtatgaaccctaccgccggctctttcactatcaaccccagactacaaagacacttttcagtcttcgttctgagcttccccggcgcagatgctctatctagcatatactctataatcctgactcagcacctgaaactgggcaacttcccggcctcacttcaaaaatccattccacctctgattgaccttgccctcgcatttcatcagaagatcgcgacaacattcctcccaaccgggatcaagttccattatatctttaatctgagggacttcgcaaatatctttcagggaatcctgttcagcagtgtggagtgtgtgaaaagtacttgggaccttatccgcctctacttgcatgagtccaaccgggtttaccgtgacaagatggtggaagaaaaagacttcgacttgttcgacaaaatccagaccgaagtcctcaaaaaaacgtttgatgacattgaagaccccgtagagcaaacccagtcacccaacctgtactgccactttgcaaatgggatcggtgaacctaaatatatgccagtccagtcctgggaattattaacacaaacactggtggaagcactggagaaccataacgaggtaaacacagtgatggacctggtcttattcgaagacgccatgaggcatgtatgccacatcaatcggattctggaaagccctcgcgggaacgcattgctggtgggagttggtggttcaggtaaacagtctctcactcgcctggctgcgttcattagcagcatggatgtttttcaaattaccctgaggaaaggctatcagatccaggattttaagatggacctcgcctcactctgtctgaaggctggcgtgaagaatcttaacacggtgttcctcatgacggatgctcaagtggccgacgaaaggtttttggtgctgattaatgatttgctagcctcaggagaaatacctgatttgtattctgatgacgaagtggagaacatcattagcaacgtgaggaacgaagtgaagtctcagggcctcgtggataatagggaaaattgctggaaattcttcatcgacaggatccggcggcagcttaaagttaccttatgtttcagcccagtcggaaacaagctgagggtgcgctcgcgaaaatttcctgccattgtaaactgtaccgcaatccattggtttcacgaatggccacagcaagccttggagagcgtgtcgttacgcttcctgcagaatacagagggcatcgagcctacagtgaagcagagtatctccaaattcatggccttcgtgcatacgtccgtcaatcaaactagccagtcgtaccttagcaacgaacaacgatataactatactacccctaaatctttcctggaattcatccgtctgtatcagtccctgcttcaccgacacagaaaagagttgaagtgtaagacagaacgtctagaaaatgggttactgaagctgcactctacatcagcacaagtcgacgatctgaaggcaaagctggctgctcaagaagtggaactgaagcagaaaaatgaggacgctgacaagctgatacaggtggttggagttgaaacagataaggttagtcgcgaaaaagctatggcggacgaggaggaacagaaggtggcagtgatcatgctcgaggtgaaacagaagcagaaggactgcgaagaagatctcgctaaggcagagccagcactaaccgccgcacaggctgccttaaatactctgaataaaaccaatttaacagagctaaaatcctttgggtcacctcccctggcagtgtcaaacgtctccgcagccgtgatggttttaatggcacccagaggacgagttccaaaggaccgttcttggaaggccgccaaggtcacgatggcaaaggtagatggtttcctggattcactgattaactttaataaggagaacatccatgaaaactgtttgaaggcaatccgcccctatctccaagatccagaattcaaccctgagtttgtcgcgaccaagagctatgcagccgctgggctgtgtagctgggtaattaatattgtccggttttatgaggtcttttgtgatgtggagcctaaacggcaggcgctcaataaagcaaccgccgaccttaccgctgcgcaggagaaactggccgccatcaaggctaagatagcgcatttaaacgagaatttagccaagctgaccgcccgattcgagaaggctacagctgacaaactgaagtgccagcaggaggcggaggtcacggctgtgactatctcacttgctaataggcttgtgggcggactcgcaagtgaaaacgtgcggtgggcagatgccgtccagaattttaagcagcaggaacgcacactgtgcggggacatacttttaatcacagcattcatatcttacctgggcttttttactaagaagtaccgccagtcgttactggatagaacatggcgcccatatttatctcagcttaagacacccatccctgttacgccagctctggatccccttaggatgctgatggatgatgccgacgtagctgcctggcaaaacgaggggttgcctgctgacaggatgagtgtcgaaaatgctacgatccttattaattgtgagaggtggcccttgatggtcgatccccagctgcaaggcattaagtggatcaaaaataaatatggtgaagacctgcgagtaacacagatcggccagaaggggtatttacaaatcatcgagcaggccctggaagctggcgccgtggtgctgattgagaatctagaagaatctattgaccccgtgctggggccgctgttaggtcgggaggtgatcaagaagggacggtttatcaaaattggcgacaaggagtgcgaatacaacccaaaattccggttgatacttcatacaaaactggctaaccctcactaccagcccgagctgcaggcccaagccactctgatcaatttcaccgtcacccgagatgggctggaggaccagttgctcgcagccgtcgtgagtatggagaggcctgaccttgaacagttaaagtcagatctcactaaacagcaaaacggctttaagatcacactgaagactctggaggactccctgctgtcccgtctgagctccgccagcgggaacttcctgggcgagacagtactggtcgaaaacctggaaatcacgaaacagactgcggccgaggtcgagaagaaggttcaggaggcaaaggtaacagaggtcaagatcaacgaagcgcgcgagcattatcgtcctgctgctgcacgagcctcgttgttgtatttcattatgaacgatctcagcaagatccatcccatgtatcaattctctctgaaagctttttctattgtttttcagaaggcagtagagcgggctgctcccgacgaatctttacgagagcgcgtggccaacctcatcgacagcattaccttctctgtgtatcagtataccattcgtggactgttcgagtgtgataaactcacctacctggctcaactcacttttcagattctgctgatgaatcgggaggttaacgccgtcgagctcgactttctcttgcggtctccagtccagacaggaacggcctctcctgtggaatttctttcacaccaagcctggggggctgtgaaggtcctgtcaagcatggaggaattctctaatcttgacagagacatcgagggctccgccaaaagctggaaaaagtttgttgagtctgagtgccctgagaaagagaaattgccacaggaatggaagaataaaactgccttgcaacgcctttgcatgctgcgggctatgaggcccgatcggatgacatatgccctccgcgactttgtcgaggaaaagctgggctccaagtatgtggtgggaagagcacttgactttgctacctccttcgaagagtcgggaccggcaactccaatgttctttatcttatcccccggagtagacccacttaaggatgtagagtctcagggaagaaagctgggctacactttcaataatcagaacttccataacgtatctctgggccaggggcaggaggtagtcgccgaggctgcactagacctggctgctaagaaggggcattgggtgatccttcaagacacgctggagatgtgcagtcgggaaactgagttcaagtcgatccttttcgctttgtgttattttcacgcggttgtcgctgaacggcggaagttcggacctcaaggatggaatcgctcataccccttcaacacaggggacctgactatctcagtgaatgtgttgtacaactttctcgaagccaacgctaaggtgccttatgatgatctccgttatctgtttggggagataatgtacggaggacatattactgacgactgggaccggcgtctgtgccgcacttacctgggggaatttattagacctgaaatgctggaaggcgaacttagcctggcgcccgggttcccacttcccggtaatatggattacaatgggtatcaccaatacattgacgcagaactccctccggaatccccttacctatatgggctgcatccaaacgcagagatcggttttctgacacagaccagcgagaagctgttcagaacggtgttggaactgcagccccgagactcccaggcccgggacggcgccggcgccacgagagaagaaaaggtgaaggccctcttggaggaaattttagagcgggttaccgacgagttcaatataccagaactcatggcaaaggttgaggagaggaccccttatatcgtcgtggcttttcaggaatgtggccgcatgaacatcttaacccgtgagatacagaggtccctgcgagagctggaactgggcctaaaaggagagttaaccatgacttctcacatggaaaatctgcagaatgccttgtattttgatatggtgcccgaatcgtgggctcgtagggcctatccgtccacagccggccttgctgcttggttccctgatcttctgaatcggattaaagaactggaagcctggaccggagatttcacaatgcccagtaccgtctggctgaccggcttcttcaacccccagtcattcttaacggccattatgcaatcaaccgcaaggaagaatgagtggcctctggaccagatggcacttcagtgcgatatgacaaaaaagaatagggaagagtttcggtcccccccccgcgagggggcgtatatccacgggctgttcatggaaggggcttgttgggatactcaggccggcattatcactgaggctaagctgaaggacttaacgccccctatgccagtgatgtttattaaagcgattcccgccgacaaacaggattgccgcagcgtatactcttgtcccgtgtataaaacatcacagcgaggtccaacttacgtgtggacatttaacttgaagacaaaagagaacccttccaaatgggtgctcgccggggtcgccctcctgctccagatctag

SEQ ID NO: 186054 - DNA, 2100 bp, synthetic construct
  misc_feature 1..2100: note = Description of Artificial Sequence: Synthetic coding sequence
  source 1..2100: mol_type = other DNA
atgatccccgccagcgccaaggccccccacaagcagccccacaagcagagcatcagcatcgggagagggacacgtaagagagacgaagattcagggactgaagttggggagggcactgacgaatgggctcagagcaaagcaaccgtgcggccccctgatcagttggaattgaccgacgccgaattgaaagaagaattcacaagaatattgacagctaataatccccacgccccccaaaacatagtccggtactcctttaaggaaggaacttataagcctattggctttgtcaatcagcttgctgtccattacacccaagtggggaacctcattccgaaagattctgatgaaggacgacgacaacattacagagatgagctggtcgccggctcccaagaaagcgtcaaggtcatttctgaaaccggtaacctcgaagaagatgaggaacccaaggaactggagactgagccagggtcacagactgatgttccagcggcaggagccgccgagaaagttaccgaagaggagctgatgacaccgaagcagcctaaggagcggaagctgactaatcagttcaatttttctgaacgggcgtcccagacctacaataaccccgttagagatcgggaatgccaaacagagcctcctcccaggactaacttctctgccactgctaatcaatgggagatctacgacgcgtacgtcgaagagctggagaaacaggaaaaaactaaggaaaaggaaaaggccaaaacgcctgttgccaaaaaatccggcaaaatggctatgaggaagctgacctcaatggagtcccaaacggatgacctgatcaagctttcgcaggccgcgaagataatggaacggatggtcaaccagaacacctatgacgacatcgcgcaggactttaagtactacgatgacgccgctgatgagtacagagaccaggtgggcaccctcctgcccctgtggaaattccaaaacgacaaggcaaaacggctttcagttactgcattgtgctggaaccctaaatatcgagatttgtttgccgtgggctatggatcttatgacttcatgaagcaaagcaggggcatgttgctcctgtattctctgaaaaatccctccttccccgagtacatgtttagctcaaatagcggcgttatgtgtctggacatccatgtagaccatccatacctggttgcagtgggtcattacgatggaaatgtagccatctacaatctgaagaagccgcacagtcaaccctccttttgctcatctgccaagtcagggaagcatagtgaccccgtttggcaggttaagtggcagaaggacgacatggatcagaacctgaacttttttagcgtgtcatctgacggtagaatcgtaagctggacattagtgaagaggaaactggtacatattgacgtaattaagcttaaagtggagggatctaccacagaggtgcccgagggacttcagttgcaccccgttggttgcggcacagctttcgacttccataaggagatcgactacatgttccttgtcggcactgaggaggggaaaatctataagtgctccaagtcctattcatctcagttcctggatacttatgatgctcacaacatgtccgtcgataccgtctcctggaacccttaccacacaaaagtgtttatgagctgttcaagcgattggaccgttaaaatctgggaccacaccatcaagacccccatgttcatatacgacctcaactccgccgtgggcgacgtggcctgggccccttattcttctacagtctttgccgccgtgaccactgatggtaaggcgcacatctttgacttggccataaataagtacgaggctatctgtaatcagcctgtagcagccaagaagaaccggctgacccacgtccagttcaacttgatccaccccataatcattgttggcgatgatcgggggcacatcattagcctgaagttgtcgcctaatctgcgcaaaatgccgaaggaaaagaaaggacaggaggtgcagaagggccctgcagtagaaatagctaaactggacaaactcctgaacctcgtgagggaagtgaaaatcaaaacttag

SEQ ID NO: 186055 - DNA, 585 bp, synthetic construct
  misc_feature 1..585: note = Description of Artificial Sequence: Synthetic coding sequence
  source 1..585: mol_type = other DNA
atggaccagaacctgaacttcttcagcgtgagcagcgacggccggattgtctcctggacgttagtcaagcgaaaactcgtccatatagacgttattaagctcaaggtcgaggggtcaactacagaggtgcctgagggactgcagctgcatccagtgggctgcggaactgcctttgatttccataaagagatcgactacatgtttctcgtaggaaccgaggaggggaagatttacaaatgcagcaaaagctacagcagccagtttctcgatacctacgacgcgcacaacatgagcgtggacaccgtgtcctggaatccctaccacaccaaagtgtttatgtcgtgtagctctgattggacggtgaaaatttgggaccacactatcaagactcctatgttcatatacgatcttaattcggccgttggcgacgtagcatgggctccctactcctctacagtcttcgccgcagttacaaccgacggaaaagagaagaaaggccaagaagtgcagaagggacccgcggtcgagattgctaagctggataagctgttgaatcttgttcgggaggtaaaaattaaaacatag

SEQ ID NO: 186056 - DNA, 870 bp, synthetic construct
  misc_feature 1..870: note = Description of Artificial Sequence: Synthetic coding sequence
  source 1..870: mol_type = other DNA
atgatccccgccagcgccaaggccccccacaagcagccccacaagcaggacgaagatagtgggaccgaggtgggggagggcacagatgaatgggctcagagtaaagccaccgtgcggcccccggaccaactggagcttacggacgctgagcttaaggaagagttcaccaggattctgactgcaaacaacccccatgctcctcagaatatcgtgaggtattcctttaaggaagggacatacaaacccataggtttcgttaaccagttggcggtgcactacactcaagtcggtaatttgattcctaaggatagcgacgagggccgcagacagcattaccgggatgaactggttgccggctctcaggaatccgtgaaggtgatctccgagaccggaaatcttgaagaagatgaagaacctaaagagctcgagacagaacccggatcccagacggacgtacccgctgccggagccgccgaaaaggtgaccgaagaggagttaatgacgcccaaacagcccaaagaacgcaagctaactaatcagttcaatttctcagaacgcgctagtcaaacatacaataaccccgtaagagaccgcgagtgccagacagagccgccccctcgtacaaactttagtgcaactgccaatcagtgggaaatctacgatgcctatgtggaagagctagaaaaacaggaaaaaaccaaagagaaagagaaggctaaaacacctgtggcaaagaagtccggcaaaatggcgatgagaaaactcacgtcgatggaatcccagactgacgaccttataaaactctcccaggcagcaaagattatggaaagaatggtcaatcagaatacctatgacgatatcgctcagtag

SEQ ID NO: 186057 - DNA, 870 bp, synthetic construct
  misc_feature 1..870: note = Description of Artificial Sequence: Synthetic coding sequence
  source 1..870: mol_type = other DNA
atgatccccgccagcgccaaggccccccacaagcagccccacaagcaggatgaagacagcgggactgaggtaggcgaaggaactgacgagtgggcgcagtccaaagccacagtgcggccccctgaccagctggaactcaccgacgcagaactaaaggaggaatttactcgcatcctgaccgcgaataacccacatgctccacaaaacattgtgcggtactcattcaaggaaggaacctacaaacctattggcttcgtgaaccagctggccgtgcattatactcaggtcggaaaccttattcccaaggacagcgatgaggggcggcgccagcattatcgcgacgagctggttgccgggtcacaggagagtgtgaaagtaattagcgaaacagggaacctagaagaagatgaggaacccaaggagctggaaactgagccgggatcacagactgatgttcccgccgcaggcgccgctgagaaagtcaccgaagaggagctgatgacccctaaacagcccaaagagcggaagttgaccaaccagttcaatttctccgagcgcgccagccagacctataacaatccggtcagagatcgggaatgtcagaccgagccacctcctaggaccaacttctccgccacagctaaccagtgggaaatttacgatgcctacgtggaggaacttgaaaagcaggagaagactaaggagaaagagaaggccaagactccagttgccaaaaagtcagggaagatggccatgagaaagctgactagcatggagagccagactgacgacctgatcaagcttagtcaggcagccaaaatcatggagcggatggtgaaccaaaatacatacgatgatatagcccagtag

SEQ ID NO: 186058 - DNA, 429 bp, synthetic construct
  misc_feature 1..429: note = Description of Artificial Sequence: Synthetic coding sequence
  source 1..429: mol_type = other DNA
tgatgcggcaccgccttcgacttccacaaggagatcgactacatgttcttagtcggcacggaggaagggaaaatctacaagtgtagtaagtcttactcatctcagtttctcgatacctacgatgcacacaacatgtccgtggacactgtttcgtggaacccgtaccacaccaaggtgtttatgtcgtgcagttccgactggacagtgaagatatgggatcatacaataaagacaccaatgttcatttatgacttgaactccgcggtgggcgatgtggcctgggctccatatagtagtacggtgttcgccgctgtgactactgacggtaaagagaagaaggggcaagaggtgcaaaagggaccagctgtggaaatagcaaaactcgataagctgttaaacctagtgagggaggtgaagattaaaacctag

SEQ ID NO: 186059 - DNA, 507 bp, synthetic construct
  misc_feature 1..507: note = Description of Artificial Sequence: Synthetic coding sequence
  source 1..507: mol_type = other DNA
atgatccccgccagcgccaaggccccccacaagcagccccacaagcagagcataagcattggccgcggaacgcgcaagagggacgaggactcagggaccgaagtgggagaagggaccgatgaatgggctcaatccaaggccacggtgcgcccccctgatcaactcgaactcactgatgccgaattgaaggaggaattcacgaggattctgactgcaaataacccacatgccccacagaacatcgtccgctattccttcaagaagcagtggtcactgggatttatcccgaagctgaaaagaaagatccccgtcaattactgggggcaggatgaaggggagatctcaaatgagaccgttcgcgttatctatagcctggggatctttattatgaaaattgtcaccatactgttgaacatcaatatagagcacctcctatgcgtgcgacattgcgtcaatcgcttattcctcctgttcctcatcctgataatcatcatgcagatccgctag

SEQ ID NO: 186060 - DNA, 1209 bp, synthetic construct
  misc_feature 1..1209: note = Description of Artificial Sequence: Synthetic coding sequence
  source 1..1209: mol_type = other DNA
atgcggaccaccctgacccccagctgcagcagcgccctggacccccaggaaatcaaaagggcggccacccacctctcttggcaccctgacggcaacagaaagctcgccgtggcgtactcttgtctggattttcagagagcccccgtcggcatgtcatctgactcctatatttgggaccttgagaatccaaacaagccggagctggcattaaaacccagctctcctctcgtcacactggaattcaatcccaaggacagccacgtcctactcggagggtgttacaacgggcagattgcctgctgggacaccagaaaggggtctttggttgcggaactttccacgatcgaaagtagccatagggaccctgtgtacggaactatttggcttcagtcaaagacagggactgagtgttttagcgcttctacggacggtcaggtgatgtggtgggacattagaaagatgagcgaacctactgaggtggttattctggatatcactaaaaaggagcagctcgaaaatgcgctgggggctatttctctggagttcgagtcaaccttgcccactaaattcatggtaggcactgaacagggcatcgttatcagctgcaacagaaaagccaagaccagcgccgaaaaaatcgtgtgcaccttcccaggacatcacgggcctatctatgctttgcaacgtaatcctttttatcccaagaactttctgacagtaggggactggacagcccgcatttggtctgaagattcccgcgagtccagcatcatgtggaccaaatatcacatggcctacctgacggacgccgcttggagccctgtaaggcccactgttttcttcactacacggatggacgggacgctggacatatgggattttatgttcgaacagtgcgaccccactctttcccttaaagtatgtgatgaggccttattttgcctgagagtacaggacaacggatgcctgattgcgtgcggttcgcagctcggaactacaaccctgctggaggtcagtcccggactatccactcttcagagaaacgagaagaacgtggcttcgtccatgttcgagcgtgaaactcggagggaaaaaattctggaggctaggcacagggagatgcggctgaaggaaaaagccgcaacaaaatctcggcggcggcctggggggggcggggggagaggatcaagcgggggtcgtagaggctag

SEQ ID NO: 186061 - DNA, 1818 bp, synthetic construct
  misc_feature 1..1818: note = Description of Artificial Sequence: Synthetic coding sequence
  source 1..1818: mol_type = other DNA
atggagatcgtgtacgtgtacgtgaagaagcggagcgagttcggcaagcaatgcaatttttctgaccgacaggcggaattgaacatcgacatcatgccaaatcccgagctcgctgagcaattcgtcgagagaaatcccgtggacacgggtatacagtgcagcatcagtatgtcagagcatgaggccaactccgaaaggtttgagatggagacacggggagtaaaccacgtagaaggagggtggccgaaggatgtgaatccgctggagctcgagcaaaccatccgttttcggaaaaaggtcgaaaaagacgaaaactacgtaaacgctatcatgcagctgggttccatcatggagcattgtattaaacaaaataacgctatcgacatttacgaagaatacttcaacgacgaggaggcaatggaagttatggaggaggacccctcagccaaaaccatcaacgtgttccgggatccgcaggaaattaaacgtgcggccacccacctgtcttggcaccctgatggaaacagaaaactggcagttgcttattcctgcctagacttccagcgcgcacccgtggggatgagcagtgatagctatatttgggacctggagaatccaaacaagccggagttagccctcaagccctccagtcccctggtcaccctggaattcaacccaaaggattctcatgtcctgttgggcgggtgctataacggacagattgcctgctgggacaccaggaagggctccctagtagcagaactgtcaacaattgaatcttcccaccgggaccctgtctatgggaccatctggctgcagagcaagacaggtaccgaatgcttcagtgcctctacagatggccaagttatgtggtgggacatcaggaagatgtcagagcccacagaagtagtcatattggacattacaaagaaggaacagctggagaatgctctgggtgcgatctctctggagtttgaatcgactctgccgactaagtttatggtcgggactgaacaggggatcgtgatatcatgtaaccggaaggccaaaacaagcgctgaaaagattgtctgtactttcccaggccaccacggcccaatctacgcactccagcggaaccccttttaccccaagaactttctgacagtgggtgattggacagcaagaatatggagtgaggacagtcgggagagcagtatcatgtggaccaagtaccatatggcctatctcactgacgccgcatggtccccagtccggcctacagtgtttttcacaactcgaatggacgggacactagacatatgggatttcatgtttgaacaatgtgacccaactttatctttaaaggtgtgcgacgaggcactcttttgcctgcgggtgcaggacaatggctgcctaatagcctgtgggtctcagctgggtaccaccacactcctcgaggtcagtcctggcttgtctactttgcagagaaacgagaagaatgtggcctcatcaatgttcgagcgggagactcgtagggaaaagatcctggaggcaagacatagggagatgcgtctcaaggaaaaggggaaggccgaaggcagggacgaggagcagaccgatgaggaactggcggtggaccttgaggcactcgtttctaaggccgaggaggagtttttcgatataatcttcgccgagttgaagaagaaagaggctgatgcaattaagctgacacccgttccccagcagccgagccccgaggaggaccaggtggttgaagaaggtgaggaggctgctggagaggagggggacgaggaggtagaagaagacttggcctag

SEQ ID NO: 186062 - DNA, 1818 bp, synthetic construct
  misc_feature 1..1818: note = Description of Artificial Sequence: Synthetic coding sequence
  source 1..1818: mol_type = other DNA
atggagatcgtgtacgtgtacgtgaagaagcggagcgagttcggcaaacagtgcaatttctcagataggcaagccgagttaaacattgatatcatgcccaatccagagctcgctgaacaattcgtggagaggaatccagttgatactggcattcagtgctccatatccatgagcgagcacgaagctaatagtgagcgttttgaaatggagactcggggtgtgaaccatgtggagggtggttggcctaaggacgtgaaccctctcgaactggagcagacaatccgctttcgtaagaaagtcgaaaaggacgagaattacgttaacgccattatgcagctagggagcattatggagcattgcataaaacagaacaacgccattgatatttatgaagaatactttaacgatgaggaggcgatggaagttatggaagaggacccttccgccaagacaattaacgtgttcagggatccccaagaaataaagcgggcagcgacccacctgtcctggcatccagatgggaaccgtaaactcgctgtggcttactcttgcctggacttccagagagcaccggtcggtatgtcctcagactcgtatatatgggacctggaaaacccaaacaagccagaactcgccctgaagcctagcagcccactggtgaccctcgagttcaatcctaaagattctcacgtgcttctgggcggatgttacaacggacagattgcctgctgggataccaggaaaggcagtctggtagctgagctgtcaaccattgaatcgtcgcaccgtgacccagtgtacgggacgatctggttgcagagtaaaacaggcactgaatgcttcagcgcctcgactgatggtcaggtcatgtggtgggacattcgaaagatgagtgagcccaccgaagtcgtaattttggatatcaccaagaaagagcagttagaaaatgctttaggcgcaatcagcctggaattcgagagtacattgcctaccaaatttatggtgggcacagagcaagggatcgtcataagttgcaaccgaaaggccaaaacctctgccgagaagattgtgtgtacctttcccgggcaccacggccctatctacgcgttgcaacgaaatccattttaccccaagaacttcctgaccgtgggagattggaccgcaagaatttggtccgaggacagtcgcgagtcaagcattatgtggaccaagtaccacatggcctacttaacagatgcagcatggtcaccagtccggccaacggtcttcttcaccacccgaatggatggaacactcgatatttgggattttatgttcgagcagtgcgacccaaccctcagcctcaaggtttgtgatgaggctttgttctgtttgcgggtgcaggataacggctgcttgatcgcctgtggctcccaattgggaactacgaccctgttggaggtgagcccaggactctccactctacagcgaaatgaaaaaaatgtggcaagcagcatgtttgaaagggagacccgtcgggaaaagattttagaagctcgccaccgtgagatgcgtctgaaagagaagggcaaagctgaaggacgagatgaagagcagacggatgaagaactggctgtggatttagaagccctggtgagcaaggcagaggaggaattctttgacattatcttcgcagagttgaaaaagaaagaggcagatgcaatcaaacttacccccgtccctcagcaaccctcaccagaagaggaccaggttgtggaagagggcgaggaagccgctggcgaagagggagatgaagaagttgaagaggacctcgcttag

SEQ ID NO: 186063 - DNA, 234 bp, synthetic construct
  misc_feature 1..234: note = Description of Artificial Sequence: Synthetic coding sequence
  source 1..234: mol_type = other DNA
atgaagaagctgaagatcctgtacatgagcaacaacctggtgaaggattgggccgagttcgtgaagctggccgaactgccttgccttgaggatttagtgtttgtggggaacccattagaagagaagcactcggccgaaaataactggatcgaagaagctacaaaacgcgtgcccaagctcaaaaagctcgacggcacgccggtaatcaaaggggacgaagaggaggataattag

SEQ ID NO: 186064 - DNA, 456 bp, synthetic construct
  misc_feature 1..456: note = Description of Artificial Sequence: Synthetic coding sequence
  source 1..456: mol_type = other DNA
atggacgccagcctgagcatgctggccaactgcgagaagctgagcttatcgacaaactgcattgagaaaattgccaatttgaacggactgaagaacctaaggatcctgtctctgggtaggaacaatatcaaaaatctgaacgggttggaggcagttggggacacactggaagaactctggatttcgtacaactttatcgagaagttgaagggtatacacatcatgaaaaagctcaaaattctttacatgagcaataacttagttaaagactgggccgagtttgtcaagctggcagaattgccttgtctcgaggacttagttttcgtgggtaaccccttagaagaaaagcactctgcggagaataactggatagaggaggccactaaacgcgtgccaaagctgaagaagctggacgggacaccagtgatcaaaggcgacgaggaagaagataattag

SEQ ID NO: 186065 - DNA, 573 bp, synthetic construct
  misc_feature 1..573: note = Description of Artificial Sequence: Synthetic coding sequence
  source 1..573: mol_type = other DNA
atggccaaggccaccaccatcaaggaggccctggcccggtgggaggagaagacagggcagaggccctctgaggccaaggagatcaaactatacgcacagattcctcccatagaaaagatggatgcttcactttcaatgctcgctaattgcgagaagttgagcctgtccaccaactgtattgagaagatagcaaacctgaatggccttaagaacctgagaatcctctccctcggtcgcaataacattaagaacctgaacggactggaggctgttggtgacaccctcgaggagttatggataagttataattttatagaaaagctgaaggggattcacattatgaagaagctcaaaatactctatatgtctaataatttggtgaaggattgggctgagttcgttaaactcgctgagctgccctgcctggaggaccttgtgtttgttggcaatcccttggaagaaaaacattccgccgagaataattggatcgaagaagccactaagagggtgcctaaactcaagaagttggacgggactccagtgatcaaaggggatgaagaggaggacaattag

SEQ ID NO: 186066 - DNA, 174 bp, synthetic construct
  misc_feature 1..174: note = Description of Artificial Sequence: Synthetic coding sequence
  source 1..174: mol_type = other DNA
atgaagaagctgaagatcctgtacatgagcaacaacctggtgaaggactgggccgaatttgtgaagctggcagagctcccttgtctggaggatctcgtctttgtgggcaatcctttggaggaaaagcattccgcagaaaacaactggatcgaagaggcaaccaagcgcgtgtag

SEQ ID NO: 186067 - DNA, 456 bp, synthetic construct
  misc_feature 1..456: note = Description of Artificial Sequence: Synthetic coding sequence
  source 1..456: mol_type = other DNA
atggacgccagcctgagcatgctggccaactgcgagaagctgagcctgtctacaaactgcatcgaaaaaattgctaatctgaatgggctaaagaacctgaggatactctccttggggcggaacaacattaagaatctaaatggtcttgaagctgtaggggacacacttgaagagctttggataagctataactttattgaaaaactgaaaggaattcacatcatgaagaaacttaagatactgtacatgtccaataacctggtgaaggattgggccgagtttgtaaaactcgcggaactcccatgcctcgaagacttggtgttcgtaggcaaccctctcgaggagaagcacagcgccgaaaacaactggatcgaggaagccactaagagagtccctaagctgaagaaattagacggcacgccagtcatcaagggagacgaggaggaggataactag

SEQ ID NO: 186068 - DNA, 195 bp, synthetic construct
  misc_feature 1..195: note = Description of Artificial Sequence: Synthetic coding sequence
  source 1..195: mol_type = other DNA
atgaagaagctgaagatcctgtacatgagcaacaacctggtgaaggattgggcagaattcgtgaagttggccgaactgccatgtctcgaagatctagtcttcgtagggaatccactcgaggagaagcacagcgctgaaaataactggatcgaggaagcaaccaaaagagtgccaaagctcaagaaactggactag

SEQ ID NO: 186069 - DNA, 159 bp, synthetic construct
  misc_feature 1..159: note = Description of Artificial Sequence: Synthetic coding sequence
  source 1..159: mol_type = other DNA
atggacgccagcctgagcatgctggccaactgcgagaagctgagcctgtcgacaaattgcattgaaaaaatagccaatcttaatggcttaaaaaacctcagaattttgagcttgggtcgcaataacattaaaaacctcaacggactggaggcagtctag

SEQ ID NO: 186070 - DNA, 198 bp, synthetic construct
  misc_feature 1..198: note = Description of Artificial Sequence: Synthetic coding sequence
  source 1..198: mol_type = other DNA
atgaagaagctgaagatcctgtacatgagcaacaacctggtgaaggactgggccgaatttgtcaagttggctgagctgccctgcctggaggacctggtcttcgttggcaatcccctcgaggaaaagcactcagccgaaaataactggattgaagaagctacaaagagggtgcccaaattgaagaagctcgacggatag

SEQ ID NO: 186071 - DNA, 843 bp, synthetic construct
  misc_feature 1..843: note = Description of Artificial Sequence: Synthetic coding sequence
  source 1..843: mol_type = other DNA
atggtgaccgccaacaaggcccacaccggccagggcagctgctgggtggcaacactggcgagcgcaatgatccctcctgctgatagcctgcttaaatacgacactccagtcctggtgagccggaacacagagaagcggtcacccaaagcgagactgctgaaggtgtccccgcagcagcccgggccctctggctcagctcctcagcccccgaagaccaagctccctagcacaccatgtgtcccagacccaacaaagcaggccgaagagatcttgaatgccatacttccacctagagaatgggtcgaagatacacagttatggattcagcaggtgtccagtacccccagtacaaggatggacgtggtgcacttgcaagagcaactagatctgaaactgcagcagcgccaagcccgtgaaactggcatatgtcccgtccggagggaactgtattctcagtgcttcgatgagcttatcagggaagttacgattaactgcgctgagagaggcttgctgttgctgagggtacgcgatgagatccgtatgacaatcgccgcctatcaaacgttatacgagtcctcagtcgccttcggcatgcggaaggccctgcaggctgaacagggaaagagtgacatggagcgtaaaatcgctgagttggaaacagaaaaaagagatttggagagacaagtgaacgaacaaaaagcaaaatgcgaggccaccgagaagcgggagtcagaacgtaggcaggtcgaagagaaaaaacacaacgaagaaatccaatttctcaaaagaacaaatcaacagcttaaagctcagctggaaggtatcattgccccgaaaaagtag

SEQ ID NO: 186072 - DNA, 399 bp, synthetic construct
  misc_feature 1..399: note = Description of Artificial Sequence: Synthetic coding sequence
  source 1..399: mol_type = other DNA
atgccctactacccccaggacgagctgatccgggaggtgaccatcaactgtgctgaaaggggcctgttgcttctgagggtgcgcgatgagatccgaatgaccattgcagcttatcagacactgtacgagagttccgtggccttcggaatgcgtaaggctctccaggctgaacagggtaaatcagatatggaaaggaagatcgcagagctggaaacggaaaaacgcgacctggagcggcaggtaaatgagcagaaagccaaatgcgaggcgaccgaaaagagagagagcgaacggcgccaggtcgaagagaagaagcacaatgaggaaattcagttccttaaaagaacaaaccagcaactcaaggcacagcttgaaggcattatcgctccaaaaaagtag

SEQ ID NO: 186073 - DNA, 13941 bp, synthetic construct
  misc_feature 1..13941: note = Description of Artificial Sequence: Synthetic coding sequence
  source 1..13941: mol_type = other DNA
atgagcgagcccggcggcggcggcggcgaggacggcagcgccggccttgaagtctccgctgtacagaacgttgcggacgtctccgtgctacagaagcacttaagaaaattggtaccccttttgctggaagacgggggcgaagcccctgcggccctagaggcagcactcgaggagaaatctgcgttagagcagatgaggaaattcttgagtgacccacaagtccatacggtgcttgtggagcgctctacacttaaggaggacgtcggggatgaaggcgaagaagagaaggaattcatctcatacaacataaacattgacatccattacggcgtcaaaagtaattctttggcctttattaagcgcacaccggtcatagacgctgataagcctgttagctcccagcttcgagtgctgactctctctgaggacagcccctacgagacactccatagttttataagcaatgctgtggctcctttttttaaatcttatattagagagtctgggaaggcggaccgggacggtgacaagatggcccctagtgtggaaaagaagattgctgagctggaaatgggcctgctacatctccaacagaacatcgaaattccagagatctcactgcctatccaccctatgatcacgaatgttgccaaacaatgctatgagaggggtgagaaacccaaggttaccgatttcggcgacaaggtagaggaccccacatttcttaatcaactgcagtctggagtgaaccggtggatccgcgagatacagaaggtgaccaaactcgatagagatcctgcaagcggcaccgccctgcaggaaatatcattttggctgaatttagaacgggctttgtacagaatccaggaaaagagggagtcccctgaggttcttctgacgctggacatcttgaaacacggtaagcggttccacgccacagtcagcttcgacaccgacaccggtctgaagcaagcactggagacagttaatgattacaatccgctcatgaaagatttcccactgaatgaccttttaagtgcaacagagctagataaaattcgtcaggcactggtggctatttttactcacctcagaaagatcagaaacacgaagtacccaatccaacgggctctgaggctcgtcgaagcaattagtcgggatctttcctctcaactgttgaaggtgctaggaacaaggaagctcatgcacgtagcatacgaggagtttgaaaaggtcatggtggcctgcttcgaggtgtttcagacatgggatgacgaatatgaaaagttgcaagtgcttttacgtgacattgtaaaacgtaaacgggaggagaaccttaagatggtttggagaattaaccctgcccaccgcaagctccaggctcggctggatcagatgcggaagtttcggcgccaacacgagcagctgcgtgctgtaatcgtacgcgtgctccggccccaggttaccgccgttgcccagcagaaccagggggaggtgccagagccgcaagacatgaaagtggcagaggtcctgttcgacgctgctgacgccaacgcgatcgaagaggttaatttggcatacgaaaacgttaaggaggtggatggcttagatgtctccaaggaggggactgaagcatgggaagccgcaatgaagcggtacgacgagcgcattgaccgggtcgagactcgcatcactgccaggctgagggaccaacttggtactgccaaaaatgcaaacgagatgttcagaatatttagcagattcaacgccctgttcgtgcgaccacacatcagaggggcaatcagagaataccagacacaattgatccagcgggtgaaagacgacatcgagtcccttcacgataaatttaaggtgcagtatccccagtcacaggcctgtaaaatgtcacacgttcgcgacctgccacctgtgtctggaagcattatctgggcgaagcagatcgatagacagctcaccgcctacatgaaacgggtggaggatgtcttggggaaagggtgggagaaccacgtggaggggcaaaagctgaagcaggacggagactcttttcgaatgaagctaaacactcaagagatttttgacgattgggcacggaaggttcagcagaggaacctgggtgtgtccggccggatatttaccatcgagagcaccagagtcaggggtaggaccggaaacgtcttgaaactgaaagtaaattttctgcccgaaatcatcacactgagtaaggaggtgcgtaatctgaagtggctgggtttcagggtccccctggccattgtgaataaggctcaccaggctaatcagttgtatccttttgccatctccttaatcgaatctgtccgtacttatgagcgcacttgtgagaaggtggaggagcggaacactattagcctcctcgtcgccggattaaagaaggaggtccaggcgttgatcgctgagggtattgcattggtgtgggagtcatacaagctggatccctatgtgcagaggctcgcggaaaccgttttcaatttccaggagaaagtcgatgacctcctcatcattgaggaaaagattgacctggaggtgagaagcctggagacgtgtatgtacgaccataagacattctctgagattttgaatagagtccagaaagccgtcgacgacctgaatcttcattcttatagcaatcttccaatttgggtgaataagctggatatggagatcgagaggatcctgggagtccgactgcaagcgggcttgagagcttggacacaagtcctgctcgggcaagccgaagacaaagctgaggtggacatggatacagacgccccccaggtcagccacaagcccggcggggagcccaagatcaagaatgtggtccatgagctacggattaccaaccaggttatttacctgaacccacccatcgaggaatgtcggtataagctgtaccaggagatgttcgcatggaagatggtcgtgctatctttgcctcggatccaatcccaacggtaccaagtcggggtgcactacgagcttactgaagaagagaagttctacagaaatgctctgacacggatgcctgatggacccgtcgctcttgaagaaagctattccgcagtgatgggtatcgtctcagaagtggagcagtatgtgaaggtctggttgcaatatcagtgcctatgggacatgcaggcagagaatatttataaccgtttaggggaggatctgaacaagtggcaagccctgcttgttcagattcggaaggccagaggtactttcgataacgccgagactaaaaaggaattcggaccagtggtgattgattatggcaaagtgcagtccaaggtgaatctgaaatatgattcgtggcataaggaggtgctttcgaaatttggacaaatgctcggatctaatatgacagaatttcattcccagatcagcaaatcccggcaagaactggagcagcatagcgtggataccgcgtctacaagtgacgccgtgacttttattacctacgttcagtcgttgaaacgaaagatcaaacaattcgaaaaacaagtcgagttgtaccgtaatggtcagcgcctgctcgagaaacagcgcttccaatttcccccttcttggctgtacattgataatatcgagggggaatggggggcgttcaacgatatcatgaggcgcaaagattctgccatccaacagcaggtcgccaacctgcagatgaagattgtccaggaagatcgggccgtggagagtcgaaccaccgaccttctcacagactgggaaaagacgaagccagtgactggcaatctacggccagaagaagccctgcaggcactgacaatatacgagggaaagttcggaaggcttaaagatgacagagagaaatgtgccaaggcaaaggaagctttagagctgactgatacaggcctgctcagcggcagcgaagagagagtgcaggtcgccctcgaggagctgcaggatctcaagggcgtgtggtcggaacttagcaaagtatgggaacagatagatcagatgaaagagcagccatgggtgtccgtgcagccccgcaagcttaggcagaacttggacgcccttctgaaccagctgaaatccttccctgctagactgaggcaatacgcgagctacgagtttgtccaacgtctgttgaaggggtatatgaaaatcaatatgcttgtgatcgagctgaaaagtgaagccctaaaagatcggcattggaaacaattaatgaagcggttgcacgtgaactgggtggtcagcgagctcactctcgggcagatttgggacgtcgacctgcagaaaaatgaagccatcgtgaaggacgtgctgctcgtggcccaaggcgagatggctctggaggaatttctgaaacaaattagggaggtgtggaatacctatgaactggacttagtgaattatcaaaacaagtgtcgcttgatcagggggtgggacgacctgttcaataaagttaaagagcacatcaactccgtgtccgccatgaagctgagcccatattataaagttttcgaagaggacgctctcagctgggaggacaagctcaatagaatcatggcactcttcgatgtctggattgatgtgcagcgacggtgggtgtatcttgagggcattttcacaggaagtgcggacattaaacacttactgcccgtcgaaacacaaaggtttcagagcatctcaaccgaatttttagctctgatgaagaaagtttcaaagtcacctctggtaatggatgtcctaaatatccagggagtgcagaggtcgcttgaacgtctggccgacctcttgggaaaaatacaaaaggccttgggcgagtacctcgaacgggagaggtcttcctttcctaggttctatttcgtcggagacgaggatctgctggaaatcattgggaacagcaaaaacgtggctaaactgcaaaaacactttaaaaagatgtttgctggcgtcagctcaatcatcctgaacgaggataatagcgtggtcctcggcatttcaagcagggaaggcgaggaagttatgttcaagacccctgtgtcgataactgaacacccaaagattaacgagtggctcaccttagtggagaaagagatgcgtgtgacgctcgcaaagctattagcagagagtgtgactgaggtggaaatcttcgggaaggctacttctattgaccctaatacctacatcacctggatcgacaaataccaagctcagctggtagtgctgtccgcccaaattgcatggtccgagaacgttgagacggcactctcaagcatgggagggggaggcgacgccgctccactgcatagcgtgctcagtaatgtggaggtgactctcaacgtgcttgccgactctgtgctcatggagcagcctcctctgcgcagacgaaagctggagcacctgatcactgagctcgtccaccagcgggatgtgactaggtctttaatcaagtctaagattgataacgctaaatctttcgagtggctttcgcagatgcgattctacttcgatcctaaacaaaccgacgtcttgcaacagctgtcaattcagatggctaatgccaaatttaattatggctttgagtacctgggggtccaggacaagctagtccagactccccttacagatcgatgttatctgacaatgacccaggcactcgaagctcgccttggggggtctccatttggaccggccgggacaggaaagacagaaagtgtcaaagctctcggacatcagctgggtagattcgtgctagtcttcaactgcgatgaaaccttcgatttccaggctatggggcgcattttcgtgggcctgtgccaggtgggcgcgtgggggtgcttcgacgagtttaatagactggaggagcgtatgctgtctgccgtgagccagcaagtacagtgtattcaagaggcactacgcgagcattccaaccctaactacgacaaaactagcgcacccatcacctgcgagctgctaaataaacaggtgaaagtgagccctgacatggccatcttcataaccatgaaccccggatacgccggccggtcaaatctgcctgacaacctgaagaaactctttcgtagcctggccatgaccaaacccgaccggcagctgatcgctcaggtgatgctgtactctcaggggtttcgcaccgcggaagtgcttgccaataaaatagtcccttttttcaaactctgcgatgaacaactttccagtcaaagtcattacgattttggattgagagccctcaaatctgtgcttgtgtccgcgggcaacgtaaagagggaacgaatccagaagattaagcgggaaaaggaggaaaggggggaggcagttgatgagggcgaaattgccgagaatctgccggagcaggaaatcctgattcagagtgtgtgtgaaacaatggtgccgaagctggtagcagaagacataccactcctttttagcctactgagcgatgttttcccaggagtacagtatcatcgcggggagatgacagccctgagagaggagctgaaaaaagtgtgccaggaaatgtacctcacatatggcgatggcgaagaggtcggtggcatgtgggtagagaaggtgctgcaactgtaccagatcacccagatcaaccatggcctgatgatggtcggaccctcggggtccggtaagtccatggcttggagagtgctgctgaaagctttggagagactagaaggggtggaaggcgtcgcccacattatcgatccgaaggcaataagcaaagaccatctctatggcactctggatcccaacacccgcgagtggacggacggactctttacccatgtcctgcgcaaaatcatcgactccgttagaggtgagcttcagaagcgccagtggatcgtgttcgacggagatgtggacccagagtgggttgagaatttaaacagcgtcttggacgacaacaagctcttgaccctcccaaacggggaacgtctgtcgctgccacccaacgtccgtattatgttcgaagtgcaagatctcaagtacgccaccctggctacagttagcagatgcggcatggtatggttctcagaggacgttctgtccacagacatgatcttcaataatttcctagcgcggttgcggtctattccattagatgagggggaggacgaggctcagcgaagacgtaaaggcaaagaagacgagggggaggaggccgcctcaccaatgctccagatacaacgggacgccgcaactatcatgcagccctacttcacgagcaacgggctggtgaccaaggctctcgaacacgccttccaactcgagcacatcatggatttaacacggctgcgctgcctggggagcctattctctatgctccatcaggcctgcaggaatgtggcacagtacaatgcaaaccaccccgatttcccaatgcagatagaacaactcgaaagatatatacagagatacctcgtatatgcaatactctggagcctgtcaggggactctcgcctcaaaatgagggccgagttgggagaatacattagacgcatcactacagttcccctaccgaccgctcctaacattcctattattgactacgaggtgagcattagtggagagtggtccccgtggcaggcgaaagttcctcagatcgaggtagagacccacaaggtcgctgcgccagatgtcgtagttcccaccctggacacggtcaggcacgaagcgttactgtacacttggcttgctgaacacaagccgctcgtcctttgtggcccgccagggtccggtaagacgatgacactgttctccgccctgcgagccctgccagacatggaggtcgtcggtcttaacttctccagtgcaaccacgcctgaactgctactcaaaacctttgatcattattgtgagtaccgtaggacccctaatggagtggttcttgcgcccgtccaactggggaagtggctcgtgctattttgcgacgagattaacctgcctgatatggataaatatggcacccaacgcgttatatcctttattcggcagatggtcgagcatggcggtttttacagaacctcagaccagacctgggtcaagcttgagcggatacaatttgtcggcgcttgcaaccctcccacagatcccggaaggaagccgttatctcaccgattcctgaggcacgttcctgtagtctacgtggattatcccggtcccgcttcactgacccagatatatggaaccttcaaccgagcaatgcttagacttatcccatctctgagaacatatgctgagccactaaccgccgcaatggtcgagttctatacaatgagtcaggaacgttttacccaagacacccagccgcattatatttacagtcccagggagatgactcggtgggtacggggaatcttcgaagcactgcgaccgctcgaaacccttccagtcgagggtctcatcaggatttgggctcacgaggcactgcgtctttttcaggacaggttggttgaagatgaagaacgccgatggaccgacgagaatatagataccgtcgcgttgaagcacttcccaaatatcgatagggaaaaagcgatgtcccgcccaattctctacagtaactggctttccaaagattacatacctgtggaccaggaagaattacgagattacgtaaaagcccgtctcaaagtattttatgaggaggaactggacgtgcccttagtgctgtttaacgaggttctggatcacgtactcaggattgacaggatctttagacagcctcaaggacatctccttcttattggcgtgagtggcgccggaaaaactactttgtcccgctttgtggcctggatgaacggactgtctgtctaccagatcaaggtgcataggaaatatactggcgaggacttcgacgaggatttgaggactgttttgagaaggagcggatgtaagaatgagaagatcgcattcatcatggatgagagcaacgtgctcgatagcggcttccttgaacgcatgaatactctgcttgcaaacggagaggtgccaggtctattcgagggagacgagtacgctactctgatgacccagtgtaaggagggcgcacagaaggagggactaatgcttgactcccatgaggaactgtataagtggtttaccagccaggtgataagaaacttgcatgtagttttcaccatgaacccttcaagtgagggcctcaaggatcgagcagccacctcccctgctttgttcaacagatgcgttttgaactggttcggagattggtccactgaggccctctaccaagttggcaaggaattcacatctaagatggatttagagaagcccaattacatcgtcccagactacatgcctgtcgtttatgataagttaccccagcccccttctcatcgcgaagctatcgtcaattcttgcgtgtttgttcaccaaacactacatcaggccaatgcccggctggctaaacgcggaggccggacgatggctattacccccagacactatctcgacttcatcaaccactacgccaacctcttccacgagaagcgatctgaactggaggagcagcaaatgcacctgaacgtcggactccggaaaattaaggaaacagttgatcaggtagaggaactgcggagagatctaaggatcaagtcacaagaactggaggtcaaaaatgcagccgctaatgataagctgaaaaagatggtcaaagaccagcaggaagccgaaaagaagaaagtgatgagccaggaaattcaggaacaattgcataaacagcaggaagtaattgccgataagcagatgtccgtcaaagaggacctggacaaggtggaaccagccgtcattgaagcgcagaacgctgtgaaaagtatcaagaagcagcatctggtcgaggtgaggagtatggcaaatccccccgccgcggtgaagcttgcccttgagagcatttgcctcctcttgggggagtcaacaactgactggaaacagatccgcagtatcattatgagggaaaactttattcccaccattgtgaatttctctgctgaggaaatttccgatgccatccgggaaaagatgaaaaagaattatatgagcaatcccagctataattacgagatcgtgaatagagcttccctggcctgtggtcctatggttaaatgggccatcgctcagctaaattatgctgatatgctgaagcgcgtggagccgcttaggaatgagctacagaagttagaggacgacgcaaaggataaccagcagaaggcaaacgaggtagagcagatgatcagagacctggaggctagtatcgccagatataaagaggaatatgcagtcctgatcagtgaggcacaggccataaaggccgatctcgctgctgtcgaggccaaggtcaaccggagcacggcccttctaaaaagcctctcagctgaacgtgaaagatgggaaaaaacctccgaaacatttaagaaccagatgagcaccatcgccggagattgcctgctttcagccgctttcattgcatacgcagggtactttgatcaacagatgaggcagaatctgtttacaacgtggagtcaccatctgcagcaagctaatattcagttccggaccgacatagcaaggaccgagtacctgtctaacgctgacgaaagattaaggtggcaggcttcatccctgccggctgatgacctctgtaccgaaaatgctatcatgctcaagcgcttcaatcgctatccactgattatagacccctcaggccaggccacggaatttattatgaacgaatacaaggaccggaagatcacccgtacgtcattcctggatgacgcattccggaaaaacctggaatccgccttacgatttgggaacccacttctcgttcaggatgtggagtcctatgacccggtgttgaatccggtacttaaccgagaggtccggcgtactggcggaagagtgctcattaccctcggcgaccaagacatagatttatccccatctttcgtaatcttcttatctacaagagatcccacagtggagttcccacccgatctctgtagtagagtgacattcgtcaatttcaccgtgactcggtctagccttcagagccaatgtctgaatgaggtcctcaaagctgagcggcccgatgtggacgaaaagagaagcgatttactcaagctgcagggagagtttcagctcagattgcgccaacttgagaaatctctcctgcaggcactgaatgaagtgaaaggacggattcttgacgatgacaccattattactacactcgagaatttgaaaagagaagccgctgaagtgacaaggaaagtggaagagaccgatatagttatgcaggaagtggagacggtatcacagcaatatctgcctttgtccaccgcctgttcaagcatttactttacaatggagagcctgaagcagattcacttcctgtatcaatactcactgcaattctttctggacatataccataacgtgctgtatgaaaaccccaatctgaagggcgtgaccgaccacacgcagaggctgtccattattaccaaagatctgtttcaggtggcattcaacagggttgctcggggtatgctgcatcaagaccacattaccttcgcaatgctgctagctcggatcaaattgaaagggaccgttggcgagcctacatatgacgccgagtttcagcacttccttagaggcaatgagatcgtcctcagcgccggcagcacccctcgaattcagggccttaccgtagagcaggcagaagcggtcgtgcgcctcagctgtctccctgcttttaaggacttaattgccaaggttcaggccgatgagcaatttgggatttggctcgattctagcagtcctgagcagaccgttccctacttatggagcgaggaaacccccgccacccccattggacaggcaatccatcgtctcttactaatccaagcttttagacccgaccgactcctggccatggcccatatgtttgtttcgacaaatcttggagagagcttcatgtcaattatggaacagcctttggacctgacacatatcgtaggcaccgaggttaaacccaataccccagtcctgatgtgcagcgttcctgggtacgatgcctctggccacgtagaagacttggctgcggagcagaacacccaaattaccagtattgccattggtagtgctgaagggtttaatcaggcggataaagctatcaatactgccgtgaagtcaggaaggtgggtaatgctcaaaaacgtccaccttgcgccaggctggctgatgcaacttgagaagaagctgcactctctgcagccccacgcctgttttaggctgtttcttacaatggagatcaaccctaaagtcccggtgaacctgcttagggctggcaggatattcgtgtttgagccacctccaggtgtcaaggccaatatgttacgcacattctctagcatccccgtttccagaatctgtaaaagccccaatgagagggctcggttatatttcctcttagcctggtttcacgccatcattcaggagaggctcagatatgctcctctcgggtggtccaagaaatacgagtttggcgagtccgatttgcgatccgcgtgcgacacagtggacacctggctcgatgatactgccaaaggcagacagaacatctcacctgataagatcccttggtccgctcttaagaccctgatggctcagagcatttatggtggccgcgtggacaacgaattcgatcaacgcttacttaacaccttcctggagcggcttttcacgactcgcagctttgactctgagttcaaactagcatgtaaagtggacggccacaaggatatccagatgcctgatgggataagaagagaagagtttgtccagtgggtggagctgttgcccgacacccaaacgccgagctggctcggactccccaataacgcagagcgcgtactgttaactactcagggcgttgatatgattagtaagatgctgaagatgcagatgctcgaggatgaggatgacttagcgtatgcagagaccgagaagaagacccggactgatagtactagtgacggcagaccagcgtggatgcgaactttgcacactacagcttccaattggttgcatctgatccctcagaccttaagccaccttaaacgaactgtagagaatattaaagaccccctgtttaggtttttcgagcgcgaggtgaaaatgggcgctaagctcctacaggacgttcggcaagatttagcagatgtggtccaggtttgcgaaggcaaaaagaaacagactaattatctgcgcaccctgatcaacgagttggtcaagggcatcctgccacgttcttggtcccactacactgtccctgctggtatgacagtgatccaatgggtttccgatttctcagagcgcattaagcagcttcaaaatattagtttggctgcagccagtggtggcgccaaggagttaaagaacatacacgtgtgcttggggggacttttcgtccccgaggcttacattacagccaccagacagtatgtcgcacaggctaatagttggtccctggaagaactgtgtctggaggtgaacgtgacaactagccagggcgctactttggacgcatgctctttcggggttacaggtctgaaactgcagggcgccacttgtaataataataaattatctttaagcaacgcaatctcaactgccctacccctcacacagctccgatgggtgaaacaaaccaatactgaaaagaaagcctcggtcgtgaccctaccagtgtacttaaatttcacccgagccgaccttatttttacagtggattttgaaatcgctaccaaggaagaccccaggtctttttacgaacgaggagttgcggtcctttgcacagagtag

SEQ ID NO: 186074 - DNA, 1899 bp, synthetic construct
  misc_feature 1..1899: note = Description of Artificial Sequence: Synthetic coding sequence
  source 1..1899: mol_type = other DNA
atgagcgacaagagcgagctgaaggccgagctggagcggaagaagcagcgccttgctcagattagagaagaaaaaaagagaaaagaagaagagcgtaagaagaaagagactgatcagaaaaaggaagctgtggccccagtgcaggaggaatctgacctggaaaagaagcgcagagaggccgaggcacttttgcagagcatggggttgacaccggagtctcctatcgtgccgccccccatgtccccgtcttcgaagagcgtctccactcccagcgaggccggcagtcaggattcaggcgatggtgcagtaggttctcgaactttacactgggacaccgacccgtctgtgctccagctacattccgatagtgacctggggcgcggccctataaaactggggatggctaagatcacacaagttgactttccaccacgagaaatagtgacctacaccaaagaaactcagactccagttatggcgcagccaaaggaagatgaggaagaggacgacgacgttgttgcccctaagccccctatcgaaccagaagaagagaagacattgaaaaaggacgaggagaacgactccaaggccccaccccacgagctgaccgaggaggagaagcaacagattctgcattcggaggaattcctgtctttcttcgaccacagcaccaggatagttgaaagagctctgtcagaacagattaatatcttcttcgactacagcggccgcgaccttgaggataaagaaggcgaaattcaggcaggcgccaaactgagtctgaatcgccagttttttgacgaaagatggtccaagcatcgggtggttagttgtctggactggagttctcaataccctgagttactggtggcttcatacaacaataacgaggatgccccccacgaacccgatggagtggcactagtttggaacatgaaatataaaaaaaccacacccgagtacgtcttccactgccagagtgctgtcatgtctgcaaccttcgccaaatttcatccaaaccttgtggtgggaggtacatactctgggcaaattgttctatgggacaacaggtccaacaaacggaccccggtacagcggacccccctgagtgcagccgcgcatacacacccagtatactgcgtaaatgttgtcggtacacagaacgcccataacttgatcagcataagtacagacggcaagatctgtagctggtccttagatatgctctcacatccccaggatagcatggaactcgtccacaagcaaagcaaagccgtcgctgtaacgagcatgagtttccccgttggtgatgtgaataattttgttgtgggcagtgaagagggtagcgtctacaccgcttgtcggcacggatccaaagctggcatatccgaaatgtttgaaggtcatcagggacctatcactggtatccattgtcatgctgctgtgggagctgtggacttttcccacctgtttgtgacctcatcattcgattggaccgtaaagctgtggacaactaagaacaataaaccactatattctttcgaggataatgcggattacgtgtacgacgtcatgtggtctcctactcatcccgccctcttcgcctgcgtggatggcatggggaggctggacctgtggaacctcaataatgatacggaggtgcccaccgccagcattagtgtcgaaggcaacccagcattgaaccgcgtgcggtggacacacagcggccgggagattgcagtgggcgactcggagggacagatagtgatctacgacgtgggcgagcagatcgctgtgccaagaaacgacgagtgggcaagatttgggagaaccctcgctgagattaacgccaacagagccgatgccgaggaggaggccgccaccaggatccctgcatag

SEQ ID NO: 186075 - DNA, 1839 bp, synthetic construct
  misc_feature 1..1839: note = Description of Artificial Sequence: Synthetic coding sequence
  source 1..1839: mol_type = other DNA
atgagcgacaagagcgagctgaaggccgagctggagcggaagaagcaaagattggcacagatcagagaggagaaaaaacgaaaagaagaagagcggaagaagaaagaaacggatcagaagaaagaagcagttgcgccagtgcaggaggagtcagacttagagaagaagcggagggaggctgaggccctcctccaatccatgggcctgacgccagaaagtcccatcgtccccccccctatgtcacccagttcaaagtcagtcagcactccatcggaggctggaagtcaagatagtggcgatggcgccgtgggcagtcgcagaggccccatcaaactgggtatggccaagattacccaagtcgactttcccccacgggaaattgtcacctacacgaaagagactcagaccccagttatggcacaacccaaagaagatgaggaggaggatgacgacgtggtggcccccaagccccctatcgaacctgaagaggagaaaacactgaagaaggatgaggagaacgattctaaggcgccaccacatgaacttaccgaggaggagaagcagcaaattttgcactccgaggaatttcttagcttcttcgaccatagcacccggatcgttgaaagagctctaagtgagcagattaacattttcttcgattatagcgggagagatctcgaggataaggaaggagagatccaggcaggagcaaaactgtcccttaatcgccaatttttcgacgaacgctggtcaaagcaccgggtcgtcagctgcctggattggtcttctcagtaccccgagttacttgtggccagttacaataacaacgaggacgctccccacgaacccgacggggtggccctcgtgtggaatatgaaatacaagaagaccacccccgaatacgtcttccattgccagtcagctgtgatgtccgccacgtttgccaagttccacccgaaccttgtagtgggaggcacttacagcggacagatcgtattatgggataatagatccaacaagcggacccccgtgcagcgaactccactttctgcagctgcacacacccatccagtgtactgcgttaatgttgttggcacacaaaacgctcataatctgatttcaatctctacagatgggaaaatctgtagctggtcactggacatgctttcacatccacaggacagcatggagctggttcacaaacagagtaaggcagtggcggtgaccagcatgtcgttccccgtgggggatgtcaataattttgtggttggaagcgaagagggcagcgtctacaccgcatgtaggcacggatcgaaggcagggatcagcgagatgtttgaagggcaccaggggccgatcacagggatccactgccacgccgccgtgggggccgtggatttttctcacctgtttgttacctcatcgtttgattggaccgtcaaactttggaccactaaaaataacaaacccttgtacagcttcgaggataatgcggactacgtgtatgacgtcatgtggtcaccaactcaccccgccctatttgcatgtgtcgacgggatggggagactggatctctggaatctgaataacgacacagaagtgcccacggcaagtatttcagtggagggaaatccagccctgaaccgagtgcgctggacacactctgggcgggagatcgcagtgggtgattctgaggggcagatcgtgatatacgacgtgggcgaacagattgccgttcctcggaatgacgagtgggccaggtttggcaggaccctcgcagaaattaacgcaaaccgagctgacgccgaggaggaagccgccacccgcatccctgcctag

SEQ ID NO: 186076 - DNA, 1893 bp, synthetic construct
  misc_feature 1..1893: note = Description of Artificial Sequence: Synthetic coding sequence
  source 1..1893: mol_type = other DNA
atgagcgacaagagcgagctgaaggccgagctggagcggaagaagcaacggctcgcacagatccgagaggaaaaaaaacgcaaggaagaggaaagaaagaaaaaggagacagaccagaagaaagaggccgtggcgcctgtgcaggaggaatcagatttagagaaaaaacgccgggaggccgaagctttgctgcagtcaatgggcctcacacctgagtcccccatagcagagcagcctctgcgcgtagttaccgcggacacctgcctttttcattatctggtgccaccccccatgagcccatcttccaaaagcgtgagcaccccttcggaggcggggagtcaggactccggagacggcgccgttgggagtcgtcgaggccctattaagttgggcatggccaagattacccaggtcgatttccctccacgcgagattgtgacgtacacaaaagaaacacagacaccagttatggcccagcctaaggaagatgaggaagaagacgacgacgtggtcgcccccaaacctcctatcgagcctgaggaagagaaaacactgaagaaagacgaagagaatgactccaaggcaccgcctcacgaactgacggaggaggaaaagcaacagatcctgcactcagaggaatttttgtccttctttgatcattcaaccaggattgtggagagagctctcagcgagcagatcaacatcttcttcgattactcaggtagggatctggaggacaaggagggtgaaatccaggcgggtgccaaactgtcactgaatcgccaattttttgatgaacgctggagcaaacacagagtcgtgtcgtgtctcgattggagcagtcagtacccagaattgctcgtggcctcttacaacaacaacgaggatgcccctcacgagcccgacggtgtcgcccttgtgtggaacatgaagtacaagaaaacgacccctgagtacgtctttcactgtcagagcgctgtgatgagcgccactttcgccaaatttcatccaaacctggttgttgggggcacctacagtggccagattgtgttgtgggataataggtctaacaagcgcacgcccgtgcaaaggacgcccctcagcgctgctgcccatacccaccccgtctactgtgtaaacgtcgtcggaacacaaaatgcccataacctgatctctatctccaccgacggtaaaatctgttcttggtctctggacatgctctcccacccgcaggattccatggaactcgtgcacaagcagagtaaagctgttgcagtaaccagcatgagctttcctgtgggagacgtgaacaactttgtcgtgggcagcgaggagggatctgtgtatacagcttgccgccacggctccaaggctggcatttcagaaatgttcgaaggacaccagggaccgatcacaggaatccattgtcacgcagctgtgggagctgtagacttttcacacctcttcgtcacctccagcttcgactggaccgtcaaactgtggaccaccaaaaacaataagcctctatactcgttcgaagataatgctgactacgtgtatgatgtcatgtggtctcctacacaccccgctctattcgcttgtgtagatggaatgggcaggctcgatctatggaatctgaacaatgacaccgaagtaccaacagcttccatatctgtagagggcaacccagcccttaatagggtgcgttggactcatagcgggcgcgaaatagcggtgggagatagcgaaggacagatcgtgatttatgatgtaggtgaacaaatcgccgtaccaaggaacgatgaatgggctcgatttgggaggaccctcgctgaaatcaatgctaatcgcgccgatgccgaagaagaagcagccactcgcattccagcctag

SEQ ID NO: 186077 - DNA, 1917 bp, synthetic construct
  misc_feature 1..1917: note = Description of Artificial Sequence: Synthetic coding sequence
  source 1..1917: mol_type = other DNA
atgagcgacaagagcgagctgaaggccgagctggagcggaagaagcaacgattagctcagattcgggaagagaagaagaggaaggaggaagagaggaaaaaaaaggagacagaccagaaaaaagaggctgtagccccagttcaggaagagagtgatctggagaagaaaagacgagaagccgaggcactgctgcagtctatgggcctgaccccggaaagcccaatagtcttttcagaatactgggtaccacctccaatgtctcccagtagtaagtctgtgagcacaccttctgaagccggttcccaggattctggtgacggagccgttggatcaagaacattgcactgggacaccgatcctagcgtcttgcaactgcattcagattccgaccttggtcggggccctattaaactcggcatggccaaaatcacccaagttgactttccacctagagagattgtcacttatacgaaagagacacagactccggtcatggcccagcccaaagaagatgaggaggaggatgacgacgtggtggctcccaaaccacccatcgaaccagaagaagagaagaccctgaagaaagatgaggagaacgattctaaggccccaccccatgagcttacagaagaggaaaaacaacaaattttgcatagtgaggagttcctgtctttcttcgatcattctacaagaatcgtcgaacgtgccctctccgaacagattaacatcttttttgattactccggcagagatctggaagacaaggagggtgaaatccaggcaggagccaagctgtcccttaatcgacaattttttgatgagcgatggtctaaacatagagtagtgtcctgcctggattggtcttcccagtaccctgagctactagtggcctcctacaataacaacgaggatgccccgcacgagcctgatggcgtcgcactagtgtggaacatgaagtataagaaaaccacaccggaatacgtgtttcactgccagtccgcagtgatgtcggccacatttgctaagttccatcctaacctggtcgtgggcggtacgtactccggccagatcgttctgtgggataatcgctcaaacaaacggacccctgtgcagcgaactccgctgtcagctgctgcgcacactcacccagtctactgtgtcaacgttgttggcacccagaacgcacataacctgatatctatttcgactgatggtaaaatatgctcttggtccctggatatgttatcacaccctcaagacagtatggagctggttcacaaacagtcaaaggctgtggccgtcacatcaatgtcgttccccgtgggggacgtgaataattttgtcgtggggtccgaagaaggttctgtgtacactgcttgtagacacggaagtaaagccggaatcagtgagatgtttgaaggccaccaaggacctatcacaggcatccactgccatgcagccgtcggagctgtggacttcagtcacctgtttgtgacctcaagcttcgattggaccgtgaagctgtggactaccaaaaataataagcccttatacagttttgaagataatgctgactacgtatatgacgttatgtggagccctacccaccccgcactttttgcctgtgtggacgggatgggcagactggacctgtggaatctgaacaatgacacagaagtacctaccgcatccatatcagttgagggcaaccccgcccttaaccgtgtcaggtggacacatagcggccgagagattgcagtgggagactcagaggggcaaatcgtgatctatgatgttggggagcagatcgccgtccccaggaacgatgagtgggcccgctttgggcgcactctggccgagatcaacgccaaccgggccgacgccgaagaggaggctgccacaaggatccccgcttag

SEQ ID NO: 186078 - DNA, 1839 bp, synthetic construct
  misc_feature 1..1839: note = Description of Artificial Sequence: Synthetic coding sequence
  source 1..1839: mol_type = other DNA
atgagcgacaagagcgagctgaaggccgagctggagcggaagaagcaacggctcgcacaaattcgcgaggagaagaagagaaaagaggaggaacgaaagaagaaggagaccgaccaaaaaaaagaggccgtcgcccccgtccaggaggaatctgacctggaaaaaaaacgccgagaagccgaagcactgctgcagtctatgggactgacacctgagtcccccattgtgcccccccccatgtcccctagcagtaaatcagtgtctactccgtcagaggctggctctcaggatagtggcgatggcgccgttggttctagacgcgggccgattaaattgggcatggcaaagattacacaggttgacttccctccacgcgagatcgtgacatataccaaggaaacccaaacccctgtgatggctcaaccaaaagaggatgaggaagaggatgacgacgtggttgctcctaagccaccaatagaacccgaggaagagaaaaccctgaaaaaggacgaggagaatgattccaaggcacccccccatgaactaaccgaggaagagaagcagcagattctgcattctgaggagtttctctcctttttcgatcactcgaccaggattgtcgagcgggctctatccgaacagatcaacatctttttcgactatagcggaagagatcttgaagataaggagggagaaattcaggcaggcgccaaactcagcctgaaccgtcaattttttgatgagcgctggagcaaacacagggtggtgagctgtcttgattggagctctcaatacccagagctgttagtggctagctacaacaacaacgaagatgctcctcacgaaccggacggggtggccctcgtctggaatatgaagtataaaaagaccacccctgaatacgtcttccactgccagtccgctgttatgtcagccacattcgcaaagttccacccaaatctcgttgtgggcggcacctactccggtcaaatcgtcctctgggataatcgttctaataagcgcactcccgtccaacgcacccccctgtccgctgctgctcacacacacccagtgtactgcgtgaacgttgtgggcacccaaaatgctcacaaccttatctcaatcagcacagacgggaagatctgctcctggagcttagacatgctgtcccatccgcaggattctatggaacttgtacacaagcaatctaaggctgtagccgtaacaagtatgagtttccccgtcggagatgtcaataactttgtagtggggagtgaggaaggatctgtctatactgcgtgtagacacgggtctaaggcagggatttctgaaatgttcgaaggtcaccagggccctattaccggaatccattgtcacgccgccgtaggtgccgtggacttcagccacctgttcgtgacgtcttcattcgattggacagtgaagctgtggactaccaagaacaataaacctctgtacagcttcgaggacaacgccgactacgtctacgatgttatgtggtctcctacccatccggctctgtttgcatgtgtggacggcatgggccgccttgatctctggaacctaaacaacgacaccgaggttccgaccgcctctatctcagtagaagggaaccccgcactaaatcgtgtgcggtggacgcactctgggagagaaattgcggtgggcgattctgaagggcagattgttatttatgacgttggcgaacagatcgccgtgcccagaaatgatgagtgggctcgtttcggacggactctggccgagataaatgctaatagagctgatgctgaggaggaggccgccacaaggataccagcatag

SEQ ID NO: 186079 - DNA, 1899 bp, synthetic construct
  misc_feature 1..1899: note = Description of Artificial Sequence: Synthetic coding sequence
  source 1..1899: mol_type = other DNA
atgagcgacaagagcgagctgaaggccgagctggagcggaagaagcagcggctcgcccaaattcgtgaagaaaagaaacgcaaggaggaagaacgaaagaagaaggagacggaccagaaaaaagaggcagtggcccccgtacaggaggaaagcgacctggagaagaagcgtcgagaggccgaagctctgctgcagagcatgggcctgactccggagtcacccatcgtgcctccacctatgtctccttcctcaaagtctgtgtcaactccttcggaagctggctcccaagactctggcgatggtgcagtgggaagtaggactctgcattgggacacagacccctccgtgctgcagctgcattccgactctgacttaggacgcggtcccattaaactcggaatggcgaagatcacacaagtggactttccaccccgcgaaattgtcacatacaccaaggaaacccaaaccccagttatggcccaaccaaaggaggacgaagaggaagatgatgatgttgtggcacctaaaccccccattgaacctgaagaagaaaaaacccttaagaaggatgaagaaaatgatagcaaagcgcctccccacgaactgacggaagaagagaagcaacagatcctgcacagtgaggagttcttgtctttttttgatcattcaacacgcattgtggagcgcgctttaagcgagcagatcaatatcttcttcgactactctggacgtgacctcgaagataaagaaggcgagattcaggccggggccaagctatcactcaatcgccaattcttcgacgagaggtggtcaaaacaccgggtggtcagttgcttagattggtcttctcaatatcccgagctcttagttgctagctataataataatgaggacgcaccccatgaacctgatggcgtggcgctggtgtggaatatgaaatataagaagaccacccccgagtatgtcttccactgccagtccgccgtgatgagcgctaccttcgcaaagtttcaccctaacctggttgttggcgggacctattccggtcagatcgtgttgtgggacaaccgctccaataaacggactccagtgcagagaacaccactttccgctgccgcacatacacaccccgtgtattgcgtgaacgtcgtaggcacacagaacgcccataacctgatatccataagcaccgacggcaaaatttgcagctggagcctggacatgctgtcccatccccaggattccatggagctcgtgcacaagcaaagcaaggcagttgccgtgacatcaatgtctttccctgtaggtgacgtcaacaatttcgtcgtcggttccgaagagggctccgtgtacaccgcttgtcgtcacggatctaaggctggcatcagcgaaatgttcgagggtcaccagggtcctattacgggaattcattgccacgctgcagttggagccgttgatttttcccacctgttcgtgacgtcctcattcgattggaccgtcaaactgtggacaactaagaacaacaagcctctatactcttttgaagataatgccgactatgtctacgatgtcatgtggagtccgacacacccagccttatttgcctgcgtggacggcatggggcgactggacctctggaatctaaataacgacacagaggtgcctactgcttctatatctgtggaaggtaatcccgccctgaatcgcgtccggtggacacacagcggtagagagatcgcagtcggcgacagcgagggccagattgtgatctatgatgtaggagagcagatcgccgtgccacggaacgacgaatgggctcggtttggaagaactctcgctgaaatcaacgcgaaccgagctgacgccgaggaggaggccgcgacgagaatccctgcctag

SEQ ID NO: 186080 - DNA, 1914 bp, synthetic construct
  misc_feature 1..1914: note = Description of Artificial Sequence: Synthetic coding sequence
  source 1..1914: mol_type = other DNA
atgagcgacaagagcgagctgaaggccgagctggagcggaagaagcagaggctggctcagatccgcgaggaaaaaaagcgaaaggaagaagagaggaaaaaaaaggagacagatcaaaaaaaagaagcggttgcccctgtccaggaggaaagcgatctcgagaagaaacggcgggaggccgaggcactgctacagtcaatggggctgacccccgagtcacccatcgttttctccgaatactgggttcccccccctatgagtcctagctcaaagtccgtctccacaccatcagaggccggatcccaggacagcggcgacggggcagtgggctcgcggactctccactgggataccgatccctctgtcctgcaactacacagtgattccgacttgggccgaggaccaataaagcttggaatggccaaaatcacccaggtggactttccacccagggagatagtgacatacacaaaagagacccagacgcccgtaatggctcagcccaaggaggatgaagaggaggatgatgatgtagttgcccctaagccgcccatcgagccggaggaagagaaaaccctcaaaaaagacgaagaaaatgatagcaaagcccccccgcacgagcttactgaggaagaaaagcagcaaatcctacattccgaggagttcctgagctttttcgaccatagcacaagaatcgttgagagagcactctcagaacagataaacattttcttcgactactcgggccgcgatctggaggacaaagagggggagattcaagctggagcaaaactgagcctgaatcgccagtttttcgatgaacgttggagcaaacaccgcgttgtctcatgcctcgactggagctctcaataccccgaactgttggttgccagctataacaacaatgaagatgctccccacgagcccgatggcgtcgccttagtatggaacatgaagtacaagaaaacaaccccagagtacgttttccattgtcaatccgccgttatgagtgctaccttcgcgaagttccacccaaatctggtggttggcgggacgtattctggccagatcgtgctctgggataatagatcgaacaaacgcactccagtacagaggacacctttgtctgccgctgcccacacccatccggtgtactgcgttaacgtggttgggacccagaatgcacacaatctgatcagtatatctacagatggcaaaatttgcagttggagcctggacatgttatcacatccgcaggacagtatggagttggtgcataagcagagtaaagccgtcgccgttacatcaatgtccttccccgtgggggatgtcaacaacttcgtcgtgggtagtgaggagggatctgtctataccgcctgtagacacggctctaaggctggcatctccgagatgttcgaggggcaccagggacccatcaccggtatccactgtcacgcagccgtgggtgctgtcgacttctcccatttgttcgtcacctcatcattcgactggacagtaaagctgtggactacgaagaacaataagccactgtattccttcgaggataacgctgactatgtctacgatgtgatgtggagccccactcatccagcgctgttcgcgtgcgtcgatggaatgggacgacttgatctttggaatttaaacaacgatactgaagtgccgacagcctcaatatcagtggagggtaaccccgcattaaacagggtgagatggactcactctgggcgcgagatcgcggttggtgactcagaaggacagatagtgatctacgacgtcggcgaaattgctgtgccgaggaacgacgagtgggcccgtttcggtaggacgctggccgaaatcaacgccaatcgcgctgacgccgaagaggaagctgccacccggattcccgcttag

SEQ ID NO: 186081 - DNA, 1917 bp, synthetic construct
  misc_feature 1..1917: note = Description of Artificial Sequence: Synthetic coding sequence
  source 1..1917: mol_type = other DNA
atgagcgacaagagcgagctgaaggccgagctggagcggaagaagcagcggctggctcagatccgggaagagaagaaaaggaaggaggaggagcggaagaaaaaagaaactgatcagaagaaagaggcggttgccccagtccaggaggagtccgatctggagaagaagaggagagaggccgaagccctgctgcaaagcatgggattaacgcccgaatccccgatcgtcttcagcgaatactgggtgcctccccccatgtctccgtccagcaaaagtgtgtctacaccctcagaggctgggtcacaggactctggtgatggcgcagttggcagccgaacactgcactgggataccgacccaagtgtccttcaactgcatagtgactcagatctcggcagagggccgattaaattaggcatggcaaaaattacgcaggtagacttccctccaagggagatcgtgacgtacacaaaggagacacagacacctgttatggcacagcctaaagaagatgaagaggaggacgatgacgtcgtcgctccaaagccacctatcgagcctgaagaggaaaagactctgaaaaaagatgaagaaaacgacagcaaagcgccaccgcatgaactcaccgaggaggagaagcaacagattcttcactctgaagagtttctgtcatttttcgaccactccacacggatcgttgagagagctttgagtgagcagattaacatctttttcgattactcaggccgggacctcgaggataaggagggggaaatccaggccggggcaaagctgtctttgaatagacagttctttgatgagaggtggagtaagcaccgcgtggtgagctgtctcgattggagctcccaatacccagagctgctcgtggcttcctacaacaacaacgaagacgctcctcatgaacctgacggggttgcgctggtatggaacatgaaatataaaaagactacgcccgagtacgtgttccattgccagagcgctgttatgagtgcgaccttcgcaaaatttcaccccaatctcgtggttggcggcacctatagcgggcagattgtgctctgggataataggtcaaataaacgtactcctgtacagagaacaccgctgagtgcagctgcccacacgcaccctgtctactgtgtcaacgtggtaggcacacaaaatgcccacaatctgatctcaataagcacagatgggaaaatctgctcctggtccctagacatgctgagtcaccctcaggacagcatggaactggtgcacaaacagagcaaggcagtggccgtaaccagcatgagttttccagtcggggatgtgaataactttgtcgtggggtctgaagagggatctgtgtacaccgcttgtagacatgggtctaaggccgggatatcagagatgtttgagggacaccaaggcccgatcacagggattcattgccatgctgccgtcggtgctgtcgatttttctcatctgttcgtcacctcatcattcgactggactgtcaagctgtggaccactaagaacaacaagccgttgtatagcttcgaagataatgcggactatgtttatgatgtcatgtggagccctacacatcccgccctcttcgcatgcgtggacggcatgggacgactggatttgtggaacctgaataatgacacagaggtacctactgcctctatctcagtggaaggcaatccagctttgaatagggtgcgttggacccactccggacgcgagattgcagtaggggattctgagggtcaaattgtcatatacgatgtcggtgaacagatcgcagtacctcgaaacgacgaatgggcccgtttcggcaggaccttggccgagatcaacgcaaacagagcagacgcagaggaagaggccgcaaccagaattccagcctag

SEQ ID NO: 186082 - DNA, 1836 bp, synthetic construct
  misc_feature 1..1836: note = Description of Artificial Sequence: Synthetic coding sequence
  source 1..1836: mol_type = other DNA
atgagcgacaagagcgagctgaaggccgagctggagcggaagaagcaaaggctcgcccagatacgtgaagagaaaaagaggaaagaggaggagaggaagaaaaaggaaactgatcagaagaaggaagcggtagcccccgtacaggaagagtccgatctggaaaagaagcgcagagaggccgaagctttgctccagagcatgggactgaccccggaaagtccaatagtgccaccccctatgtcacccagcagtaagtctgtgtccaccccttccgaggccggatcccaggattcaggagacggcgcggtaggcagccggagaggtccaatcaagctggggatggctaagataacacaggtcgattttcctccccgggagatcgtgacttacaccaaagagactcagacacctgtaatggcccagcctaaggaggacgaggaggaggacgacgatgtagttgcccctaagccgcctatcgagcctgaagaggagaagaccttaaagaaggatgaggagaatgattccaaggcgcctcctcacgagctcactgaggaggaaaaacagcagatcctccatagcgaagagtttctgtcatttttcgaccatagtacacgaatagtcgaacgcgctctcagcgagcagattaacatctttttcgattattccggcagggatttagaggataaagagggtgagattcaggccggagccaaattgagcctcaaccggcagtttttcgacgagcgctggtcaaaacatagggtggtgagttgcctggactggtctagccaatatccggaactgctcgtggcgtcatataataataatgaggatgccccccacgaacctgacggagtcgcactcgtgtggaacatgaaatataagaaaactacaccggagtacgtgttccattgccagagcgctgtgatgagtgccaccttcgcaaaatttcatccaaacctggttgttggcgggacatactccggacagattgtgctttgggacaacagatccaataaacgaacaccagtgcaacggactccgctctctgccgctgcacatacacacccagtttattgtgtgaatgtggtcggtacgcagaacgcacataatctaattagtatctcaaccgatgggaaaatttgctcttggagcttggatatgttatcccacccgcaagattctatggagctggtccataagcagtcaaaagccgtggccgtgaccagcatgtccttcccagttggagatgttaacaactttgtggtaggttccgaggaaggcagcgtgtacaccgcttgtaggcatgggagcaaggcaggcatctcagaaatgttcgagggacatcagggccccattacaggcatccattgtcacgccgctgtcggtgcagttgattttagccatctgtttgtcacaagtagctttgactggaccgtcaagttgtggacaacgaagaataataaaccactgtattcattcgaagataatgccgattacgtttatgatgtaatgtggagccctacacacccggccttattcgcctgcgtagacgggatgggaagactggacctgtggaatttgaataatgacaccgaggtcccaacggcctctattagcgtcgagggaaaccccgccctgaaccgcgttcggtggacgcacagcggtcgggaaatcgccgttggggattctgaagggcagattgtaatctacgacgtcggcgagattgccgtgccccgcaacgatgagtgggcgagattcggcagaaccttggctgaaataaacgccaatcgagccgatgctgaagaggaagcagcgacaagaatccccgcgtag

SEQ ID NO: 186083 - DNA, 1917 bp, synthetic construct
  misc_feature 1..1917: note = Description of Artificial Sequence: Synthetic coding sequence
  source 1..1917: mol_type = other DNA
atgagcgacaagagcgagctgaaggccgagctggagcggaagaagcaacggcttgctcaaattagggaagaaaaaaagcggaaggaagaggagaggaagaaaaaggaaaccgatcagaagaaggaggcagtggcacccgtgcaggaagagtccgacttggaaaaaaagaggagagaggctgaggctcttctgcagtccatgggcctgacccccgagagcccaatcgatatcgctgaataccttgtcccccctccgatgtcacccagcagtaagtctgtgagtactccgtccgaggctggttctcaggattcaggggacggggccgtgggatctcgcacactgcattgggatacagacccttccgttttacagttacactcggatagcgacctgggaaggggcccaatcaagctgggaatggctaagataacacaggtggattttccaccaagagagatagtgacctacacaaaagaaactcagacccctgttatggctcagccgaaagaggacgaagaagaagatgatgatgtggttgcacctaagccccccatcgagccggaggaagaaaagacactaaaaaaggacgaagagaacgactcgaaagctcctcctcatgaactaaccgaggaggagaaacagcagatcctgcactcggaggaatttttgtcattcttcgaccactccacacggattgtggaacgcgccctctcggaacagattaatatatttttcgactactctggtcgggacttagaagacaaagagggcgaaatccaggctggcgccaagctatccctcaacaggcagttcttcgacgagcggtggtctaagcaccgagttgtgagctgtttggattggtccagtcagtatccagagctattggtggccagttataacaataacgaggatgcacctcatgaacccgatggagtggcgctggtgtggaatatgaaatataagaagaccacgcccgaatacgtatttcactgtcagtccgccgtaatgtccgcaacctttgctaagttccaccctaacttagttgtaggcggcacctattcaggacagattgtgctctgggataataggagcaataaacgaacaccagttcagagaacccctctcagcgccgctgcccatactcatccagtttattgcgtcaatgttgtgggcacacagaatgctcacaacctgatatcaatttctacagatggcaaaatctgtagttggagcctggacatgctaagccaccctcaggactctatggagctcgttcacaaacagagcaaagcagtcgctgtgacctccatgtcgttcccagtgggcgatgtgaataatttcgtcgtagggagcgaggagggctctgtctatacagcctgtcggcacggttcaaaggccggcatttcagagatgtttgaaggccatcaaggacccatcactggaattcattgccacgccgctgtgggggccgtggattttagccatctgttcgtgacatcctcattcgattggacagtcaaactttggactacaaagaacaataagccgctgtattccttcgaggataatgcagattatgtttacgacgtcatgtggtcgccaacacacccagctctgtttgcttgtgtggacggaatgggtaggctcgacctgtggaatctgaataatgatacggaggtccccactgctagcatctcagttgagggaaatcctgccctgaaccgagtccgctggactcattctgggcgcgagattgcagtgggcgactctgagggccagatcgtaatctacgatgtgggagagcagatagcggtgccgagaaacgatgaatgggcccgttttggaagaaccctagcggagataaacgccaatagggccgatgctgaggaggaggcagctacaagaataccagcctag

SEQ ID NO: 186084 - DNA, 2763 bp, synthetic construct
  misc_feature 1..2763: note = Description of Artificial Sequence: Synthetic coding sequence
  source 1..2763: mol_type = other DNA
atggccaacggcaccgccgacgtgcggaagctgttcatcttcaccactacccagaactacttcggcttgatgagcgaactttgggatcagccactgctttgtaattgcctggaaattaataactttcttgacgatggcaatcagatgcttctcagagtgcaaaggtccgacgcggggatatccttttctaacaccattgaattcggcgacactaaggacaaagtcttagtgttctttaagctacggccggaagttattacagatgagaatctgcatgacaacattctcgtcagctcaatgctggagtccccaattagcagcctttaccaggccgtgaggcaggtctttgcaccaatgctcttgaaagatcaggagtggagcagaaacttcgaccctaaactccaaaaccttctctctgaattggaagccggcctaggaatcgtgctgaggagaagtgatacaaacctcaccaagctgaaatttaaggaggacgacaccagagggatactgacaccttctgatgagttccaattctggattgaacaggcccatcgcgggaacaagcagatctctaaagaaagggcaaattattttaaagagcttttcgagactatagcccgcgagttttataacttggattccctgagcctgttggaggtggtggaccttgtggagacaactcaggatgtggtggacgatgtgtggcggcagaccgaacacgatcactatcctgaatcccgcatgctgcatctactggatatcatcgggggctccttcggtcgtttcgtgcagaagaagctcgggactctgaatctttgggaggatccttactaccttgtcaaggaaagcctgaaggcaggtataagtatatgcgagcagtgggtaatagtttgcaatcatctgactgggcaagtgtggcaacgctacgttcctcacccatggaagaatgaaaagtattttcccgagacactcgataagctgggcaaaaggctggaagaggttctcgctattcgcactattcacgagaagtttctgtactttctgcccgcaagcgaggagaaaattatctgcttaacccgagtcttcgaaccatttacggggctgaatccagtacaatacaatccctacaccgagcccctctggaaggctgccgttagccagtatgagaaaatcatcgcccctgccgaacagaagattgcaggcaaactgaaaaactacattagcgagatccaagattcaccacaacagttgctgcaggcttttctgaagtacaaagaactggtgaagagacccacaattagtaaggaactgatgcttgagagggaaaccctgctagctaggctagtagactcaatcaaagactttcggctggattttgaaaaccgctgtcgaggtatcccaggggacgcatcaggtcccttatcgggaaaaaacctatctgaggtggtgaattctatagtgtgggtgcgccagctcgagttgaaagtcgatgacactattaagatcgccgaagctctgctgagcgacctgcctgggttccggtgttttcatcaaagcgctaaagacctactggaccagctcaagctgtatgaacaggagcagttcgacgactggtcacgggacatacagtccggcttgagcgatagtcgcagcggattgtgcattgaggcatccagcaggatcatggaactggatagcaatgacggactcctgaaagtgcactatagcgatcggctcgttattctcctgcgggaagttagacaactgtctgcattggggttcgtcattcccgccaaaatacagcaggtcgccaatatagcacagaaattttgcaaacaggctatcattctgaaacaggtggcccatttctacaacagcatagaccagcagatgatccaatcccagcggcctatgatgttacagtcagccctagcattcgaacagatcattaagaatagtaaagccggctccggtggtaaatcccagatcacctgggacaacccaaaggaactggagggctacatccagaagctgcagaacgcagcggaacgcctggcaaccgagaaccggaagcttcggaagtggcacaccacgttctgtgagaaggtcgtggttctcatgaacatcgacctcctgcgacagcagcagcgctggaaggatggtctgcaggagctgaggacaggccttgctacggtggaagcccagtgccctcttgcatggcaaagcaagtgggagggacctgaagaccctctgcagtacctccggggtctggtggcaagggcattggcaattcaaaattgggttgataaagccgaaaagcaggcactcctgagtgaaacactcgatctcagtgagctcttccacccagacacgttcctgaacgcgctcagacaggaaactgcacgcgccgtcggccgcagtgtggactccctgaaattcgttgcatcttggaaaggcaggcttcaagaggccaaactgcagataaagattagtggcttactgctggagggctgtagttttgatggcaaccagctgtctgagaaccagctcgattctccaagtgtaagttccgtgcttccttgtttcatggggtggatcccccaggacgcctgcggtccatactctccagatgagtgcatcagcctgcccgtgtacaccagcgccgagcgggacagggtagtgactaacatcgatgtcccctgcgggggaaaccaggatcagtggattcagtgcggcgccgccctcttcttgaaaaaccagtag

SEQ ID NO: 186085 - DNA, 12924 bp, synthetic construct
  misc_feature 1..12924: note = Description of Artificial Sequence: Synthetic coding sequence
  source 1..12924: mol_type = other DNA
atggccaacggcaccgccgacgtgcggaagctgttcatcttcaccactacccaaaactatttcgggctgatgtccgagttgtgggaccagccacttttgtgcaattgtcttgaaataaataatttcttagacgatggtaatcagatgctcctgagagttcaacggtcggacgcaggcatttctttctcaaacactattgagtttggagatacaaaggataaagtgttagtattctttaaactccgcccagaagtgataaccgatgagaacctacatgataacattctagtgtctagcatgctggagagcccgatttcaagcttgtatcaggcagttagacaggtcttcgctcctatgctgctgaaagatcaggagtggtcacgtaactttgaccccaaattgcagaacttgctctctgagctagaagctggactcggcatcgtgctgagaagatctgatactaacctgaccaaacttaaatttaaagaggacgatactcgtggaattctcaccccatccgatgaatttcagttctggattgaacaggcacaccggggtaacaagcagatctccaaggaaagagctaactactttaaggaactctttgaaaccatcgccagggagttttacaacctggactcgctgagcctgctggaagtggtagacctcgtggaaacgacccaggatgtcgtcgacgacgtctggagacagaccgagcacgaccactacccagagtcgcgaatgcttcatctgctagacatcattggcggctcctttgggcgctttgtgcagaagaagttggggaccctgaatctttgggaagacccgtactacctggtcaaagagtctctgaaggccggaatcagcatttgtgaacaatgggtaatagtgtgcaaccacctgactggccaggtgtggcagaggtatgttccgcacccatggaaaaacgaaaaatattttcccgagactctggacaagttagggaaaagactggaagaggtcctggctatccgaacgatacacgaaaagtttctgtacttcttgccagcctccgaggagaagatcatctgcctgacgcgagttttcgagcctttcactggacttaatccagtacagtacaacccttacactgagccactttggaaagcagccgtgagccagtacgaaaagatcatagcccccgctgaacaaaagatagccggcaaactgaagaattatatcagtgagattcaggactctccccagcagttacttcaggccttcctgaagtataaggagctagtcaagcggcctaccataagtaaagagttgatgctggagagggaaacactgctggcccgcttggtagactcaatcaaggatttccgtctggactttgagaatagatgcagaggtatcccgggcgatgcttcgggccctttgtctggaaaaaacctgagcgaagtggtgaactctattgtgtgggtaagacaattggagctgaaggtggatgacaccatcaaaatcgcggaggcactcctcagtgacttgcccggctttaggtgttttcaccagagtgctaaggacctactggaccagctgaagctgtacgagcaagagcagttcgacgattggagcagagacattcaatctggcttaagcgacagtagatcagggctttgtattgaggccagctcgaggatcatggagctcgattccaacgatgggctgctcaaggtgcactatagtgaccgactggtgattctcctgcgcgaggtgcgccaactgagcgccttgggcttcgtgatacccgccaaaattcagcaggtggctaacatcgctcaaaaattctgcaaacaggcaattatactgaagcaagtcgcacatttctataacagcatcgaccaacaaatgatccaatctcagcggccaatgatgcttcagtccgctctggcgttcgagcagattatcaagaactctaaggcaggcagcggtggaaaaagccagatcacttgggataaccccaaggagttagaaggctacattcagaaactgcagaatgcagcagaacgccttgctaccgaaaacaggaaattgagaaagtggcatacaactttctgcgagaaggtcgttgttctgatgaacatagacctcctgcgtcagcagcagagatggaaggacggtttgcaggagctccggaccggcttggcaacagtggaagcccagggattccaggcctcggacatgcacgcatggaaacagcactggaaccatcagctctataaggccctggaacaccagtaccagatgggcctggaagctctcaacgagaacctgcctgagataaatatcgacttgacgtacaagcagggcagactgcagttccgcccacccttcgaagagatcagggcaaaatactaccgtgagatgaagagatttattggaattcccaaccagtttaaaggcgtaggagaggccggggacgagtccattttttcaataatgatagatcggaatgcctctggtttcttgacaatcttttccaaagccgaagacctgtttcgccggcttagtgcagtgctgcatcaacacaaagagtggatagtgatcggacaggtggatatggaggccttagtggaaaaacacttgttcaccgtacacgattgggagaagaattttaaggctttgaaaattaaggggaaggaggtggaaagacttcctagcgccgttaaggttgactgtctgaacatcaattgcaatccggtaaagaccgtcattgacgaccttatccagaagctgtttgaccttctggtcctgagcctgaagaagtcaatccaagcccatctgcatgaaatagacacgttcgttactgaagcaatggaagtcctaactataatgcctcagagtgtggaggagatcggggacgcaaatctgcaatactcaaagctccaagaacgtaagcccgaaatattgcccctatttcaggaggctgaggataagaacaggctgttgagaaccgtggccggcgggggcctcgaaaccattagtaacttgaaggccaaatgggacaagtttgagctgatgatggagtcccaccagctgatgataaaggaccaaatagaggtcatgaaagggaacgtgaaatctcggctgcagatatactaccaagaactggaaaagtttaaggcaagatgggatcagttgaaacctggcgacgatgtcatagagactggccagcataacacgcttgataaatcagccaagctgataaaggaaaagaagatagaatttgacgacctggaagtgacccgtaagaagctggtggacgattgccaccacttccggcttgaagaacccaatttcagtctggcatccagcattagtaaggatatcgagtcttgcgcgcaaatatgggcgttctatgaggaattccagcaagggtttcaggagatggccaacgaagattggataaccttccgaaccaaaacatacctgttcgaggagtttttgatgaactggcatgatagattacgcaaggtcgaagagcacagcgtgatgactgtaaaattgcagtcagaagtagataagtataagatcgtgataccaatccttaagtacgtgcgcggagagcacctctcgccagaccattggctggatctttttcggctgctggggcttccgcgcggaacctcactggagaagctcctgttcggagatctgctccgggtggctgatacaatcgtcgccaaggcggccgatctaaaggacctgaacagcagggcacagggtgaagtgaccatacgggaggcactgcgggagctagatctgtggggggtcggtgctgtctttactttaattgactatgaagatagtcagtccaggaccatgaagttgatcaaagactggaaagacattgttaaccaggtaggagacaaccggtgcctgctccagagtctcaaggacagcccttattataagggcttcgaggataaagtgagcatctgggagagaaaattggccgaactcgacgagtatttacaaaatttgaaccacatacagagaaagtgggtgtatctggaaccgatatttggcagaggagcattaccgaaggagcagacccgctttaatcgggtcgatgaggacttcagatcaataatgaccgatataaaaaaggacaaccgggtaaccacactcaccactcacgccggtattcgcaatagcttgctgactatcctggatcagcttcagcgatgtcagaaatcccttaatgagtttctggaagagaagagatccgcattcccgagattctatttcatcggagatgacgatctgctggaaatccttggtcagagtacaaatccttccgtcatacagtctcacctcaagaaacttttcgccggaataaactcagtctgttttgacgaaaagagtaaacatatcaccgcgatgaaatcacttgaaggagaagtggtcccattcaagaacaaagtgccactgtcaaataacgtggaaacgtggttgaatgacttagccctcgagatgaaaaagaccctagagcagctgttgaaagagtgcgtgacgacgggacgatcttcacaaggagctgttgacccgagcctattcccaagccagatactgtgcctggcagaacagatcaaatttacagaggatgtcgaaaacgctattaaagaccatagcctgcaccagatagagactcagctcgtgaacaagctcgagcagtacaccaatattgatacgtcttccgaagatcctggaaataccgaatcgggtattctggaacttaagctgaaggccctcatccttgacataattcataatatcgacgtggtgaagcagctgaaccagatccaggtacataccaccgaagactgggcctggaagaagcaactgaggttttatatgaagagcgaccacacctgttgcgtgcagatggtagattcagaatttcaatacacttacgaataccagggcaacgcgtcaaagctggtgtatacacccctaaccgataagtgctatctgacattgacgcaggctatgaagatgggactcggtggaaacccgtatgggcccgccgggaccgggaagactgaaagcgtcaaggccctgggcgggctgcttggccggcaggtcctggtgttcaactgtgacgagggcattgatgtgaagtcaatgggacgaatatttgttgggctggttaagtgtggcgcttgggggtgctttgatgagttcaaccgcctcgaagaatcagttctgagcgcagtttccatgcaaattcaaacgatccaggatgccctgaaaaaccatagaaccgtttgcgaactactgggaaaagaagtggaggtgaactctaactctggtattttcattaccatgaacccagcaggaaagggatatggcgggcgacagaagctgccagataatctgaagcagctgtttagacccgttgctatgtcacatcccgacaatgaattgatcgccgaagtgatactgtattctgaaggcttcaaagatgccaaagtgctgtctcggaaactggtggccatttttaatctgtcaagggagcttctgacaccgcagcagcactatgactgggggctaagagccctaaaaaccgtgctacgggggagcggaaatctgctgcgacaactgaataagagtggaacaacccagaacgctaacgagagccacattgtggtccaagccctgagactcaacaccatgtctaagttcacctttaccgactgtacgcgtttcgacgctctcatcaaagacgtgttccctggaatcgaactaaaggaggttgagtacgatgagctctccgccgctcttaagcaggtgttcgaggaagcgaattacgagattattccaaaccagattaaaaaggcacttgaactctatgaacaactttgccagcgcatgggcgtagtgatagtagggccctccggcgcaggcaaatctactctctggcggatgctgcgtgctgcattgtgtaagacgggtaaagtggtgaagcagtatactatgaacccaaaggccatgcccaggtatcaacttctgggccacatcgatatggacacacgtgaatggagcgatggcgttctgacaaacagcgccaggcaggttgtgagggaaccccaggacgtctcatcttggattatatgtgacggtgatatcgatccggaatggattgaatcactgaacagtgtgctggacgacaataggctgctaaccatgccttccggggagaggatccaattcggccccaacgttaactttgtctttgaaacacacgacctcagttgcgcgtcccccgccaccattagccggatggggatgatttttctatctgatgaggagactgacctgaactcccttataaagtcttggttgaggaaccaaccggctgagtatcgcaacaacctggaaaactggatcggcgactatttcgagaaggctctgcaatgggtgctgaaacagaatgattatgtggtggagacctctttagttggaacagtaatgaacggcctgagccatctgcatgggtgcagggaccatgatgagtttataattaacctgattcgaggactcgggggcaatctcaacatgaagagtcgcctcgagtttaccaaggaggtgttccactgggcgagggaaagtccaccggattttcataagccaatggatacatactacgactcaacgagaggccgacttgctacctatgtgcttaaaaagcccgaagacttgacagccgacgatttttcaaacggccttacactgcccgtaatacaaacacctgatatgcagcggggacttgactacttcaaaccatggctatcgtccgacacaaagcaaccatttatactggttggaccggaggggtgtggaaagggtatgctgttgcgctatgcgtttagtcagctgagaagtactcagatcgcaactgtccattgctccgcccaaaccactagtaggcatttgctgcagaagctgagccagacctgcatggtgatctctacaaatacgggccgcgtgtacagacccaaagattgcgagcgtcttgttttgtatctcaaggacatcaacttacccaagctcgataagtggggcacttctacccttgtggcttttttgcaacaggtgctgacataccaaggcttttatgatgaaaatctcgagtgggtagggctggaaaacattcaaatcgtggcatccatgagtgcaggaggtcgcctcggcagacataaacttaccacccgatttacttccattgtgaggctttgctcgatcgactaccccgaaagggaacagctgcaaacaatctacggcgcttacctggagccagtactccacaagaaccttaagaaccattcaatctgggggagttctagcaaaatttatttgttagcaggcagcatggtccaggtctacgaacaggtgagggctaaattcactgtggatgactattctcactactttttcacaccttgcatcctgacacagtgggtcctaggcctctttaggtatgaccttgaaggtggaagctcaaaccatccacttgactacgtccttgaaatagtagcctatgaagcacgaaggctgttccgggacaagattgtgggcgctaaggaattgcatttgttcgatatcatcctcacctccgtgtttcagggcgattggggttccgatatcctcgacaacatgagcgactctttctatgtgacttggggagcgcgccacaacagtggggcccgggctgcccctggtcagcctcttcccccacatggcaagcctttgggaaagctgaattctaccgatctgaaggacgttataaagaagggcttaatccactacggccgggataatcagaacctggacatcttactgttccacgaggtgttagagtatatgagcaggatcgatagggtcttgagctttcccggaggaagtctgctgttagccggacggagtggagtcggccggcgaaccatcactagcctcgtcagtcacatgcacggcgcggtgctgttctcaccaaagatcagccgcggctatgaactgaagcagtttaagaacgacttaaagcacgtcctgcaactggctggtatcgaggcccagcaggtggtcctactgctggaagactatcagtttgtgcatccaacattcctggagatgattaatagtctgcttagctcaggggaggtgcccggtttatacacattggaggagctggagcccctgctgttaccccttaaagaccaggcttctcaagacggctttttcggaccggtgtttaattatttcacgtatcgcatccaacagaatctccatatagtgctgatcatggattctgcaaatagcaattttatgattaactgcgagagtaacccagctttgcacaaaaagtgccaggtactttggatggaaggctggagcaactcatcaatgaaaaagataccagagatgctgtttagtgaaacaggggggggcgaaaaatacaatgacaagaagagaaaggaggagaaaaagaagaactccgtcgaccctgacttccttaagtcctttcttctaatccatgagtcctgcaaagcttatggggcaactccctcaagatatatgaccttcttgcacgtgtatagtgccattagcagcagcaaaaagaaagagttgctgaagagacaatcacacttgcaggcaggagtttccaagctgaacgaagccaaagctctggtggatgagctaaatcgaaaggcaggagagcagtctgtgctgcttaaaactaagcaggatgaggcagacgccgcactgcaaatgatcactgtttccatgcaggatgcgagcgagcagaagactgagcttgagcggctgaagcacaggatcgccgaggaagtcgttaagattgaagaacgtaaaaacaaaatcgatgacgaactcaaggaggtccagcctcttgtgaacgaggccaagctggctgtcgggaacataaaaccagagtcgctgtcggagattagatccctccggatgcctccggacgtgataagggatatcctggaaggtgttctccgcttaatgggaatttttgataccagttgggtgagcatgaaaagctttttggctaaacgtggagtgagggaggatattgccacgttcgatgccaggaatatttccaaggagattcgcgagagcgttgaagaacttctattcaaaaataaaggcagcttcgaccctaagaacgcaaaaagggcctccaccgcagcggcacctctggctgcctgggtgaaggcgaacatccagtattcccatgtgttggagaggatccatcctctggagacagagcaggcgggcctcgagagcaacttaaagaagacggaggaccgcaagagaaaactcgaggaactcctgaattccgtgggtcagaaggtttctgagctgaaagagaagtttcaaagtaggacgtcagaggccgcaaaactcgaggccgaggtctcaaaggcccaggaaaccatcaaggcagctgaggtactgatcaaccagctggatcgggaacacaaaagatggaacgcacaggtggtggagattactgaggagctcgcaactttgcctaagagggcccagcttgccgccgccttcatcacctacctgagcgctgcccccgaatcacttcggaagacctgtctcgaggaatggactaaaagtgctgggctagaaaaattcgacctaagacgcttcctttgcacagagagcgaacaattgatttggaagtcagagggccttccaagcgatgacctgtctatagaaaatgcacttgtcatcctacagagccgtgtatgtccctttcttattgatcctagtagtcaggccactgagtggctgaagacccacctcaaggactcaagattggaagtcatcaaccagcaggattcaaattttatcactgcactggaactcgctgttaggttcggcaagactcttatcatccaggagatggacggagtcgagcctgtcttatatccactcctgaggagagatctagtggcacagggaccccgctacgtggtgcagatcggtgacaagattatagactacaatgaagaattcaggctgttcctatctaccaggaaccctaaccccttcattccgcccgatgctgccagcattgttacagaggtcaatttcaccaccacacgatccggcttaaggggccagttgctcgctctgacaatccagcatgagaagccagatctcgaagaacagaaaactaagttgctgcagcaggaggaagacaagaagatccagttggcaaagttggaggaatccctgctggagacactggccacttcccaggggaacatacttgagaacaaggatctgatcgaatctctgaatcagactaaggcttcatctgccctgatccaagagtctttaaaagagtcgtacaaactacagatctcactcgaccaagagagagatgcctatctgcccctggccgagtctgcaagcaaaatgtatttcattatctctgacctctcgaaaatcaataacatgtatagattttccctcgctgccttccttaggctgttccagcgcgcactgcagaacaagcaggattccgaaaacaccgagcagcgaatacagtccttgatctcatcactccaacacatggtttacgaatatatttgccgttgcctctttaaagcggatcagcttatgttcgccctgcactttgtgcggggcatgcatcccgagctttttcaggagaacgaatgggacacttttacaggtgtggtggtaggcgacatgctccgtaaggcagactcacagcagaagatccgagatcaattgcccagctggattgatcaggagaggagttgggctgtcgcgaccttgaagatagccctgccgtcgctatatcaaacattatgcttcgaagacgccgcactgtggaggacctactacaacaactctatgtgcgaacaagagtttccctctatccttgctaagaaggtgtccctgtttcagcagatactggtcgtgcaggccttgagaccggataggctgcagagcgccatggcactttttgcctgtaagacactcgggcttaaggaggtctctcctctgcccctgaacctcaagaggctctacaaagagacactcgagatcgagcccatccttattatcatctccccaggcgcagacccttcgcaggaactgcaggaactcgccaacgctgagcgtagtggcgaatgctatcaccaagtggctatgggccaagggcaggccgatcttgcgatccagatgttaaaggagtgcgcccgcaacggcgactggctgtgtctgaagaacctacatctggtcgtaagctggctaccggtcctggaaaaagaacttaacaccttgcagcccaaggacacgtttaggctctggctgacagcagaggttcaccctaacttcacgccaattttgctgcaatcatctcttaaaattacctacgaatcccccccgggtctgaaaaaaaatctgatgagaacgtatgaatcctggactcctgaacagatttccaagaaagacaacacacatcgcgcccacgctctgttctcgctagcttggtttcacgcagcctgtcaggagcggcgtaattatatccctcaggggtggactaagttttacgaattttccctgtcagatttaagggccggctacaacattatcgacaggctgttcgatggggcaaaggacgtgcagtgggagtttgttcatggacttttggagaatgctatctatgggggccgtattgacaactattttgacttacgggtactgcaatcatatctgaagcagttctttaattcttcagttatcgatgtgttcaatcagcggaataagaaaagtatattcccttattcagttagtctacctcagagttgtagtattcttgattaccgtgccgttatcgagaagatacctgaagatgacaagccttccttttttggtttgccagcaaacatcgcccgttcatcacagcgcatgatttcgtctcaagtcatctctcaattgagaattttaggccgatctattacagcaggctctaaattcgatcgggagatatggtccaacgagttatcccccgtactaaatctctggaagaagctgaatcaaaactctaatctgattcatcagaaggtacctcctcccaacgacagacagggatcaccaatactgtcttttattatcctcgagcaattcaacgccatccgcctagtgcaatccgtgcatcaatctcttgctgcactgtctaaagtcatccgcgggacgacgctcctgtctagcgaggtgcagaagctggcctcagccctgctgaaccaaaagtgccctctggcttggcaatccaagtgggaggggccagaagatccactgcaatatctcagggggctggttgcccgagcgctggctatccagaactgggtcgacaaggccgaaaaacaggccctccttagtgagacactcgatctctcggagctgttccatccagacacattcctcaatgcccttcggcaggagaccgctcgagctgtgggcagatctgtggattcactgaaatttgtggccagctggaagggcaggttgcaggaagccaagttgcagattaaaataagcggactgctgctagaaggttgctcttttgacggtaatcagctttctgagaaccaactcgatagtccatccgtgtcctcagttctcccatgctttatgggctggattccacaagacgcctgtggaccatactcgcccgatgagtgtattagtctcccggtgtacacgagcgcagaacgggatcgcgtagttactaatatagacgtgccttgtgggggtaatcaagaccagtggattcagtgtggtgctgctctgttcttgaaaaaccagtag

SEQ ID NO: 186086 - DNA, 12945 bp, synthetic construct
  misc_feature 1..12945: note = Description of Artificial Sequence: Synthetic coding sequence
  source 1..12945: mol_type = other DNA
atggccaacggcaccgccgacgtgcggaagctgttcatcttcaccacaacccagaactacttcggactaatgtccgaattatgggaccagccattgctgtgcaactgcttagagattaacaatttcctggatgatggaaatcaaatgttgctgcgcgttcagcggtccgatgcgggcatctcgtttagcaatactatcgagttcggagacactaaagataaggtgctggttttcttcaagttgcgccccgaggtcatcaccgatgagaacctgcacgacaacatcctggtttcatccatgcttgagtctcccatctcttcactgtaccaggccgtgaggcaggtgtttgctccgatgctcctcaaagatcaggagtggagcagaaactttgaccctaaacttcagaatttgctttccgagctcgaagccggactgggaatcgtgctcaggaggtccgacacgaatctgactaagctgaagtttaaggaggatgatacgaggggaatactcacgccgtcagatgagttccagttttggattgagcaagctcacagagggaataagcaaattagtaaggagagagctaactattttaaagaattgtttgaaacaattgcccgcgaattctataatcttgactctctctctttgctggaagtggtggatttggtggagactactcaggatgtggtagatgatgtctggaggcagactgagcacgaccattaccctgagtcgcgcatgctgcacctgctggacatcatcgggggctcgttcggacgttttgtgcaaaaaaaactgggtacactaaacttgtgggaggacccatattacctcgtaaaggagagccttaaggctggaatcagtatctgcgagcaatgggttattgtttgtaaccacctgactggacaagtatggcaaaggtatgtgcctcacccatggaagaacgagaagtatttccccgaaacattggataagctcgggaagcgactggaggaggttctcgcgatccgcaccatacatgagaagtttctgtacttcctgccagccagcgaggaaaaaataatttgtttgacacgagttttcgaaccttttacgggcctcaaccccgtgcaatacaatccatatactgaaccattgtggaaagccgcagtgagccagtacgaaaaaatcatcgccccagctgagcaaaagatcgccggcaagctgaagaactatatttccgagatccaggattccccgcagcagttactgcaggccttcctgaagtacaaagagctggtgaaacggcctaccatctcaaaagagctgatgctcgagagggaaacactacttgctagattagtggacagcattaaggacttccgacttgactttgaaaatcgttgcaggggaatccctggggacgcctctgggcccctcagtggtaaaaacctttctgaagtggttaacagcatagtctgggtgcggcagctcgagctgaaagttgacgacacaatcaaaatcgccgaagccctcctctctgaccttccaggatttcgctgttttcaccagtccgccaaggaccttctggaccagcttaagctttatgagcaggaacagtttgacgactggtctcgagacattcagagcgggctgtccgatagcaggagcgggttatgtattgaggcctcatcccgcatcatggaactagactcgaatgacgggttgctcaaggtgcattatagtgaccgacttgtcattttactccgcgaagtccggcagctttcagcactgggatttgttatccccgcaaagatccagcaagttgccaacatagcccagaaattttgtaagcaggccattatcctcaagcaggtggcccacttctataacagtattgaccaacagatgatccagagtcagcgcccaatgatgctccaatctgctttggcattcgaacagattatcaagaacagcaaggccggaagtggcggaaagtctcagataacttgggataatccgaaggagttggaaggctatatccaaaaattgcagaatgcagccgaacgcctcgctacagagaaccggaaactgagaaagtggcataccacattttgcgaaaaggtggtcgtgctgatgaacattgatctgctgcgtcagcagcaacgatggaaagacggactacaggagctgcgcacgggcttagccactgtggaggcgcaaggttttcaagctagcgatatgcatgcgtggaagcagcactggaaccatcagctttataaggccctggaacatcagtaccagatgggcctggaggcgctgaacgagaacttgccagaaattaatatcgatctgacctacaaacagggtcggctgcagttcagacctccattcgaggagatacgcgcaaagtattaccgggaaatgaaaaggttcatcggcataccaaatcaatttaaaggcgtgggcgaggccggagacgagtccatcttctctatcatgattgaccggaatgcctctggatttctgacaatcttctcaaaggccgaggacttgttccggaggctctccgccgtgctccaccagcataaggagtggatagtgattggtcaggtcgacatggaggcactggtcgaaaaacacctgttcaccgtgcacgattgggaaaagaattttaaggcactgaagattaagggcaaggaagtggagagactgccttcagccgtgaaggtcgactgcctcaatatcaattgcaatccggtcaagacggtgatagatgatctcatccagaaactgttcgatctgctagtcttgtcactgaagaaatccatccaggcgcatctgcatgagattgatacatttgtgaccgaggcaatggaggtgctgaccataatgccacagagcgtagaggagataggcgacgccaatctccaatacagcaagttgcaagaacgcaaaccggagatcctgcctctcttccaagaagccgaggacaagaaccgcctgctgcgaaccgttgctggtggcggcctcgagacaatcagcaatttgaaggctaagtgggacaagtttgagctgatgatggagtcacaccagttaatgattaaagaccagatagaggtcatgaagggaaatgttaaatctcgcttgcaaatttactaccaggaattagaaaaattcaaggcccgctgggaccagctgaagccaggagacgatgtcattgagaccgggcagcacaataccctagataaatctgcgaaactgatcaaagaaaagaagatagagttcgacgatctcgaagtaacgcgaaagaagctggtggatgattgccaccacttccggctcgaggagccaaatttcagcctcgcctcctcgatttccaaggatatcgagagctgcgcccagatctgggccttctatgaggagttccagcaggggtttcaggagatggcaaacgaagactggatcacattccgtaccaaaacctatttgtttgaagaatttttgatgaattggcacgataggctgcgtaaggtcgaggaacactccgtgatgacagttaaacttcagagcgaggtggacaagtacaaaatcgtgatcccgattcttaaatatgttcggggagagcacctgtcccccgaccattggctggatctttttcgactgctcggactcccacggggtacctctctcgagaaactcttgttcggtgatctccttagggttgccgatacaatagtggccaaagcagctgatttgaaggacctgaactctagggcccagggggaggttacaattcgcgaggccctgcgagaactggacctatggggcgttggtgcagtgttcacgctgatcgattatgaggatagccagtcaaggacaatgaaactaataaaggattggaaggatatcgtgaaccaagtcggcgacaaccggtgccttcttcagtctctcaaagacagtccttactataaaggattcgaggacaaagttagcatctgggagcgcaaacttgccgaactagacgaatatctgcaaaacttaaaccatattcaacgcaaatgggtctacctggaaccaatctttggcagaggtgccctgccgaaggaacagacgcggttcaacagggttgatgaagatttccggtcaatcatgacagacattaagaaggacaacagggtcacaaccttaacaacacatgctgggatccggaacagtcttctgacaattctcgaccagctccaaaggtgccagaaaagcttgaacgaatttttggaggaaaagagaagcgcattccctagattctacttcatcggcgacgacgatttgctagagattctgggacagtccacaaacccaagcgttattcaaagtcaccttaagaagctgtttgccgggatcaattcagtatgttttgatgagaagtcaaagcacattacagcgatgaagagccttgagggagaagtagtcccctttaaaaacaaggtgcctctttctaacaacgtggagacttggctgaacgaccttgcgctcgagatgaagaagacgcttgagcagctgcttaaagaatgtgtgactacagggaggtcctcacagggagctgtcgacccttctctgttccccagccagatcctttgcctggccgaacaaatcaagtttaccgaagatgttgaaaatgctatcaaggatcatagcctccatcagattgaaacccagctagttaacaagttggaacagtacacgaatatagatacgagttcagaggaccctgggaatacagaatctgggattcttgaactcaaactcaaagctctcatcctggacatcattcataatattgatgtcgtgaagcagctgaaccagatccaagtgcataccacggaagactgggcttggaaaaaacagctccgcttttacatgaaaagcgatcacacctgctgcgtgcagatggtggactcagagtttcaatacacatatgagtaccagggcaacgcctcaaagcttgtgtacactcctctcacggacaaatgttacctcactctcacccaggcaatgaaaatgggattaggcggaaacccttatggacctgccgggactggcaaaacggagagcgtcaaggcacttggtggcctactcgggcggcaggtcctggtcttcaattgcgatgaggggatcgatgtgaagagcatgggcagaatcttcgtgggactggtgaaatgtggagcctgggggtgttttgatgagtttaatcggctggaggagagcgttctgtccgccgtgtcaatgcagatccagactatccaggacgccctgaaaaaccatcggacagtttgcgaattgctgggtaaagaggtggaggtaaacagtaacagcggtatctttatcaccatgaaccctgctgggaagggctatgggggccgccagaagttgcccgataacctgaaacagctgttcaggcctgtggcaatgagtcacccggacaatgaattgattgcagaagtaattctatattctgagggattcaaggatgccaaagtgctgagtagaaagctggtggcaatctttaatctgagccgggagctgctcacaccccaacaacactatgattggggactcagggcccttaagaccgtactgcgcggttctggcaatctgctgcgccagttaaataaatctggcacaactcagaacgccaatgagtcacacatcgttgtgcaggcactcaggctgaatacaatgagtaagttcacttttactgattgcactagattcgacgcgctgatcaaggacgtatttcctggcatcgaactcaaagaagtcgaatatgatgagctcagcgccgctctgaaacaggtcttcgaggaagcaaactacgagatcatcccaaaccagattaaaaaagcacttgagttgtatgaacaattgtgtcagcggatgggggttgtgatcgtgggcccttcaggagctggcaagtcaactctatggaggatgctgcgtgcagctctgtgcaagacgggcaaggtggtgaaacaatataccatgaatccaaaggcgatgcctaggtaccagcttctgggccatatcgatatggacactcgggagtggagcgacggggtcctgacaaacagcgctcgtcaggttgtgcgggaaccacaagatgtaagttcttggataatctgcgacggcgacatcgatccagagtggatcgaaagtttgaacagcgtgctggacgacaacaggcttctcactatgccatctggggaacgtattcagttcggcccgaacgtcaacttcgtgttcgaaacccatgatctcagctgcgcctcccctgctactatatccagaatgggaatgatcttccttagcgatgaagagaccgatttgaactcactcatcaagtcttggctccgcaaccagcctgccgagtacagaaataatctcgaaaactggatcggagactattttgaaaaagcactgcagtgggtcttgaagcagaatgactacgtggttgagacctctctggtgggcactgtcatgaacggtctgtcgcatctccatggatgtcgggaccacgacgagtttatcatcaatctgatccgcggactgggtggcaacctgaatatgaagtccagattggaattcaccaaagaagttttccactgggcccgcgagagccctcctgatttccataagcccatggacacctattacgacagcacccgcggtcgcttggcaacctacgtactgaagaagcctgaggatctcactgctgatgactttagtaacggactgaccctccccgtaatacagaccccggacatgcagcgcgggcttgattattttaagccttggctgtcttccgacaccaagcagcccttcatcctggtaggtccggagggttgtggcaaggggatgctgttgcgctacgctttctcgcagctcaggagtacccagatagctaccgtgcactgctcagcgcaaactacctcacggcatctgttgcaaaaacttagccaaacatgcatggtgataagtaccaacacaggacgtgtgtaccgccctaaggactgcgagcggctcgtgctctatttgaaggatatcaatctgccgaagctggacaagtggggcacctctacactggtggctttccttcagcaagtcctcacttatcaggggttttatgacgagaacctggaatgggtggggttagagaatatacagatagtagcttccatgtcggccggaggccggctcggccgtcacaaactcacaactagattcacgagcatcgtacgactttgtagcatcgattatccagagagagagcagctgcaaacaatctacggtgcttacctggaacccgtccttcacaagaatctcaagaatcattccatctggggcagcagtagcaagatttacctgctcgccggcagcatggtccaggtgtacgagcaagtcagagctaagtttacggtggacgattatagtcactatttcttcaccccgtgcattcttacgcagtgggtcctggggttgtttcgctacgatctcgaagggggctctagcaaccaccccttagactacgttcttgaaattgttgcttacgaggcccgccgcctgttccgagacaaaatagtaggtgctaaggaactgcacctgttcgatatcattctaaccagcgtatttcagggtgattgggggtccgatattctggataatatgagcgactccttttacgtgacttggggcgctcgtcacaacagtggcgcccgggccgcccccgggcaaccactcccaccccatgggaagccgttaggaaaactcaactcaacggacctcaaggacgtgattaagaagggcctaatccactacggaagggataaccagaatttggatattcttctgttccatgaggtccttgaatatatgagccgtatagatagagtgctgtcctttccgggcggcagtttactgctcgccgggcgaagcggcgtcgggcggaggacgattacatccctggtctcccacatgcatggggctgtgttattctctccaaagataagcaggggttatgaactgaaacagtttaaaaacgacctgaagcatgtgttgcagctggcggggatcgaggctcagcaggttgtcctccttctcgaagactaccagttcgtgcatccaacatttctggagatgatcaactccctccttagtagcggggaagtcccaggactctatacgctggaggagttagagcccttgcttctcccattgaaggatcaggctagtcaggatgggttttttggaccggtgttcaactacttcacctaccggattcaacagaatctgcatatcgtactgatcatggatagtgctaattccaatttcatgatcaattgtgagtcaaatccagccctgcataagaagtgtcaagttctttggatggaaggctggtctaacagctctatgaagaaaattcctgaaatgctgttctccgagacgggcggcggcgagaaatataatgataaaaagagaaaggaggagaaaaaaaagaactcagtggacccagatttccttaagtcgtttttgctcattcatgaatcatgcaaggcctacggcgcgaccccttctaggtacatgaccttcctgcatgtatattccgccatttctagttctaagaagaaggagctcctgaagcgacagtcacacttgcaggccggtgtgtcaaagctgaacgaagctaaagccctcgtagatgagctgaatagaaaagcaggcgagcaatcagttctcctcaagactaagcaggatgaggccgatgctgcattacaaatgattactgtttcaatgcaggacgcctctgagcagaaaactgagctggaacggctaaaacaccgtattgcggaggaggttgttaaaatcgaggagcgcaaaaacaaaatcgatgatgagcttaaggaagtacagcccctggtgaatgaagccaaactcgctgttgggaatataaagcccgagagcctgtctgagattaggagtcttcggatgcctccagacgtgattagagacattctcgagggcgtcctgaggttgatgggaatttttgatacatcgtgggtgtccatgaaatccttcttggcaaagcgaggggttagagaagatatcgccacctttgatgcaagaaatatttccaaagaaattcgagagtctgttgaggagctgcttttcaagaacaagggaagttttgatcccaaaaacgcaaaacgcgcttcaacagcggccgctccactcgccgcttgggtcaaagcaaatatccagtatagtcacgtgcttgagcggatccatccactagaaactgagcaggccggattggagagtaatctgaaaaaaacagaagatcggaagcgcaaactcgaagaactgttaaactccgtgggccagaaagtttccgagctgaaggagaaattccagtctaggactagtgaggccgctaagcttgaggccgaagtttctaaggctcaggaaacgattaaagcggccgaagtgttaattaatcaattggatcgggaacacaagaggtggaatgcgcaggttgttgaaatcacggaggagctggccaccctgccaaagagggcccaactcgcagcagccttcataacatatctgtctgccgccccagaatcactccgcaagacttgtctggaggaatggacaaaatcggccggcttagaaaaattcgaccttcgccgcttcctgtgcacagaatcagaacaattaatttggaagagcgaaggactgcccagcgacgacttgagcatagagaatgccctggttatcctgcagatcatcggattgaaaagttggtcacgggtgtgtcccttcttgatcgatccttcaagtcaggcaacggagtggcttaaaactcacctgaaggactcgcggctagaagtgatcaaccagcaagactccaatttcatcaccgcactcgagcttgcagtgcgctttggcaagactctcattattcaggaaatggacggggtggagcctgtactctaccccctgctccggcgcgaccttgtggcccagggccctcggtacgtggtgcagattggagataaaattattgattacaacgaagagtttcgtctgtttctgtcaacgcgaaacccaaacccattcatcccaccagacgcagcgagcattgttacagaggtgaatttcactactacacgctcaggcctgaggggacagctcctcgccctgaccattcagcacgaaaaacctgaccttgaagagcagaaaactaagctccttcagcaggaagaagataagaagattcagttagcaaagctggaagagtctctgttggagacattggcaaccagccaggggaacatcctggagaataaagatctcatcgaatccctgaaccagacaaaagctagcagcgctttaattcaggaatctttgaaggagtcctacaagctgcaaatcagcctggatcaggagcgtgatgcatacttgcctctggctgagagtgcctccaaaatgtactttatcatcagcgacctctcaaagattaataatatgtacaggttctccctggccgccttcttacggctgtttcagagagccttgcagaacaagcaggattccgagaacactgaacagcgcatccaatccttgatctcttcacttcagcatatggtgtacgagtatatttgtcggtgcttattcaaggccgaccagctgatgttcgctttgcacttcgttagaggaatgcaccccgagctctttcaggaaaatgagtgggacactttcacaggcgtggtggttggcgacatgctgcggaaggccgactcccagcagaagatacgggaccagttgccctcatggatcgaccaggaacggtcctgggccgtcgcaacccttaagatcgccctgccgagtctgtatcagactctgtgtttcgaggacgcggcactctggcgcacgtactacaacaattctatgtgcgaacaggagttcccatctattctggcaaagaaggtttccctcttccagcaaattctagtcgtgcaggccctgcggcccgaccgacttcagtcggccatggccctgttcgcctgtaaaactctgggcctgaaggaggtgtcccctcttcccctaaacttgaagcgactgtacaaggagaccctcgagatcgagcccattttgatcattatctcacccggcgctgacccctcgcaggagctccaggaattggctaacgccgaaagaagcggagaatgttaccaccaggttgctatggggcaggggcaggcagatctggccattcagatgctgaaagaatgtgcccggaacggagactggttgtgtctgaagaacctgcacttagtggtcagttggttacctgtgctcgaaaaggagttgaatacgctgcagcccaaggacactttcagactttggctgactgccgaagtacatccaaactttacaccgatactcttacaaagctccctcaaaattacctatgagagcccaccaggcctgaaaaagaacctgatgagaacttacgaatcttggacccctgagcagatcagcaagaaggacaatactcatagagctcatgcactgttcagcttggcctggttccatgcagcttgccaagaacgcaggaactacatcccacagggctggacaaagttttacgagttttcactgtccgatctacgggcaggctacaacataattgaccgactctttgacggggcaaaggacgtgcaatgggagtttgtgcatggcctactggagaatgcaatatacggaggcaggatcgataactattttgacctcagagtcctgcagtcatacctcaaacaatttttcaactcaagtgtgatcgatgtctttaatcagcggaataaaaaaagtatttttccttattctgtgtcgctgccgcagagctgcagtatactggattaccgcgccgtcattgaaaagataccagaagatgacaagccgagctttttcggtctgcccgcaaatatcgcccgaagttcccagcgtatgatcagtagtcaggtgattagtcagctgcgaattctggggcgatctatcactgccgggtccaagttcgatcgggagatctggtcaaatgaactctcgcctgtgctgaatctctggaaaaagttgaaccagaatagtaatctcattcaccaaaaagtcccaccccctaacgaccggcaggggtcccctatcctgtcttttattatactggaacagtttaatgctataagactggttcagagtgtgcatcagtccctggctgccctgagtaaggtaattagggggaccaccctcttgagtagtgaggtgcagaagctggcaagcgcattgctgaatcagaaatgcccgctcgcctggcagtccaagtgggaaggccccgaagaccctctccaatatctccggggcctggtggctcgtgccctggctatccagaattgggtagacaaggctgagaagcaggctttgctgagcgagacactcgacctaagcgagctattccatcctgacaccttcctgaatgctctgaggcaggaaactgctagggcggtaggcaggtccgtcgatagcctgaagttcgttgctagttggaaaggaagattacaagaagccaagctgcagataaagatctctggtctgctgctcgaagggtgtagcttcgacggcaatcaattgagcgaaaatcagctggacagcccctcagtcagctcagtgctcccctgtttcatgggctggatccctcaggatgcctgtggaccctacagcccggatgagtgcatctcgctgcctgtgtatacaagcgcggagagggaccgggtggtgactaatattgatgttccatgtgggggcaatcaggaccaatggatccagtgcggcgccgctttgtttttaaagaaccagtag

SEQ ID NO: 186087 - DNA, 1515 bp, synthetic construct
  misc_feature 1..1515: note = Description of Artificial Sequence: Synthetic coding sequence
  source 1..1515: mol_type = other DNA
atgggccagggccaggccgacctggccatccagatgctgaaggagtgcgcacgaaacggtgactggttatgtctgaaaaacctgcatcttgtggtttcttggctcccagttcttgagaaagagctgaacaccttgcaacccaaagacaccttccgcttgtggttgaccgccgaagtccaccctaacttcacgccaattctcctgcagtcatctctcaagatcacgtacgaatccccaccaggcttaaagaaaaacctgatgcgcacctacgagtcttggacccctgagcagattagtaagaaagataacactcacagagctcacgctttgttttcactggcatggttccacgcagcctgtcaagagcgtcgaaattacattccacaggggtggaccaaattctacgagttttcactgtcggacttgagggcgggctataacattatcgatcggctcttcgatggcgccaaggacgtccaatgggaattcgtccatggtctcctggagaatgccatctatggaggacggatagacaattatttcgacctgcgtgtgctacagtcctacctaaagcagttcttcaacagtagcgtgatcgacgtgttcaatcaacggaacaaaaaaagcatttttccatattcggtcagcctgccgcagtcttgttctattctggactatcgagccgtcattgagaagattcctgaagatgacaagccctcatttttcggactaccagcgaatatcgcgcggagttcccagagaatgatttcaagccaggttatctcacaattaaggatcctggggcggtccattacagctggatctaaatttgaccgggagatctggtcaaacgagctctccccggtgttgaacctgtggaaaaagctcaatcagaactccaacctgattcaccaaaaagtacccccgccgaacgaccggcaagggtccccgattttgagttttataattctggagcagtttaacgccatccggctcgtgcaaagtgtccaccagtccctagccgctctgagcaaggtcattagaggtaccactctcttgagttctgaggttcaaaaacttgcttctgccctgctcaaccagaagtgcccactggcttggcagtccaagtgggagggcccagaggacccactccaataccttaggggactcgtggccagagccctggcaattcagaattgggtggataaagccgaaaagcaagctctgctaagcgaaacactagatcttagtgagctgttccaccccgacacatttctgaacgcactccgccaggagacagcccgcgcagtcgggcgctccgttgactcacttaaatttgttgcttcctggaaggggcgattacaggaggccaaactgcagatcaagatttccggcctactcctggagggatgctcattcgacggtaatcagttgtctgagaaccagctggacagccctagtgtttccagtgttctcccatgcttcatggggtggatcccacaggacctgctctag

SEQ ID NO: 186088 - DNA, 270 bp, synthetic construct
  misc_feature 1..270: note = Description of Artificial Sequence: Synthetic coding sequence
  source 1..270: mol_type = other DNA
atgtgcgaccggaaggccgtgatcaagaacgccgacatgagcgaggagatgcagcaagacagcgtggaatgcgcaactcaggcccttgagaagtataatatcgaaaaggacattgccgctcacattaaaaaagaattcgacaaaaaatacaacccgacatggcattgcattgtcggtcgcaacttcggctcatacgtgactcatgaaaccaagcattttatctatttttacttgggccaggtcgctatcctattgtttaaaagcggatag

SEQ ID NO: 186089 - DNA, 270 bp, synthetic construct
  misc_feature 1..270: note = Description of Artificial Sequence: Synthetic coding sequence
  source 1..270: mol_type = other DNA
atgtgcgaccggaaggccgtgatcaagaacgccgacatgagcgaggaaatgcagcaagattcagtggaatgtgccacccaggctctggagaagtataacatcgaaaaagacatcgcagcgcacatcaagaaagagttcgacaaaaagtacaaccctacgtggcattgcatcgtgggcagaaatttcggttcctatgtgacacatgaaaccaagcactttatctacttctatttgggacaggtagctatcctgctgttcaaatctggctag

SEQ ID NO: 186090 - DNA, 270 bp, synthetic construct
  misc_feature 1..270: note = Description of Artificial Sequence: Synthetic coding sequence
  source 1..270: mol_type = other DNA
atgtgcgaccggaaggccgtgatcaagaacgccgacatgagcgaggagatgcagcaggatagtgtggagtgcgctacacaggcactagagaaatataacatcgagaaagacattgcagctcatattaagaaagaattcgacaagaagtataatccaacctggcactgcatcgtcggacggaattttggttcctatgttactcacgagaccaaacacttcatctacttctacctgggccaggtggctattctgttgtttaagtccggttag

SEQ ID NO: 186091 - DNA, 270 bp, synthetic construct
  misc_feature 1..270: note = Description of Artificial Sequence: Synthetic coding sequence
  source 1..270: mol_type = other DNA
atgtgcgaccggaaggccgtgatcaagaacgccgacatgagcgaggaaatgcagcaggactccgtcgaatgtgccacccaggctctggaaaagtacaacattgaaaaagacattgcagcgcacatcaaaaaagagtttgataagaagtacaaccctacctggcactgtatcgtgggtcgcaactttgggtcctacgtaacccacgagaccaagcacttcatttacttctacttaggccaggtcgccatcctgctgttcaaatctggctag

SEQ ID NO: 186092 - DNA, 129 bp, synthetic construct
  misc_feature 1..129: note = Description of Artificial Sequence: Synthetic coding sequence
  source 1..129: mol_type = other DNA
atgtgcgaccggaaggccgtgatcaagaacgccgacatgagcgaggaaatgcagcaagatagcgtcgaatgcgcaactcaggccctagaaaaatacaacattgaaaaggatatcgcggctcacatctag

SEQ ID NO: 186093 - DNA, 270 bp, synthetic construct
  misc_feature 1..270: note = Description of Artificial Sequence: Synthetic coding sequence
  source 1..270: mol_type = other DNA
atgtgcgaccggaaggccgtgatcaagaacgccgacatgagcgaggaaatgcagcaagatagcgtcgagtgcgccactcaggctctcgagaagtacaacatagaaaaagacatagccgcacacattaaaaaagaattcgataagaaatacaatccaacctggcattgcatcgttggccgaaactttggctcatatgtgactcacgagaccaagcactttatatacttttatctggggcaggtggccatcctcctgtttaagagcggctag

SEQ ID NO: 186094 - DNA, 270 bp, synthetic construct
  misc_feature 1..270: note = Description of Artificial Sequence: Synthetic coding sequence
  source 1..270: mol_type = other DNA
atgagcgaccggaaggccgtgatcaagaacgccgacatgagcgaggacatgcaacaggacgcggtggattgtgcaacccaggccatggagaagtataatattgaaaaagatatcgctgcctatatcaagaaagagttcgacaagaaatataatcccacctggcactgtatcgtaggccgaaactttggtagctacgttacgcatgaaacgaagcactttatttacttttatttgggacaagtcgcaattctgttgtttaagtcaggttag

SEQ ID NO: 186095 - DNA, 144 bp, synthetic construct
  misc_feature 1..144: note = Description of Artificial Sequence: Synthetic coding sequence
  source 1..144: mol_type = other DNA
atggccgaggtggaggagaccctgaagcggctgcagagccagaagggggtacagggcattattgtggtcaataccgaaggaggatgggaacccctgggccactgcggcgacaggtcgagacccccagcgcagggctgtccttag

SEQ ID NO: 186096 - DNA, 291 bp, synthetic construct
  misc_feature 1..291: note = Description of Artificial Sequence: Synthetic coding sequence
  source 1..291: mol_type = other DNA
atggccgaggtggaggagaccctgaagcggctgcagagccagaagggggtccagggcatcatagtggttaacactgagggtatccccataaaaagtaccatggacaaccctaccacgacacagtatgcatctctgatgcacagcttcatactgaaagcgagaagtacagtgcgcgatattgaccctcaaaacgatctgacgttcctcaggattcggtctaaaaaaaatgagatcatggtcgcccctgacaaggactacttcctgatcgtgatccagaaccctactgaatag

SEQ ID NO: 186097 - DNA, 366 bp, synthetic construct
  misc_feature 1..366: note = Description of Artificial Sequence: Synthetic coding sequence
  source 1..366: mol_type = other DNA
atggccgaggtggaggagaccctgaagcggctgcagagccagaagggggtacagggtattattgtggttaacacagaaggaatcccaatcaagagtactatggataacccaacaaccacacagtatgcttctttaatgcacagtttcatactgaaagcccgatccaccgtgcgcgatatcgacccacagaacgacttgacctttcttcgtattcggagcaaaaaaaatgagatcatggtggctcctggcaagggttcgtccacaagtccatgtagaaaccgtcctcacggtaccttctcagttgcacaccaggaatcttggcactccggggtttcccgcggctccaaacagggaccaagaagctag

SEQ ID NO: 186098 - DNA, 291 bp, synthetic construct
  misc_feature 1..291: note = Description of Artificial Sequence: Synthetic coding sequence
  source 1..291: mol_type = other DNA
atggccgaggtggaggagaccctgaagcggatccagagccacaagggagttattggcaccatggtagtgaatgccgaggggatccctatcagaacaaccttggacaatagcacgactgttcagtacgcgggactactgcaccatcttacaatgaaagccaagtccaccgtgcgggacattgatccccagaacgatttgaccttcctgagaatccgaagcaaaaaacatgagatcatggtcgctcccgacaaagagtacctactcattgttatccagaacccctgtgagtag

SEQ ID NO: 186099 - DNA, 165 bp, synthetic construct
  misc_feature 1..165: note = Description of Artificial Sequence: Synthetic coding sequence
  source 1..165: mol_type = other DNA
atggccgaggtggaggagaccctgaagcggatccagagccacaagggagtgattggcacaatggtagtgaacgcagaggatccgcgatttgtgacctttaagtatgcaagacagctgaccgcattccaaaggaagagcggccagcagatcacaatcaaagattag

SEQ ID NO: 186100 - DNA, 486 bp, synthetic construct
  misc_feature 1..486: note = Description of Artificial Sequence: Synthetic coding sequence
  source 1..486: mol_type = other DNA
atggaccccaacccccgggccgccctggagcggcagcagctgcggctgcgagagagacaaaaattcttcgaagatattctgcagcccgagaccgaatttgtgttccccctttcccacctgcatctggaatcccaacgcccacccatcgggtccattagcagtatggaggtgaatgtcgatactctggaacaagtggagctgatagacctgggtgatccagacgccgcagatgtgtttctcccctgtgaggatcctcccccgaccccacagtctagcggcatggacaaccacctagaagaactcagcttaccagtccccacaagcgatcgcacaacctcgagaacctcatcatcttcctccagcgactcaagcaccaatctccactcaccaaatccctcagacgatggtgccgacacacccctggcccagtcggatgaagaagaagagaggggtgacggaggggctgagccaggcgcatgtagctag

SEQ ID NO: 186101 - DNA, 486 bp, synthetic construct
  misc_feature 1..486: note = Description of Artificial Sequence: Synthetic coding sequence
  source 1..486: mol_type = other DNA
atggaccccaacccccgggccgccctggagcggcagcagctgcggttgcgtgaacgccagaaatttttcgaagacatactccagcccgagacagagttcgtctttccgctgtcgcatctccaccttgaaagtcagaggcctcctatcggatcaatatcgtctatggaggtaaatgtcgacaccctggagcaggtggagttaatcgacttgggagaccctgacgccgccgacgtcttcctgccgtgcgaagatccccctcctacacctcagtccagcggaatggataaccatctagaggaactgtccctccccgtgccaacatccgacagaaccacgtcacggaccagttcatctagttcctcagacagttccacaaatcttcacagccccaacccaagtgatgacggcgcagatactccactcgcgcagtccgacgaagaagaagagaggggagacggaggcgctgaacctggtgcctgttcatag

SEQ ID NO: 186102 - DNA, 792 bp, synthetic construct
  misc_feature 1..792: note = Description of Artificial Sequence: Synthetic coding sequence
  source 1..792: mol_type = other DNA
atggagagctgggccctggccgtgttccccgagtaccgggtgagcctcctttggtgtctggaacttgctagtcccctgtggagcctgggacaggcaccgcccctgcatgaaacttggtttgtggggcacacttggttccaagggcggggcaaacgtagccccagggcagaagtgtctcgtcctgaaccgggcgcaccactattaggatgctggttgcagtggggcgcgccaagtcccggacccctgtgcttactatttcgcttgtgttcctgcacttgctttgccccactgcctgccggggccgacatggacccgaatccacgcgctgcgcttgagcgacaacagctaagactgcgagaaaggcaaaagttttttgaggacatcttacaacccgagactgagtttgtcttccctctgagccacctccatctggagagccaacggccaccaatcggctcgatcagttccatggaggtgaacgtcgataccctcgagcaagtggagttgatcgacctaggggaccccgatgccgccgatgtgttcctgccatgtgaagatccaccacctaccccacagtcttcgggaatggacaatcatttagaagagctctcactgcccgtccctacaagcgataggaccacatctcgtacctctagcagctctagctctgatagctcaactaaccttcattctcccaatccatcagacgatggcgccgacacacccttggcacagtcggatgaagaggaggagaggggtgatgggggcgcagagcctggtgcttgctcttag

SEQ ID NO: 186103 - DNA, 486 bp, synthetic construct
  misc_feature 1..486: note = Description of Artificial Sequence: Synthetic coding sequence
  source 1..486: mol_type = other DNA
atggaccccaacccccgggccgccctggagcggcagcagctgcggcttagggagaggcagaagtttttcgaagatatcctccaaccagagaccgagtttgtgtttccactctcgcacctgcatctcgaaagtcagcgcccccccattggaagcatctcttctatggaagtgaatgtcgatactttggaacaggtcgagctgatcgacttgggtgacccagacgcagcagacgtgtttctcccttgcgaggatcctcctccaacaccgcagagcagcggtatggataaccacttggaggaattgtccttgcctgtgccaactagcgaccggacgacctcaagaacttcgtcgtccagttcatctgactcaagtacaaatctgcactctcccaacccctcagatgacggcgcagatacgcccctcgcgcaatccgatgaggaagaagagagaggagatgggggggctgagcccggcgcatgttcttag

SEQ ID NO: 186104 - DNA, 339 bp, synthetic construct
  misc_feature 1..339: note = Description of Artificial Sequence: Synthetic coding sequence
  source 1..339: mol_type = other DNA
atggaccccaacccccgggccgccctggagcggcagcagctgcggctacgcgaaagacaaaaattttttgaggacattctgcagccagagacagaattcgtatttcccctcagccacctgcacctggagtctcaacgccctccaatcgggtctatttcctccatggaagtgaatgtcgacaccctagaacaggtcgaactcattgacctgggagacccagatgctgccgacgtatttctcccttgtgaggaccccccaccaaccccgcagtcgagtggcatgccactgtgctttggggactttagcgccagccagccagaacctgatgttcggctgtag

SEQ ID NO: 186105 - DNA, 780 bp, synthetic construct
  misc_feature 1..780: note = Description of Artificial Sequence: Synthetic coding sequence
  source 1..780: mol_type = other DNA
atgggcgccggcaacttcctgaccgccctggaggtgcccgtggccgcgctagccggtgcagcaagcgaccggagagcctcttgtgagagggtgtctcccccaccaccactcccacacttccgccttccaccgctcccgcggagtaggttgcccggtccggttagccgccctgaacccggtgcaccactgctggggtgctggctgcagtggggcgcaccgagtcctggacctctatgtcttctatttagactctgcagttgcacatgtttcgcgccgctccccgctggggcagacatggatccgaatcctagggccgcacttgaaagacaacagctgcgcttgcgtgaaaggcagaagttctttgaggatatattacagccagaaaccgagtttgtttttcctctgagccacttgcatctggagtcacaacgtcccccaataggtagcatttcctctatggaggtgaacgttgatactctggaacaagtggagcttattgatttgggagacccggatgctgccgatgtgttcctcccctgtgaggaccccccacctacgccacagtcatccgggatggataaccacttggaggaattgtccctgcccgtccctacgagcgatcgcaccacatctaggaccagctcaagctcgtccagcgactcttcgaccaatcttcactcacctaacccaagtgatgacggtgcagacaccccacttgcccagagcgatgaggaagaagagcgcggcgacggaggggccgagcccggcgcttgctcttag

SEQ ID NO: 186106 - DNA, 339 bp, synthetic construct
  misc_feature 1..339: note = Description of Artificial Sequence: Synthetic coding sequence
  source 1..339: mol_type = other DNA
atggaccccaacccccgggccgccctggagcggcagcagctgcggctcagggagaggcagaagttttttgaggacatactgcagccggagaccgagttcgttttccccctgagccacctccatctcgaatcacagcggccaccaatcggctctattagcagcatggaggtgaatgtggacaccctggagcaggtggaacttattgaccttggagacccggacgccgcagacgtgttccttccatgcgaggacccccctccgacacctcaatcctccggaatgcccctctgttttggggacttctcggcatcacagcccgagccagacgtcagactttag

SEQ ID NO: 186107 - DNA, 486 bp, synthetic construct
  misc_feature 1..486: note = Description of Artificial Sequence: Synthetic coding sequence
  source 1..486: mol_type = other DNA
atggaccccaacccccgggccgccctggagcggcagcagctgcggctaagagaacgccagaaattcttcgaagatattctgcagcccgaaaccgagttcgtgtttccactgtcccacctgcaccttgaaagccagcgaccccctatcggtagcatctccagcatggaggtgaacgtggatactctagaacaggtggagctgattgacctcggcgaccccgacgctgcggatgtattcctaccatgcgaggatccacctcccactcctcagtcctccggtatggacaaccatctggaagagctgtcactgccagtacctaccagcgataggactacttcgcggacttcatcgtcgtcctctagcgattcctccaccaacctgcattctcccaaccccagcgacgacggtgccgataccccactggcccagagtgatgaggaggaggagcgcggggatggaggggctgagcccggagcatgcagctag

SEQ ID NO: 186108 - DNA, 519 bp, synthetic construct
  misc_feature 1..519: note = Description of Artificial Sequence: Synthetic coding sequence
  source 1..519: mol_type = other DNA
tgaacctggttccagggccggggcaagcggagcccccgggccgaggtgtcccgtcctgaacctggcgcaccactactcggttgctggctccaatggggggctccctctccagggccattatgtctactgttccgcctttgtagttgtacctgtttcgcccctctgcctgcaggagcggatatggacccaaatccacgagccgccctggagcgtcagcaacttcggttgagagaacgacagaagtttttcgaggatatcctccaacctgaaacagaatttgtcttccctctgtcccatcttcatcttgaatctcagcggcctccgattggctccatctccagtatggaggttaatgtggatacattggagcaagtggaactgatcgatctcggcgatcccgacgcagccgacgttttcctgccatgcgaagacccaccccccacaccccagagcagcggcatgcccttatgtttcggcgatttcagcgcctcccagccagagcctgacgtgaggctctag

SEQ ID NO: 186109 - DNA, 15516 bp, synthetic construct
  misc_feature 1..15516: note = Description of Artificial Sequence: Synthetic coding sequence
  source 1..15516: mol_type = other DNA
atgcacagcagcagctacagctaccggagcagcgacagcgtgttcagtaataccacctctacgcggacaagcctcgactcgaatgaaaaccttctgcttgttcactgcgggccaacactgatcaactcctgtatcagctttgggtctgagagttttgacggacaccgcttggaaatgctgcagcagatcgcaaaccgggtccagagggattctgttatttgcgaagacaagttaattcttgccgggaacgctctccagtccgactctaagagactggagagcggcgtccaattccagaacgaggctgaaatcgccggttacatcctcgagtgtgaaaaccttctcaggcagcacgtcatcgacgtgcagattctgatcgatggcaagtattaccaggcggatcagttagtccaaagggttgcgaagctgcgcgatgaaattatggccctcagaaacgagtgctccagcgtttacagcaagggccgcatactcaccactgaacagacgaagttgatgatctcagggatcacacagagcctcaacagcggattcgctcagaccctccacccgagtctaactagcggccttacacagagcctaaccccgtccctcacctcctcgagtatgactagcggtctgtcatctgggatgacttcccggttgactccctctgtaacgccggcttacacaccagggtttccttccggcctggttccaaacttctcctccggggtcgagcctaactcactacagacattgaagcttatgcagattcgaaaacctttgttaaagagtagcctactcgaccaaaacttgaccgaggaagagattaatatgaaatttgtgcaggatcttctcaattgggtggatgaaatgcaagtccagctagataggacggagtggggctccgacttacccagcgtggaatcccacctggagaaccacaagaatgtccacagagctattgaagaatttgaatcatcactcaaggaggccaagatcagtgagatacagatgactgccccattgaagctgacgtacgctgagaaactgcacaggcttgagtcacaatacgcaaagcttctgaataccagccgcaatcaagagagacacctagatacactgcacaacttcgttagccgtgcgactaacgaacttatctggctgaatgagaaagaggaggaagaggtcgcatatgattggagtgagagaaacacaaacatcgctcggaagaaagattaccacgccgaacttatgagagagctggatcaaaaggaagaaaacattaagtccgtgcaggagatagctgagcagctccttctagagaatcatcccgcccgtcttaccattgaagcttaccgggccgcgatgcaaacacagtggagctggatcttacagctttgccagtgtgtcgaacagcatatcaaagaaaacacggcgtactttgaattcttcaatgatgccaaagaagcgaccgactatcttagaaatttgaaggacgctattcagagaaagtattcgtgtgatcgatctagtagcatccataagctcgaagacctggtccaggagagtatggaagaaaaggaagagctgctgcagtataagtctacaattgccaatctgatggggaaggccaaaaccattatccagctgaaacctcggaatagcgactgtccattgaagacctcgattcctatcaaggctatttgtgattatcgtcagattgaaataaccatctacaaagacgacgaatgcgtactcgctaacaattctcatcgggccaagtggaaagtcattagcccaacaggaaatgaggcaatggttccaagcgtgtgttttactgtgcccccaccgaacaaagaagccgtggaccttgcaaatagaattgagcagcaataccagaatgtcctgaccctgtggcatgaatcgcacatcaacatgaaatctgtcgtaagttggcactacctgatcaatgagattgatagaatccgtgcctctaatgtcgcctccataaagaccatgctgcctggcgagcaccagcaagttctgtcgaacctgcagtctaggtttgaagacttcctggaggactcccaggagtcacaggtgttcagtgggtccgatataacccaactggagaaggaggtcaatgtatgtaaacagtactatcaagagctgttgaaatccgccgagcgcgaggaacaggaagagtctgtgtataacttgtacatttcagaggttcggaacattaggcttcgcttagagaattgtgaagataggttgatacgacaaatacggacacccctggaaagggacgatttgcatgagtccgtgtttaggataaccgagcaggagaaactcaagaaagagctggaacgccttaaggacgacttagggacgatcaccaacaaatgcgaggagttcttcagtcaggccgcagcctcctcctctgtcccaacattgaggtccgagctgaacgtcgtactacaaaacatgaatcaggtttatagcatgtcatccacatacatcgacaagctgaagaccgtcaacctcgttctgaagaatacccaggccgccgaggcactggtgaaactttatgagactaagctgtgcgaggaggaggccgtcattgctgataagaataacattgagaatctcattagcacactcaaacagtggcggtccgaggtcgacgagaaacggcaggtgtttcatgctctggaagacgagctgcaaaaggccaaggcaatcagcgatgaaatgtttaagacatataaggaacgggacctcgattttgattggcataaagagaaggcagaccagctagtggagcgctggcaaaatgtgcacgtacagattgacaatcgtctgagggacttagaaggcatcgggaagtcacttaaatattaccgggatacttaccaccccctcgacgactggatccagcaggtggagacaacccagcggaagattcaggagaaccagccagagaactctaaaactttagccacccagctgaaccagcagaagatgctggtcagcgaaattgagatgaaacagagcaaaatggatgaatgccagaaatacgccgaacaatacagcgcaactgttaaggactatgagcttcagacaatgacctacagggctatggtggactcacaacagaagagcccggtgaagcgcagacgcatgcagagctcggccgacctgattatccaggaatttatggatctgcggactcgctacacagctctggtcactctgatgacccagtatatcaagttcgctggggactcactgaagcgcctggaagaagaggaaaagtccctcgaggaagagaagaaagagcacgtcgagaaagccaaagagctgcagaagtgggtgtccaatatcagcaagaccctgaaagatgccgaaaaagcggggaagcctccttttagcaaacagaaaattagctccgaggaaatttccaccaagaaagagcagctgtccgaagcactccagacaattcagctgtttctggccaaacacggggataagatgactgatgaggaaaggaatgaattggaaaaacaggtcaaaaccttacaggagtcatacaatctgctgttctctgagtccctgaaacagctgcaggaaagccagacatctggggatgtaaaggtggaggaaaagatagtagctgaacggcagcaagagtataaagaaaagctgcaggggatctgtgatttgttgacccagacggagaacagactgataggacatcaggaggccttcatgatcggcgatgggacagttgagctgaagaagtaccagtccaaacaagaagagctccagaaggatatgcaaggctccgcgcaggccctggccgaagtagtgaagaacaccgagaatttccttaaagagaatggtgaaaaactgtcacaggaggacaaagcactgattgaacagaagttgaacgaggcaaagatcaagtgcgagcagctgaatctgaaagctgaacagagtaaaaaagagttggataaagttgtcactaccgcgatcaaggaggagaccgaaaaagtggcagctgtcaaacagctggaggagagcaagactaagattgagaaccttctggattggttatctaacgtggacaaggacagcgaacgagccggcacaaagcacaaacaggtcatcgagcagaacggaactcacttccaggaaggtgatggaaaatcagctattggcgaagaagatgaagtcaatggtaatcttctggagactgatgttgacgggcaggtggggactacccaagagaacctgaaccagcagtaccaaaaagtcaaggcccagcacgaaaagattatctcccagcaccaggcggttataattgctacccagagtgctcaagtgttgttggagaagcaaggtcagtatctgtctccggaagagaaagaaaagctgcagaaaaatatgaaggaacttaaggtgcattacgagactgcccttgctgaaagcgaaaagaagatgaaattgactcacagtctacaggaagaactggagaaatttgatgcggactacaccgaatttgagcactggcttcagcagagcgagcaggagctggaaaacctggaggccggagcagacgacattaacgggctgatgacaaagttgaaacggcaaaaaagctttagtgaggatgtgatcagtcacaaaggcgatctcagatacattaccatcagtggcaacagagtcctcgaagcagcaaaatcctgctctaaacgtgatggtggaaaggtggatacctccgccactcatagggaagttcagcgaaagctagaccatgctacggaccggtttcgttccttgtacagtaaatgcaatgttctgggcaataacttaaaagacctggtggataagtaccagcactacgaggatgcatcctgcggcctgttggctggtctccaggcttgtgaggccaccgctagcaaacacttgtcagagcctattgccgtggatccgaaaaaccttcaaagacagctggaggagactaaagctttgcagggtcagatctccagccagcaggtcgctgttgagaaactaaagaaaaccgcagaggtgctcttagatgcgagggggtcactgctgcctgctaaaaatgacattcagaaaaccctcgacgatatcgtgggccgctacgaagatctctctaaaagtgtgaacgagagaaacgagaagctgcaaatcaccttaactaggagtctgagcgtgcaagacggactggatgagatgttggactggatgggcaatgtcgagagctccctgaaggaacagggtcaggtgcctctcaactccacagcgctgcaggacatcatcagtaagaatatcatgttggagcaggacattgcaggtcgccagagttctattaatgctatgaacgagaaggtcaaaaaattcatggagacaacagacccctctacagccagttctctccaggctaagatgaaagacctgtccgcacgattctccgaggcgagccataagcacaaggagactttggcgaagatggaggagctgaaaactaaagtggagttatttgaaaacttatccgaaaaactgcagacctttctggagaccaagacacaggccctaaccgaggtggatgttcccggaaaggatgtgaccgagttatctcagtacatgcaggagtctacttcagagtttctcgaacataaaaagcacctcgaggttctccactccctcctgaaggaaatttcatctcatgggttgccttcagataaggccttggtgttggaaaagacaaataatctgagcaagaaatttaaggagatggaagacaccataaaggaaaagaaagaggctgtgacaagctgccaagagcaattggatgccttccaagtgctcgtgaaatctcttaagtcctggataaaagagaccacaaaaaaggttccgatcgtgcagccctcttttggcgctgaagatctcgggaagtcactggaagacaccaagaagctccaagaaaagtggtcattaaagaccccagagattcagaaagttaataatagtggtatttctttgtgcaatttaatttctgctgttactactcccgccaaggccatcgccgcagtaaagtctggcggggcggtgttgaacggggagggcaccgccaccaacacagaagagttctgggccaacaaaggtttaacctctatcaagaaggacatgaccgacatatcacacgggtatgaagacctgggccttcttttgaaggacaaaatcgcggagttgaacaccaagctgagcaagctgcagaaagcacaggaagagtcctcggccatgatgcagtggctgcagaaaatgaacaaaactgccactaaatggcagcaaacacccgctcccaccgataccgaggccgtgaagacccaagtggaacagaataaaagctttgaggccgagctgaagcagaatgtgaacaaggtccaagaactgaaggataaactgaccgagcttcttgaagaaaatcccgatacacccgaggctccgcgatggaagcagatgcttacggagatcgatagcaaatggcaagagctgaaccagttaacgatagatcgccagcagaagctggaggaatcttcaaataacctgactcagtttcaaaccgtggaggcccagcttaagcagtggttagtcgaaaaggagctaatggtgtccgtgttgggtccactgagcatcgatccaaatatgttgaacactcagagacagcaggtccagattcttctgcaggagtttgcaacacgtaaacctcagtatgagcagctgaccgctgccggccaggggatcctgtcccggccaggcgaggatccatctctgaggggaatcgtcaaagaacaactggcagccgtaacgcagaagtgggacagcctgacgggccagcttagtgataggtgcgattggatcgatcaagccattgttaaatcgacccagtatcagagcttgctccgctccttgtccgacaaactgtcagaccttgataacaagctctcaagctctcttgctgttagcactcacccagacgcgatgaatcagcaactcgagaccgctcagaaaatgaaacaagagatacagcaagaaaaaaaacagattaaggttgctcaagccctttgcgaggacttgagcgccctggtcaaagaagagtatctgaaggcagaactttcaaggcaactggaggggatactcaaaagctttaaggatgttgaacaaaaagctgagaaccatgtccagcatctgcagagtgcctgcgcgtcatctcaccagtttcaacaaatgagtcgagacttccaggcatggttggacactaagaaggaggagcagaacaagagccatcctatctcggccaaactagacgtgctcgaatccctcatcaaagatcataaggactttagcaaaaccttgaccgcacagagccacatgtacgagaaaactattgccgagggagagaatctgctgcttaagactcagggctcggagaaggctgcactgcaactccagctgaatactattaagaccaattgggacaccttcaataagcaggtgaaggaacgggagaacaaactcaaggaatctctggaaaaagctctgaaatacaaggagcaagtcgaaactctatggccttggattgataagtgccagaataatttggaggaaatcaagttctgcctggatccggctgagggcgagaatagcattgccaagctgaagtcactgcagaaggaaatggatcagcacttcggcatggttgaacttctcaacaataccgcaaatagcctgctctccgtctgcgagatagacaaagaggttgtaaccgatgagaataagagcttgatccagaaagtagacatggtgacagaacaactgcactcgaagaagttctgtctggagaatatgactcagaagtttaaagagttccaagaagtttcaaaagagtcaaaacgtcagctgcagtgcgccaaagagcagctggacattcacgatagtctggggagccaagcgtactccaacaagtatctcactatgcttcagacccagcagaaatcactgcaagcgttaaaacaccaggtggacttagctaagcggcttgcccaggacctggtcgtggaagcttcagattctaagggcacctcagatgtgctgctccaggtggaaactattgcgcaggaacacagtactctgagtcagcaggtggatgagaagtgttcattcctagagactaagcttcagggaatcggtcattttcagaacactattagggagatgttctctcagttcgccgagttcgacgacgaactggacagtatggcccctgtgggtcgcgacgctgagaccttgcaaaagcagaaggagacaattaaagcatttctgaagaagcttgaggccctgatggcatccaatgataatgctaataaaacctgtaagatgatgttggccacagaggagacatcccccgacttagtgggcatcaaaagggatttggaggctctgagtaagcagtgcaataaactgcttgatagagctcaggcccgggaggaacaggtcgagggaaccatcaaaaggcttgaagagttttactcaaaactgaaggagttcagtatcctgctccagaaagccgaagagcatgaagaatcacagggacccgtgggaatggaaaccgagactattaatcagcagctcaatatgtttaaagtgtttcagaaggaagagatagaaccactgcaggggaagcagcaggatgtcaactggctcggtcagggccttatccaaagcgctgctaagtccacttctacgcaaggtcttgagcacgatctggacgatgtcaatgccaggtggaaaacacttaacaaaaaagtggcccagagggccgctcagctgcaggaggcactgctgcactgcgggcgctttcaagatgctttggagagtctcctgtcctggatggtagacaccgaggagctagtcgcgaaccagaagcctccatctgccgaattcaaggtggtcaaggcccaaatacaggagcaaaagctcctccagcggttgctcgacgatcgaaagagcacagtggaggtcataaagagggagggcgagaaaatcgccaccacagctgagccagccgataaggtgaagatccttaaacagctctcacttttagattctaggtgggaggccctgttgaataaggctgagactcggaacagacagcttgagggaattagtgtcgttgcgcaacagttccatgagactcttgagccgctaaacgaatggctaaccactatcgaaaagcggttagtcaactgcgagcccatcggaactcaggcatcaaaacttgaggaacagatagctcagcataaagccttggaggacgacatcatcaaccacaataaacatttacaccaggctgtgtcaattggccaatcattgaaggtactgtctagcagggaagacaaggacatggtccagagcaaactagactttagtcaggtgtggtacatcgaaatccaggagaaaagccactctcgttcggagttgttgcagcaggccctctgtaacgccaaaatcttcggtgaagatgaggtcgaactgatgaattggctgaatgaggtgcatgataagctatccaaactcagcgtgcaggactattctacagaaggtttgtggaagcaacaaagcgaacttagagtgctccaggaggacatcctcctcagaaagcagaacgtcgatcaggctcttctgaatggacttgagctgttaaaacagacaaccggggatgaagtcctgattattcaggacaaactcgaggctatcaaggccagatataaagatattactaagctatcgacagacgtggccaaaacattggagcaagctctgcagctggctagaaggctccactccacccacgaggaactctgtacctggctcgataaggtcgaggtggaactgctcagttacgagacccaagtgctcaagggcgaagaggcctcacaggcccagatgcggcccaaggagctgaaaaaggaagccaagaacaacaaggcgttgttggactccctgaacgaagtttccagcgccctgctggagctagttccatggcgcgctcgtgaaggtctggagaagatggtggcggaagacaacgaacgataccggctcgtatccgatacaattacccagaaggtagaagagatcgatgccgcgattctcaggtctcagcagtttgaccaggccgcagacgccgaactgtcttggattaccgaaacagaaaaaaagctcatgagtctgggcgacatccggctggagcaggatcaaaccagcgctcagcttcaggttcagaaaacttttactatggaaattctgcggcataaagacatcatcgacgatttagtcaaatctgggcacaaaatcatgaccgcttgcagcgaagaagaaaaacagtccatgaagaagaagctggacaaagtgttgaagaattacgacactatctgtcagatcaattctgaacgataccttcagctggaacgagcccagagcctggtcaaccagttctgggaaacgtacgaggaattgtggccctggctcacagaaacacagagcattatttcacagcttccagctcccgctctggaatatgagaccctgcggcagcagcaggaagaacatagacagctccgagaactgatcgctgaacataaacctcatatcgacaaaatgaacaaaacaggccctcagttgttagaactgtcacctggagaaggattcagtatacaagaaaaatacgtagcagctgatactctgtactcacagatcaaggaagacgtgaaaaagcgcgccgtagctctagatgaagctatatcccagtcaacccagtttcatgacaaaatcgatcagatactggagtccctggaacgcattgtagagagacttaggcagcccccctctatctcagccgaggtcgaaaagataaaggaacagatctccgaaaacaagaatgtaagcgtcgacatggagaagctgcagccgctgtacgagacgctcaagcagagaggcgaggaaatgatcgcccgctctggcggcactgataaggatatttcagctaaagccgtgcaggacaaactggatcaaatggtcttcatttgggaaaatatccacaccctggtggaggaaagagaagcgaaacttctagatgtcatggaactggccgagaagttctggtgtgatcacatgtctctcatcgtgaccattaaagatacccaagacttcattcgggatctggaagaccctggcatcgaccccagcgtggtcaagcaacagcaggaagccgccgagaccatcagggaagagatcgacgggctgcaggaagaactggacatcgtgattaatctcgggagtgaacttattgcggcatgtggcgagccggataagcccatcgtgaagaaatcaatcgacgagcttaattcggcgtgggattcattgaataaagcttggaaggataggattgacaaattggaagaagcgatgcaggcggccgtgcagtaccaggatggtctgcaggccgtctttgactgggtggatattgccgggggaaagctcgcctccatgtcccctataggcaccgatctggagaccgtgaaacagcaaatcgaagagctcaaacaatttaaatcagaagcatatcagcaacagattgaaatggaacgcctcaatcaccaagccgaattgctgctcaagaaggtgaccgaggaaagtgacaagcatacagtacaggatccgctgatggagttaaagttaatctgggacagcttggaggagcgtattatcaatcgacaacataaacttgagggggctctcctggcattaggtcagtttcaacacgctctagatgagctcctggcctggctaactcacaccgaaggactcctgtccgaacagaaaccagtcggcggggatccaaaagccatcgaaatcgagctggccaagcatcacgtgctgcagaacgatgtcctggcccaccagagcaccgtggaggcggttaataaggctggcaacgatctcatagaatcgagcgccggggaggaagcttctaatcttcaaaacaaactggaggttctgaaccagaggtggcagaatgtgctggagaaaaccgaacagcgcaagcagcagttagacggggccttgcgccaggcaaaaggctttcatggcgagatagaggatttacagcagtggcttactgacacagagcggcacctgctggcaagtaagcctctgggagggttgccggaaactgcaaaggaacaactgaatgttcatatggaggtgtgtgccgcattcgaagcaaaggaggagacatataagagtctaatgcaaaagggccagcagatgctcgccagatgtcctaaatccgccgagacaaacattgatcaagatataaataacctcaaggagaagtgggaaagtgtggaaaccaagctcaatgagagaaagacaaagctggaggaggctctgaacttagccatggagtttcataacagtttgcaggacttcatcaattggcttactcaggcagagcagacactgaacgtggcatcccggccatcccttatcctggacacagttcttttccaaattgatgaacacaaagtgtttgcgaacgaagtcaattcacacagggaacagatcatcgagctggacaagactgggacgcacctgaagtatttcagccagaaacaagatgtcgttctgataaagaacctccttattagcgtacagtcacgttgggaaaaagtggtgcagcggctggttgaacgcgggcgatcactggatgacgcaagaaagagggccaaacagtttcacgaagcctggtccaaattaatggagtggctggaagagtccgaaaaatccttggatagtgaattggagatcgccaacgacccagacaaaattaagacccagctggcacagcacaaggagttccagaagtcgctcggtgcaaaacacagcgtgtatgatacaactaatcggacaggtcggtctctcaaagaaaagacgtccctcgcagacgacaatctgaaactagacgatatgctgagtgagttgagagacaaatgggataccatctgcggtaaatcagtagaaaggcagaacaaattggaagaagctcttctcttcagcgggcagtttaccgacgccctgcaggccctgattgattggttatacagggtggagccgcagcttgccgaagatcagccggttcacggggacattgaccttgtgatgaatctgatagacaatcataaggcgttccagaaagaacttggtaagcgtaccagcagtgttcaggctttgaagcggtcagccagagagctaattgaagggagtcgggacgatagcagctgggtgaaggttcagatgcaggaactgtcgacgaggtgggaaacagtgtgcgcgctgtcaattagcaaacagactcgactggaggcagcactcaggcaagccgaggagtttcacagcgtggtgcacgcattgttagaatggctagcagaggcggaacagacactcaggttccacggcgtcctccctgacgatgaagacgccttgaggaccctcatcgatcagcataaggagtttatgaaaaagttggaagagaaaagggccgaactaaacaaggccactactatgggggacactgtactggctatttgccacccagactctataaccacgattaagcattggatcactatcatacgggctcgtttcgaggaagtgctcgcttgggctaagcaacatcagcagcgattagcatccgcactggcaggcctgattgctaagcaggagctgctggaagctctcctagcttggctgcagtgggcggaaactacgttgacagacaaagataaggaggtcataccgcaggagatcgaagaggtcaaggccctcattgcagaacaccagacatttatggaagagatgacacggaagcagcctgatgtagacaaagtcactaaaacctacaagcgacgcgcggctgacccaagctctctacagtcacacatcccggtccttgacaaaggcagggctgggcggaagagatttcctgcctcctcattatatccctcagggtcccagacccagatcgaaacaaagaatcctagagtgaatctgctcgtgtccaagtggcagcaggtgtggctactcgccctggaacgcagacggaaattaaacgacgcccttgataggcttgaggaactgcgggaatttgccaactttgacttcgatatctggaggaaaaagtatatgcgctggatgaaccataagaaatcgcgagtgatggacttttttagacggattgacaaggaccaggatggaaagattactcggcaagagtttatagacggcattctctcttcaaagtttccaacttcaaggctagaaatgagcgccgttgcagacatattcgatagggatggggacgggtacattgattattatgagtttgtagcagcactccaccctaataaggacgcctataagcctattacagatgccgacaaaatagaagatgaggtcactagacaggttgctaaatgtaaatgtgccaaaagatttcaggtggaacagataggcgataacaagtataggttttttctcggcaatcagtttggggacagccagcaactcagattagtgaggattttgaggagtaccgtgatggtacgggtgggcggagggtggatggcactcgacgagtttctcgtcaagaacgacccctgtcgggccaaaggacgaacgaatatggagttaagagagaagttcatattggccgatggtgcaagccagggaatggctgccttccgacctaggggacgtcggtcgcggccatccagtcggggagcttccccgaaccggtccacctccgtgagcagccaagcagcccaggccgcttcgccacaggttccagctacgaccacacctaaaattctccatcctctcacacgtaattacgggaagccttggttaactaactctaagatgagcaccccttgcaaggccgccgagtgttccgatttccccgtccctagcgctgaaggtacccctattcagggttccaaactgcgcctcccagggtatctcagcggcaaaggatttcatagcggtgaagactccggtctaatcactaccgccgcggccagagtccgcacccagttcgcagattctaaaaagaccccgagcaggcccgggtctagagccggctccaaggcaggctcacgagcttcctctaggcgaggaagtgatgccagtgattttgacatctcagagattcagtctgtctgcagcgatgtagagacagttccgcaaactcaccgcccaaccccaagggcaggaagccgccccagtaccgccaaacctagtaaaatcccaactccccagcggaaaagccccgcaagcaagttggacaagtccagcaaaagatag

SEQ ID NO: 186110 - DNA, 12603 bp, synthetic construct
  misc_feature 1..12603: note = Description of Artificial Sequence: Synthetic coding sequence
  source 1..12603: mol_type = other DNA
atggccggctacctgagccccgccgcctacctgtacgtggaggagcaggagtacctccaggcttatgaagatgttttggaaaggtacaaggatgagagggataaagtccagaagaagaccttcactaagtggatcaatcaacatctgatgaaggtgagaaaacacgttaatgacctgtatgaggatctccgggacggtcacaatctaatctcacttttagaggtcctgtcaggagatacgctcccccgggagaaggggcgaatgcgctttcatcgcctgcagaatgtccagatcgcattggactacttgaagagacgacaggtgaagttggttaacattagaaacgatgatatcacagatggtaaccctaaactcacgctcggacttatctggactatcatcctccatttccagatttctgatatccatgtgacaggcgagagcgaagacatgtcagccaaggagagattgcttctgtggacacagcaggcaacagagggttacgcaggcatccgctgcgaaaatttcaccacctgctggcgcgatggtaagttatttaatgccattattcacaagtacaggcctgaccttatcgatatgaatactgttgccgtgcagagtaatctcgcgaaccttgaacatgcattttacgtcgccgagaagattggtgtgattcgtctgctggaccctgaagatgtcgatgtcagcagcccggatgaaaaaagtgtgattacttacgtctcttctctgtacgacgcctttcctaaggtgccagaggggggcgaaggcatcggcgccaacgacgtggaagtgaagtggatcgaataccagaacatggtcaactatctcatccaatggatccgccaccatgtcactaccatgtccgagcgaactttcccaaacaatcccgtagagctgaaggcattatataaccagtacctgcagttcaaagagactgaaattccaccaaaggagacagagaagtccaaaattaaaagactctacaaactgttggaaatctggatcgaattcggccggatcaagttactccagggctaccacccaaacgacatcgaaaaagagtggggtaagctaatcattgccatgttagagcgcgaaaaagccctgcgtcccgaagttgaaagactcgagatgctgcaacagattgctaatcgggtgcagagggatagcgttatctgtgaagacaaacttattctggccggtaacgccctgcagagtgactccaaacgactcgaatcaggtgtccagttccaaaatgaggccgaaatcgcagggtatatccttgagtgcgagaatctcctgcgacaacatgtcatcgatgtacagattctgatagatggcaaatactatcaggcagatcagttagttcaacgggtggctaaactgagggacgagattatggcccttcggaatgaatgttccagtgtgtactcaaagggacggattttaactacagaacagacaaagctcatgatcagtggcatcactcaatccttaaattcaggctttgcccagacattgcatccctccctgacaagtggcttaacccaatcgcttacaccttcactgacaagttcgtccatgacaagtggactgtcttcaggcatgacatcccgactgacaccatctgtgacacctgcctacacacctgggtttcccagcggactggtccccaatttttcaagcggcgtggagccgaactcgcttcagaccctgaaattgatgcagatcagaaagcctttgctcaaaagcagcttattggaccagaatctgaccgaggaagagattaatatgaaattcgtgcaggaccttttgaactgggtggatgaaatgcaggtgcaactcgaccggacagaatggggcagcgacctgccctcagtggagtcacacctcgagaaccacaagaacgttcacagagctattgaggagtttgaatcaagcctaaaggaggccaagatatctgagatacagatgaccgcacctctgaagctcacgtacgctgagaaactgcacagactcgaatcacagtacgctaagcttctgaacacatctcggaatcaagagcggcacctagacactctccacaattttgtcagtcgggctactaacgaacttatttggctgaacgagaaggaagaggaggaggttgcctatgactggtctgaaaggaacacaaacatcgcccggaaaaaagattatcatgccgagctcatgagagagctggaccagaaggaagagaacatcaaatcggtgcaggaaatcgccgagcaactgctgctggaaaatcaccccgctcgcttgaccatcgaggcctatagggccgcaatgcagactcagtggtcttggatccttcagctgtgccaatgtgtggaacagcacatcaaggaaaatacggcctactttgagttttttaacgacgcaaaggaagctactgactacctacggaaccttaaggatgcaatccagcgtaagtacagttgtgatcggtcctcttctattcacaagctggaggacttagtccaggaaagtatggaagagaaggaggagctgttgcagtacaagtctactatcgccaacttgatggggaaggcgaagactatcatacaactcaagcctcgtaactcagattgtcccctgaaaacctcaattcctatcaaggctatatgtgattaccgccaaatagaaatcacgatttataaggacgatgaatgcgttctcgccaataattcgcaccgggccaaatggaaggttatcagccccactgggaatgaagcaatggtcccctctgtgtgttttactgtaccacctcctaataaggaagctgttgatttggcgaaccgcatagagcagcagtaccagaatgtgctaaccctctggcacgagtctcacattaatatgaaatctgtcgtgtcatggcactatcttatcaacgagatagatcggattagagccagcaacgtggcgtccatcaaaactatgcttccgggggagcaccagcaggtgctctcaaatctgcagtccaggttcgaggatttcttggaggattctcaggaatcccaggttttcagcgggtcagacatcactcagttggagaaggaggtcaacgtgtgcaagcagtattaccaagaactgctgaaatccgcggaaagggaggaacaagaggagtccgtgtacaacttatacatatcagaggtgcgaaatatcagactgagactagaaaattgcgaagatcgactcattagacagattcggacaccactggagagggacgacttacacgaatccgttttccgcataaccgagcaggagaaattaaagaaggagttagaacgtttgaaggatgatttgggcactatcactaacaagtgcgaggagttcttctcacaggctgctgcctcatcatccgtccctacgttgcggtcagaactgaacgtagtgctccagaacatgaatcaagtctacagcatgtcaagcacatacatcgataagcttaaaaccgtcaatctcgtccttaaaaacactcaggccgcggaggcgctggtgaagctgtacgaaactaaactgtgtgaggaggaagcagttatcgccgacaagaataacattgagaatctgatcagcaccctgaaacagtggaggagtgaggtcgacgaaaagagacaggtctttcatgctttggaggacgaactccagaaggccaaagcaatctccgatgagatgttcaagacatataaggagcgggatctggatttcgactggcacaaggaaaaggcggaccagctcgtggagcgatggcaaaacgtgcacgtacagattgacaatcgcttaagggaccttgagggtattggaaaaagtctcaagtactatcgcgacacctaccatcctctggatgattggatccagcaggtcgagacaactcaacgcaagatacaggaaaaccagccggagaatagtaaaactctggctactcaattaaatcagcagaaaatgctagtcagcgagatcgaaatgaagcagtcaaaaatggacgaatgtcagaaatacgcagagcagtacagcgccaccgtgaaagactacgagctccagaccatgacctacagagcaatggtagattctcaacagaaaagccctgtgaagcgaagacgcatgcagtcaagcgcagatctgattatccaggagttcatggatctacggacacgctacacggcccttgtgaccctgatgacccagtatataaagttcgctggagacagcctcaagaggctggaggaggaagagaaatctctcgaggaagaaaagaaagaacacgtagagaaagcgaaggaacttcagaagtgggttagcaacatatcaaaaactttgaaggatgccgaaaaagctggcaaaccaccctttagcaaacaaaagattagcagtgaggaaatctccaccaagaaagaacagctgtctgaggcactccaaacaatccagcttttcctggctaagcatggagacaagatgaccgatgaggagcggaacgagctggagaagcaggtaaagactctccaggaaagctataatcttttatttagcgagtccctcaagcagctccaggagtcacagaccagcggcgatgtgaaggtggaagaaaagctggataaagtaatcgcagggaccatcgaccaaacaaccggcgaagtgctcagcgtatttcaggccgtcctccggggtttgattgattacgacacgggcattcgactgctggagacgcagcttatgatttctggactgatctccccagaactgaggaagtgtttcgaccttaaggacgccaagagccacggactgattgacgaacagattctgtgccaactgaaggaactctccaaggcaaaagaaatcatttcggctgcgagccccacgacaatccccgtccttgacgccctggctcaaagcatgataacagagagcatggccatcaaagtactggagatcctgctttctaccgggagcttggtgatccctgcaacaggcgaacagctcacactccagaaggcttttcagcaaaatctagtgtcatcggccttgttttcaaaggtgttggaacggcaaaacatgtgtaaggacctcattgatccctgtaccagcgagaaggtttctctgattgacatggtgcagagaagtacactacaggagaacaccggaatgtggctcttgcccgtacgccctcaggaaggagggaggatcaccctgaaatgcgggaggaacatatccattctgagagcagctcacgaggggctgattgatcgagaaaccatgttccgcctgctctcggctcaactcttgagcgggggactcataaacagtaattccggccagcgcatgaccgtcgaagaggctgtgcgtgagggtgtcattgatagagacactgctagttcaatccttacataccaggtacaaactggtggcataattcagtcaaaccctgcaaagcgcctaaccgtggacgaggccgtgcagtgtgacctgattacttccagctcagccctcctggtgctggaagctcaacggggctatgtaggcttgatttggccccattccggcgaaatcttcccaacttcctcgtctctccagcaggaactgattacaaacgagcttgcttataaaattctgaatgggcgccagaagatagccgccctctatatcccagaatcatctcaggtaatcggcttggacgccgcaaagcagctggggatcatcgacaacaacactgcatctatcctcaagaacatcaccttgcctgataagatgcctgacttgggcgatttagaggcttgtaaaaacgctagacgttggctgtccttctgtaaatttcaaccgagcaccgttcacgactatcgtcaagaggaggacgttttcgatggcgaggaaccggttaccacacaaacctcagaggaaaccaaaaagctgttccttagctatctaatgataaactcttatatggacgctaacacaggccagagacttttactgtacgacggagacttagatgaagctgtgggaatgctgctcgaggggtgccacgccgaattcgatggtaacacagctatcaaggagtgcctcgatgtcctctccagctctggcgtgtttttgaataacgcctctggccgtgaaaaagatgagtgcactgccaccccgtcctcattcaacaaatgtcactgtggcgaacccgagcatgaggagacacctgagaataggaagtgtgctattgacgaagagtttaatgagatgagaaacaccgttatcaactcagaattcagccagtcggggaagctcgcttccacgataagtatcgacccaaaggtgaacagcagtccaagcgtgtgtgttccttccctgattagctacctcacacagactgagctcgccgatatcagtatgctgcggagcgacagcgagaatatcctgaccaactacgagaaccagagcagagtggagactaatgaaagagccaacgagtgtagccattctaagaacatacagaactttccgtcagatctgattgagaatcccattatgaagtcgaaaatgagtaaattctgtggcgtgaacgagacagagaatgaagataatactaacagggacagcccaatattcgactactccccacggttgagtgccctgctgtcccatgataagctgatgcacagccagggaagtttcaacgatacccacacccctgagagcaacggcaataaatgcgaagcgcccgccctgtctttctcggataagacaatgctcagcgggcagcggatcggggaaaaatttcaagatcagtttctgggtattgcagccattaacatctcattacccggggaacagtatgggcaaaaatccctcaatatgatttcaagtaatccacaggttcagtatcacaatgacaagtatatcagtaacacttcaggtgaggacgagaaaactcacccgggttttcaacagatgcctgaagacaaggaggatgagtccgaaatagaggagtactcctgtgcagtgacgcctgggggagatacagacaatgccatcgtgtcacttacctgcgctactcccctgctggatgagactatatccgcatccgattacgagacaagcttacttaacgatcagcagaataataccggaacggacactgatagtgatgacgacttttatgacacaccgttgttcgaggatgacgaccacgacagcctccttttggacggagatgaccgggattgcctccaccctgaggactacgacacactccaggaagagaatgacgaaaccgctagtcccgccgatgtcttctacgatgtgtctaaggagaacgagaatagcatggtaccccagggcgcaccagtcggtagcctcagcgtcaaaaataaagcgcactgcctgcaggattttctaatggacgttgagaaagacgaactggattccggtgaaaagatccacctgaatccagtaggctccgataaggtcaacgggcagtctctggagactggaagcgaacgcgagtgtaccaacatccttgaaggcgacgagagcgactcattaaccgattacgatattgtggggggcaaagagagcttcacagcaagcctaaagtttgatgatagcggatcatggcgcggccgcaaggaggaatacgtgaccggtcaggagtttcactctgacactgaccatcttgactccatgcagtccgaggagtcgtatggagactatatctacgactcgaatgatcaggacgatgatgacgatgatgggatcgacgaggagggagggggaatccgtgatgaaaatggcaaaccccgttgccaaaatgtcgccgaagacatggatatccaactgtgcgcttctatcctcaacgagaattccgacgagaacgagaacattaacacgatgattctgctcgacaagatgcattcatgcagttctttggagaagcagcagagggtgaacgtggtccagttggcctctccttccgagaacaaccttgttaccgagaaatccaacctcccggagtacaccacggaaatagccggcaagtcgaaggagaacttactcaaccacgagatggtgttgaaggatgtgctcccaccaataatcaaggataccgagagtgagaaaacatttggccccgcctccatctcacacgataacaataacattagctctactagtgagttaggtactgacctcgctaacacaaaagtaaaactaattcagggctccgaattaccggaactcactgactctgtcaaaggaaaagatgagtactttaagaatatgacccctaaagtcgattcctctcttgatcatatcatatgcacagagcccgatctaataggtaaacccgccgaggaatctcatcttagtctaatagccagtgtgaccgacaaagaccctcagggtaatggttctgatctgattaaagggcgagacggcaagagcgatatactcatagaagacgagacctcaatccagaaaatgtacctcggtgaaggagaagtcttggtagagggactcgtggaagaggagaaccgacaccttaaattactgcccggaaaaaatacaagagacagcttcaaactgatcaatagtcagtttcctttcccgcaaatcactaataacgaggaactaaaccagaagggctccctcaagaaagctacagtgaccttgaaggacgagccaaacaatttgcagataattgtgagcaagtcacccgtgcagttcgagaacctggaagagatattcgatacatccgtgagcaaagaaattagtgacgacatcacctccgatatcacgtcctgggaaggtaacacccacttcgaggaaagtttcaccgacggccccgagaaagagttagacctctttacatatctcaaacactgtgcaaaaaacatcaaggccaaggacgtggccaagcccaacgaagacgtccccagccatgtcctaataactgccccgcccatgaaggaacacctgcagctgggggtgaataacactaaggagaagtcgacctccacccagaaggactctcccctaaacgacatgatccaaagtaacgatctgtgttcaaaggaaagcattagcggtggcgggaccgagattagccagtttacacccgaatcaattgaggcgacgctatctatattatctaggaagcatgtagaggatgtgggaaaaaatgacttccttcagagcgagagatgcgctaatggcctgggcaacgacaattcgtccaatactctaaatactgattattccttcctcgagattaataataagaaagagcgtatcgagcagcagctccccaaggaacaggcactatctccacgttcacaggaaaaggaggtgcagatccccgagctgagccaggtgtttgtggaggatgttaaagacatcctgaaaagccgactgaaagagggccacatgaatccgcaggaagtagaagagcccagtgcctgcgcagataccaagattctcattcaaaatctgattaagcggattacaacaagccaactggtaaatgaagcttccactgttcccagtgacagtcagatgtcggacagcagtggcgtttcgcccatgaccaactccagcgaacttaagcctgaatcccgagatgaccctttttgtatcggaaacctcaaatccgagctgctacttaacattttgaagcaggatcagcactctcaaaagatcacgggagtctttgagctgatgagagagctgactcatatggaatatgatttggagaaaagaggaattaccagcaaggtgctccctctgcagttggaaaacatcttttacaaactgctggccgacggctattccgaaaaaatagaacacgtcggtgattttaaccagaaggcctgctccacttctgagatgatggaggagaaaccacacattttgggagacataaagtcaaaggagggcaactattactcaccaaacctggaaaccgttaaggaaataggcctggagagctctacagtgtgggcttccacgctccccagggatgagaagctaaaggacctctgtaatgacttcccatcgcatcttgagtgcacaagcggttccaaagaaatggcctccggcgactcaagcaccgaacaattcagcagcgaattgcagcaatgccttcagcatactgaaaaaatgcacgaatacctgacactgctgcaagacatgaagccgcccctagacaatcaggagtctttggacaataatcttgaagccctgaagaatcagctccgccagctggagaccttcgagctcgggctggccccgatcgccgtcattctaagaaaggacatgaaactggccgaggaattccttaagtcgctgccaagcgatttcccaaggggacacgtcgaggaactctctatttctcatcaatcactgaagacagcattctcctcgctgtcaaacgtgtctagtgagcgcacaaagcagattatgctcgcaatcgattctgaaatgagcaagctcgccgtgtctcatgaggaattcctgcacaagttaaagagcttctcagattgggtcagcgagaagagcaagtcggttaaggacatagagatcgttaacgttcaggattcggagtatgtgaagaaacgcctagagttcttgaagaatgtgttgaaggacctcggccacacgaagatgcaacttgaaaccactgccttcgacgttcaatttttcatctcagaatacgctcaggatttatcccctaatcagtctaagcaattattgaggctcctcaataccacccagaagtgtttcttggatgtacaggagagcgtgaccactcaggttgagagactggaaacccagctccacctcgagcaagatctcgacgaccaaaaaatcgtagccgaacgccagcaagaatacaaggagaaactgcaggggatttgcgatctcctcactcagaccgagaacagactgataggacatcaggaggcgtttatgatcggcgatgggaccgtcgagttgaaaaagtaccagagtaaacaggaagagctgcagaaggatatgcaggggtcggcccaggcacttgccgaggtggttaaaaacacagaaaactttctgaaggagaacggcgaaaaactcagccaggaagataaggccctcattgaacaaaaactgaacgaagctaaaatcaagtgtgagcagctgaatcttaaggctgagcagtctaagaaggagctcgataaggtcgttaccacagccattaaggaggagaccgagaaagtcgccgcagtaaaacagttggaagagtccaagaccaagatagagaacctgctggattggctctccaatgtagacaaagacagtgaaagagcaggtaccaaacacaagcaggtgatagaacagaacgggacgcattttcaggagggcgatgggaagtccgctatcggagaggaagacgaagtgaatggtaacctccttgaaaccgacgttgatggccaggtaggaacaacacaggaaaacttgaatcagcaataccagaaggtcaaagcccagcacgagaaaattatcagtcagcaccaggccgtgatcatcgcgacgcagtccgctcaggtgctcctcgagaagcagggacaatacctgtcacctgaagaaaaagaaaaactccaaaaaaatatgaaggagctgaaagtgcattacgagacagccctggccgaatctgaaaagaaaatgaagttgacacattcccttcaggaagaacttgagaaattcgacgcggactatacagagtttgaacactggctccaacagtccgagcaggaactggagaatctggaagccggagctgatgacattaacggcctgatgactaagctgaagcgccagaagagtttttcggaggatgtgatttcacacaagggagacctccgatatattaccattagtgggaaccgggtcttagaggccgccaagtcttgctcgaaaagggatggggggaaggttgacaccagcgccacgcacagagaagtgcaacgtaaactggaccatgccacagaccgctttcggtcgttgtacagcaagtgcaacgttcttggaaacaaccttaaagaccttgtggataagtatcagcactatgaagatgcttcttgtggattgcttgccggcctgcaagcttgcgaggcaactgcatcaaagcatcttagtgaaccaatcgctgtggacccaaagaacctccagagacaattggaggaaactaaggcgctgcaaggacaaatctcatcccagcaggtggctgtggagaaactgaagaagacggccgaggttctgttggacgcacgcggctccttattgccagccaaaaacgatatacagaagactctagatgacatcgtaggtagatatgaagatctgtcaaagtccgttaatgagcgcaatgaaaagttgcagatcaccctgacaaggtctcttagcgttcaggacggcctcgacgaaatgctcgattggatggggaacgtggagtcttctctgaaggagcaggatgtaggaacaggctattgtaggagcagcgagcagtataagtgtcacgaatag

SEQ ID NO: 186111 - DNA, 22386 bp, synthetic construct
  misc_feature 1..22386: note = Description of Artificial Sequence: Synthetic coding sequence
  source 1..22386: mol_type = other DNA
atggccggctacctgagccccgccgcctacctgtacgtggaggagcaggagtatctgcaagcatatgaagacgtgctggagagatacaaggatgaacgagacaaggttcagaaaaagacgttcacgaagtggattaatcagcatctaatgaaagtgaggaaacatgttaatgatctctacgaagaccttagagacggacacaacttgatttccctgctcgaagttctcagcggagatactttgcccagggaaaaaggaaggatgaggtttcaccgcctgcagaatgttcaaatagcccttgattatctgaagagacgacaagtcaaactagtgaacatcaggaatgatgacatcaccgatgggaatccgaaactcacactgggacttatttggacgatcattctccatttccaaatttccgacatacatgtgactggtgaaagcgaagatatgagcgctaaggagcgcttactcttgtggacgcagcaggccactgaaggttacgcaggtattaggtgtgaaaatttcaccacgtgttggagagacggtaaacttttcaatgcaataattcacaagtacagaccagatctgatcgacatgaacaccgttgccgtacaaagcaacctagcgaacttggaacacgcattctacgtcgccgaaaagatcggcgtgattcggctccttgatcccgaagacgtggatgtctcctcaccagacgaaaagtcggtgattacctacgtgtctagcttgtatgacgcctttcccaaagtacccgaaggaggagaaggaatcggcgccaacgacgtcgaagtgaagtggatcgagtaccagaatatggtgaactatctcatccagtggattcgccaccacgttacaacaatgtctgaacgaacttttccaaacaaccccgtcgagctgaaagcgctctacaaccagtatctgcagtttaaggaaacagaaatcccccccaaagagaccgagaagtctaaaataaaacgactgtataagctgcttgaaatttggattgagtttgggcggatcaaactcctgcagggataccatcccaacgatatcgagaaagagtggggtaaactgataatagccatgttagagcgggagaaagccctgcggccggaggtggaacggttagagatgctacaacagatagcaaatagagtgcagcgcgactctgtcatatgtgaggacaaactcatcctcgccgggaatgccttgcagtcagattccaagcgcctggagtctggcgtgcaatttcagaatgaagctgagattgccggttacatactcgagtgtgagaacctactgagacaacacgtcatagatgtccagattctgattgatggcaaatattatcaggctgatcagctggtgcagagagttgccaaattacgggacgaaataatggcgctcagaaacgaatgcagtagcgtatatagcaagggccgaattcttacgaccgagcaaaccaagctcatgatttccggcatcacacagagcttgaactcaggctttgctcagacccttcacccatctctcacttctggactcacacagagtctgactccttcactcaccagctcatcgatgacctcaggattgtcgtccggcatgaccagtcggctaaccccctccgtgacgcctgcttacaccccagggtttcctagcggactcgtgcctaacttctctagcggcgtggagccaaactctcttcaaaccctcaaattgatgcagattagaaaaccgctcctaaaaagcagtctgctagaccaaaaccttaccgaggaggaaattaatatgaaatttgtccaggacctgctcaactgggttgacgaaatgcaggtacagctcgaccgcacggaatggggaagcgacctgccatccgtggaatctcatctggagaatcataaaaacgtgcacagggctatcgaggagttcgaatcgtctctgaaggaagcaaagatatctgagatacagatgacagcccctctgaagctgacatacgcagagaagcttcatagactcgaaagccagtatgccaagctgttaaacacctctcgcaatcaggagagacatctcgatacccttcataatttcgtgtcacgtgccaccaacgagcttatctggctaaacgagaaagaggaagaggaagtcgcttatgattggagtgagagaaacactaatattgcccgcaagaaggactaccacgctgagctgatgagagagttagatcagaaagaggaaaacattaaaagcgtgcaggaaattgctgaacagctacttcttgaaaatcatcctgcccggctaacaatcgaagcatacagagcagctatgcaaacacagtggagctggatcctccagctgtgccagtgtgtcgagcagcatatcaaagaaaataccgcatatttcgagttttttaacgatgccaaggaagctactgattacctgaggaacttaaaggacgctattcaacggaagtactcatgtgaccggtcgagctccatccacaagctcgaagacctcgtacaagaaagtatggaggaaaaggaagaattgctgcaatataagtctacgatagcgaatctcatgggcaaggccaagaccatcattcagctgaaacctagaaattccgattgtccacttaaaacaagcatacctatcaaagctatatgtgattacaggcagatagagatcaccatttacaaagacgacgagtgcgtccttgcaaataattctcatcgcgcaaagtggaaggtgattagccccaccgggaatgaagctatggtgcctagcgtctgctttacggtaccaccacccaataaagaggctgtggacctggcaaaccgtattgagcaacagtaccagaatgtactaaccctgtggcacgaatctcatattaatatgaagagtgtggtgtcatggcattaccttatcaatgagatagatcgcattcgggcttcgaatgtggcctccattaaaaccatgctccctggcgagcatcaacaggtccttagtaatctccagtcacggtttgaggactttctagaggactcacaggaatcccaggtattttctggatccgatattacacagctggagaaagaggtgaatgtctgtaagcagtactaccaagagctgttaaagagcgccgagagagaggaacaagaggagagcgtttataacctgtacataagcgaagtaagaaacatcagacttcggctggaaaactgcgaggatcggcttatacggcagatcaggactcctctcgaacgagacgacctgcacgagtcagtctttcgaataaccgagcaggaaaagctgaagaaagagctggaacgcttgaaggacgacctggggacaatcaccaacaaatgcgaggaattctttagtcaagctgccgcttcttcctccgttcctaccctaagaagcgaactgaacgttgttttgcagaacatgaaccaggtttacagtatgagtagcacctatatcgataaactcaaaacggtgaatctcgtgctgaagaatacccaagccgccgaggctttggtgaaattgtacgaaacaaagttatgcgaggaagaggcggtaatcgccgataagaataacatcgagaatctgatcagtacactcaaacagtggcgcagcgaggttgatgagaagcgccaggtttttcacgcactcgaggatgaactccagaaagctaaagccatatctgacgagatgttcaagacgtacaaggagcgagatctggattttgattggcacaaggaaaaggcagaccagctcgtcgagagatggcaaaatgttcacgtccaaatcgataaccggttgcgggatctggaaggtattgggaaatccttgaagtattatagggacacataccatcccttggatgactggatacagcaggtcgagactacccagcgaaagattcaggaaaatcaacctgagaattcaaaaacgctggccacccagctgaatcagcaaaagatgttggtgagcgagatcgagatgaagcagagtaagatggatgagtgtcagaagtacgcagaacagtactctgctacagtgaaggattatgaactgcagactatgacttatcgggctatggtagactcacaacaaaaaagcccggtgaagcggcgccgtatgcagagctccgccgacttgattattcaggagtttatggatctccgcactcggtacaccgctctggtgacactgatgacacaatacatcaaatttgcaggcgattcgcttaagagactggaggaggaagagaagtcactggaagaggaaaagaaagaacacgtcgaaaaggcgaaggagctgcagaaatgggtttccaatatttctaaaacactgaaggacgccgaaaaggctggaaaaccacccttttctaagcagaagatctcttcagaagaaatttccacgaagaaagagcagctgagtgaggcactgcagactatacagctgttccttgccaaacatggagacaagatgaccgacgaggagagaaatgagctggaaaaacaggtgaagactctgcaggagagctataatctcctcttctccgagtctttaaagcagctccaggaatcccagacatcaggcgatgttaaagtggaagaaaagctcgataaggtgatcgccgggacaattgaccagacaaccggagaagtactgagcgtgtttcaggccgttttgagggggttaatcgattatgacaccgggatccgccttctggagacgcagctgatgatctccggcctcattagccctgagcttcggaagtgctttgacttgaaggacgccaaaagccacggtttgatcgacgagcagattctgtgtcagctaaaggagctcagcaaagcaaaggagatcattagcgccgcttcccctactaccattccagtgctcgatgccctcgctcagagtatgatcacagaatccatggccatcaaagtgcttgagatactgctaagtacaggctccctcgtgatacctgctaccggtgagcagctgactctgcagaaagcatttcaacagaacttggtaagcagcgcacttttcagcaaagtccttgagcggcagaatatgtgcaaagacctcattgacccctgtacatcagaaaaagttagtctcatagacatggtgcaacggagcaccctccaggaaaataccggtatgtggctgctaccggtgagaccacaggaaggtgggcgcataactctaaagtgcggcagaaacattagcattctgcgggccgctcacgagggtctcattgatagggagacgatgttccgcctgctgtccgcacagcttctttcggggggcctgattaactctaattcaggacagcgcatgactgtggaggaggcagttcgagagggagtgattgatagggatactgcctcatcgattttgacatatcaggtccagaccggaggaatcatccagagtaatcccgcaaaaagactgactgtggatgaagctgtgcagtgtgacctgatcacctcgtccagtgccctgctggtgttagaggcccagcggggctatgttggactgatatggcctcattccggggagatctttcccactagctcatctctgcagcaggaattgatcaccaatgagctagcctacaagatactgaatggaaggcaaaaaatcgccgctctgtacatccctgagtctagccaggttatcggccttgatgccgcaaagcagctgggaattatcgacaacaacacggcaagcatcctgaagaatattacattgccggataagatgcccgacctgggagacctcgaggcgtgtaaaaacgctaggagatggctgtctttttgcaagtttcagccaagcaccgtgcacgactaccggcaggaggaggacgtgttcgatggcgaagagccagtgacaacacagacttccgaggaaacaaagaagctgttcctgtcgtaccttatgattaactcatatatggacgcgaatactggacagcgcctactgctttatgacggcgacctggatgaggctgtgggaatgctcctggaaggctgccacgccgagttcgacggaaacacagccattaaggagtgtctagacgttctgtccagctctggggtcttccttaataatgcgagcgggagagaaaaggacgaatgcacagccactcccagctcttttaacaaatgccactgcggcgaaccagagcacgaagagacacccgaaaacagaaagtgcgcaatcgacgaagaatttaacgagatgagaaacacagtaattaatagcgagttctctcaatcaggcaagctggccagtaccatctccattgaccccaaagtcaactcatccccaagtgtgtgcgtgccttctcttatcagttatctcacacagacagaactagctgacataagcatgctcaggtcagactctgagaacatcttaacaaattacgagaatcaaagtcgggtggagaccaatgagcgggccaatgagtgtagccattcaaaaaacatccagaattttcccagtgatcttatcgagaatccaatcatgaaatcgaagatgtccaagttttgcggggtgaacgagaccgaaaacgaagacaataccaatagagacagcccgatctttgactacagcccgaggctctctgcacttctgtcccacgataaactgatgcattctcaggggagcttcaatgacacacatactcccgagtccaatgggaataagtgcgaagccccagcattgtctttttcagacaagactatgctgagcggacaacggattggagaaaagttccaggatcaatttttgggaatcgccgccatcaacatatctctcccaggcgagcaatacggccagaagtctttgaatatgatctctagtaatccacaggttcagtaccataacgataaatacatatccaatactagtggcgaggacgagaagacacatcccgggtttcaacagatgcccgaggataaggaggatgaaagcgaaatagaggagtactcctgcgccgttacaccaggaggggacactgacaatgctattgtgagtctcacctgcgccacaccactcttggacgaaactatatctgccagtgattacgaaaccagcctgctcaacgatcagcagaataacactggaacggataccgattccgacgacgacttctatgacacacccctgtttgaggatgatgaccatgacagtcttctgctggacggagatgatagggactgtttgcaccccgaggattatgacacccttcaagaggagaacgacgagacagcatcacccgcagacgtcttttatgatgtgagtaaagagaacgaaaatagcatggtccctcagggcgctcccgtgggcagtctctcagtgaaaaacaaagcccattgcctgcaggacttcctgatggacgtcgaaaaagacgagctggactcgggtgagaaaatccatctaaaccccgtgggtagcgataaggtaaacgggcagtcactggagaccggtagtgaacgcgaatgtacgaatatccttgagggtgatgaaagtgatagccttaccgattatgacattgttggaggtaaggaaagcttcacagcgtcccttaagtttgatgacagcgggagttggcggggacgaaaggaagagtatgtgactggccaggaattccattctgacaccgaccaccttgactcaatgcagtctgaggaatcatatggcgactacatttatgattctaatgatcaggacgatgatgatgatgacgggatcgatgaggagggcggcgggatacgtgacgagaacggaaagcctaggtgtcagaacgtggcagaagacatggatatccagctatgtgctagcatcctgaatgaaaattcagatgaaaacgaaaacattaatactatgatcctgctggataaaatgcacagctgcagctccctcgaaaaacagcagcgggtgaacgtggttcaattggcaagtccatccgaaaataaccttgtcaccgaaaagtctaatctgccagaatatactaccgaaattgccggcaaatctaaggaaaacctccttaatcacgagatggtgctcaaggacgtgctgccccctatcattaaagataccgagagtgaaaagacattcggtccggcctccatctctcatgataataataacattagtagcacatccgagctgggaaccgacttagccaacacgaaagtgaaactaattcagggctccgagctccctgaattgacagatagcgtgaagggcaaggatgagtacttcaaaaatatgacacccaaggtggacagtagtctcgatcacatcatctgcactgagcccgacctgatcggcaagcctgcggaagagtctcacctgtctcttatcgcctccgtgacggataaggaccctcagggaaacggctcagatctgatcaaaggacgcgatggaaaaagtgatatccttatcgaggacgagacatccatccagaagatgtacctgggtgaaggagaagtcctggtggagggactggtggaagaagagaaccggcatttgaaactgctgcctggtaagaataccagggatagctttaagctaattaacagtcagttcccgttcccacagatcacaaacaatgaagagctgaatcagaaagggagcctgaagaaagcaaccgtcacattgaaagatgagccaaataatctccagattatagtgtccaagtcccctgtgcagttcgaaaatctggaggagatcttcgacacaagcgtgtccaaggagatttccgacgatatcactagcgacatcacctcctgggaggggaacacccatttcgaggagtccttcaccgatggacctgaaaaagagctagatctgtttacatatctaaagcactgcgcgaagaacatcaaagctaaagatgtggctaaaccgaacgaggacgtaccttcgcacgttctgattacggctcctcccatgaaggagcacctgcagctaggggtcaataatacaaaggaaaaaagtacctctacccagaaggatagccctctgaacgatatgatccagagtaatgacctttgctctaaagagtccatctctggcggagggactgaaatctctcagtttacacccgaaagcatcgaggccaccttatcgatcctaagccgcaagcatgtcgaggatgtgggaaaaaacgacttccttcaatccgaaaggtgcgctaacggcctgggcaacgacaactcctccaatactctgaacacagattattcgttcctggaaatcaacaataaaaaggaaagaattgagcagcagctgcccaaggagcaggccctttcaccaaggtcacaagaaaaggaggtccagatccctgaactctcccaggtgttcgttgaggatgtgaaagatattctgaagagcaggcttaaagaggggcacatgaatccccaggaagtggaagaaccctccgcgtgtgcggatacaaagatcctgatccaaaacttgatcaaaaggatcactacaagccaactggttaatgaggcctctactgtaccctcggattcacagatgtccgactcatccggggtctctcccatgactaatagctctgaattgaaacctgagtctcgagatgatcccttttgtattggcaacctgaagagcgagctacttttgaatatcttaaaacaagaccagcacagccagaagataacaggcgtcttcgaactgatgagggaactgacacatatggaatatgacctcgagaaaagagggataacttccaaggtcctcccactgcaacttgagaatattttctataagctgctggccgacggatacagcgagaaaatcgaacatgttggcgacttcaatcagaaggcctgcagcacaagtgaaatgatggaggaaaaaccacacatacttggagacattaagtctaaagaaggtaactattacagcccaaatctggagacagttaaggagatcggactagagagtagcacagtgtgggcttcaacgctccctagagatgagaaactgaaggacttgtgtaacgattttccatcccatttggaatgtaccagtgggtcaaaagaaatggcttccggcgatagctcgacagaacagttctctagcgaactacagcagtgcctgcagcacactgagaagatgcatgagtatcttaccttactgcaggacatgaagccgcctctggacaaccaagagagcctggataacaacctggaggctctgaaaaatcagcttaggcagctggagaccttcgagctgggactcgcacctattgcagtcatcctgaggaaggacatgaagttggccgaggagttcctcaagtccttgccatctgacttcccaagggggcacgtggaggaattaagtatttctcaccagtcactgaaaaccgcattctctagtctgagtaacgtgtcaagcgaaagaacaaagcaaatcatgctggctatcgatagcgagatgagtaagttggccgtaagccacgaggaattcttgcacaagcttaaatccttcagcgactgggtgagcgagaagagcaaaagcgtcaaagacatagaaatcgtgaacgttcaggacagcgaatacgtgaagaagcggctagaattcttgaaaaacgtactcaaagacctgggtcataccaagatgcagcttgagaccaccgctttcgacgtacagtttttcatctcagagtacgcacaggacctgagtccaaaccagagcaagcaactactgcggctcctaaatactactcagaaatgtttccttgacgtacaagaaagtgtgacaacccaggtagagagactcgagacacagctccaccttgaacaggacctcgacgatcagaaaatcgttgctgaacgccagcaggagtataaagaaaaactgcagggcatatgcgatctgctgacgcagacagagaaccgactcatcggccaccaggaggcatttatgatcggcgatggtaccgtggaactgaagaagtaccagtctaagcaagaggagctgcagaaagacatgcagggatctgcccaggccctggccgaagttgtaaaaaataccgagaacttcctcaaggagaatggggagaagctgtctcaggaggacaaggccttgatcgaacagaagctgaatgaagccaaaataaagtgtgagcaattaaacctcaaggcagaacagtccaaaaaggagctggacaaagttgtgaccacagcaattaaggaggaaacagaaaaggtagcggcagtcaaacaactagaagagtctaagaccaagatcgaaaacctactcgactggctctccaacgtggacaaggactcagaacgggctggcaccaagcacaagcaagtcatcgagcaaaacggaacacatttccaggaaggcgatggcaagtccgccatcggcgaggaggacgaagtaaatggtaatttactcgaaacagatgtggacggccaagttggcacaactcaggagaatctaaatcagcagtaccagaaggtcaaggcccagcatgaaaagataatcagtcagcaccaggccgtgattatagccacgcagtcagcacaggtgttgctcgaaaagcagggacaatacctgtcacctgaagagaaggaaaaactgcagaagaatatgaaagaattaaaggtgcactatgaaaccgccctggctgagagcgaaaagaaaatgaagctgactcactcacttcaggaggagctcgagaaatttgacgcagattatactgagttcgagcattggcttcaacagtcagaacaggagctcgaaaacctggaggctggagctgatgacatcaacgggttaatgactaaattaaagcgccagaaaagtttttccgaggatgttatatcccacaagggagatctgaggtatattaccatttcaggcaaccgagtgctggaagctgccaagagttgttctaaacgtgatggggggaaagtggacacttcagctacacaccgagaagtgcagaggaagctcgatcatgctactgatagatttcggagtctctactccaagtgcaacgtgttggggaataatctgaaggatctggttgacaagtaccagcattacgaggatgcatcttgtggactgctggccggcctgcaagcttgtgaggccacggcaagtaagcatctgtcagagccaatcgcagtcgatccaaagaacctgcagcgtcagcttgaggagacgaaagccctgcagggacagatctccagccaacaggtcgcagtcgagaagctgaagaaaacagccgaagtgcttttggatgccaggggcagccttctcccagccaagaacgacattcagaagactttggatgacatcgttggccggtacgaagacctaagcaagtccgtcaacgagcgtaacgagaaacttcagatcaccttgactagatctctgagcgtccaggatggtctcgacgagatgcttgactggatggggaatgtggagtcttccctgaaggagcaggggcaggtcccgttgaacagcactgcattacaggacataatatctaaaaacatcatgctggaacaggacattgccggcaggcaaagctcgattaacgcaatgaatgagaaggtcaaaaagttcatggaaacgacagatccaagcacagcaagttcacttcaggccaagatgaaggatctcagtgccaggttctctgaagcgtcacataaacataaggaaacactggctaagatggaggagttgaagactaaggttgagctattcgaaaatctgtctgagaaattacagacgtttcttgaaacaaagacccaggcattaactgaggtagatgttccagggaaagatgtcacagagctgtctcaatacatgcaggagtcaacctccgaattccttgagcataaaaaacacctcgaagtcctgcactccctgctcaaagaaattagctcccatggacttcccagcgacaaagcgctggtccttgagaaaacaaacaatctctcgaagaagttcaaggaaatggaggacaccataaaggaaaaaaaggaagcggttacgagctgccaggaacagttggacgccttccaggtgcttgtgaagagcttgaagtcatggattaaggagactacaaaaaaggttcccattgtccagcctagtttcggcgccgaagaccttggtaagagtctggaggacaccaaaaagctgcaggagaagtggtctctcaagaccccggaaatccaaaaagtaaacaactccggcattagtctgtgtaatctgatttctgccgtcacgacgccagcaaaggcaattgcagctgtcaagtccggtggggccgtactgaacggagaaggaaccgcaaccaataccgaggagttctgggccaacaagggactcactagtatcaaaaaggatatgactgacatctcgcacggctatgaagatcttggacttcttctcaaggacaaaatagcggaattaaatacgaagctttctaagcttcagaaagcccaggaggagtcatccgcaatgatgcaatggctccaaaaaatgaataagacggcaaccaaatggcagcagactcccgccccaaccgacactgaggccgtgaagacccaggtggagcagaacaagtcattcgaggctgagttaaagcagaatgtgaacaaagtccaggagctgaaagacaagctcacagaactgttggaggagaaccctgatacacctgaagcccctagatggaagcagatgcttaccgagattgactctaaatggcaagagctgaatcagcttacaattgatcgccagcaaaaactggaagagagtagcaacaaccttacgcagttccaaacagtggaggctcaactgaagcaatggcttgtggagaaggagctgatggtgagcgtgcttgggcctctttctatcgacccgaatatgcttaacacacaacgccagcaggtacagattctgctacaggaattcgcgacccgtaaaccccagtatgaacaactaacggcagctgggcagggcatcttgagccgccccggtgaggaccccagtctgcggggtattgtgaaggaacagttggctgccgttacacaaaaatgggatagtctcacaggtcagctgtcagatcggtgtgactggatagatcaggcgattgtgaaaagtacacagtaccagagcctgttgcgcagtttaagcgacaaactgtccgacctggataacaaactgtcttctagcctggccgtttctactcaccccgacgctatgaaccagcaactcgaaactgctcaaaaaatgaagcaggagatccagcaggagaagaagcagattaaggtggcccaagcattgtgtgaagacttgagcgccttggtgaaagaagaataccttaaggccgaactttcaagacaactcgagggcatcctaaaatctttcaaagacgtggagcaaaaggccgagaaccatgtgcaacatctccaatctgcatgtgcgtcgagtcaccagtttcagcagatgtccagggattttcaggcttggctggatactaaaaaagaagaacagaataaaagtcacccgattagtgcaaagttggatgttctggagagccttatcaaagaccataaggatttctccaagactctcactgcccaaagccatatgtacgaaaagaccattgcagaaggagaaaacctcttgcttaagacccagggctccgaaaaggccgcactgcaattacagctgaacaccattaagacaaattgggacaccttcaacaagcaagtgaaggaacgagagaacaagctgaaagaatccctcgaaaaagccctgaagtacaaagagcaagtagagactctctggccgtggatcgacaagtgccagaacaacctggaggaaatcaagttctgcttggatcccgctgagggcgaaaacagcattgctaagctgaaatcccttcagaaagagatggaccagcacttcggcatggtagagctccttaataatacagcgaacagtcttctgtccgtatgcgaaatcgacaaggaagtggtcacagacgaaaataagtctctgatccaaaaggtggatatggtcactgagcagctgcattccaaaaagttttgcctggagaatatgacgcagaaatttaaggaatttcaggaagtgtccaaggaatcaaaacgccagcttcagtgcgccaaggaacagctggatattcacgacagcctcggctctcaggcatactccaataaatacctgaccatgctacagacccagcaaaaaagcttgcaggccttgaaacaccaggtggacctcgctaaacggctggcacaggaccttgttgtggaggccagtgatagtaaagggacctccgatgtactgctccaggtagaaaccattgctcaggagcattcaacgctgtctcagcaggtcgacgagaaatgctctttcctggagaccaagttacaaggcattggacatttccagaacaccatccgtgagatgttttctcagttcgctgagtttgatgacgagctcgattccatggcccctgttggacgggacgctgaaacccttcagaagcaaaaagagaccatcaaagcttttttaaagaagctggaggcactcatggccagcaatgacaacgctaataaaacctgcaagatgatgttagctactgaggaaacctctcctgacctggtaggcatcaaacgcgacctcgaggctctttctaagcagtgcaataagttgttggatagagcccaggcccgtgaagaacaggtggaagggaccattaagaggttagaagaattctactccaagctcaaggagttctcaatccttctgcagaaagccgaagaacatgaagagagccagggacccgtcgggatggaaacagagaccattaaccagcagctcaacatgtttaaggtgttccagaaggaagaaatcgaacccctgcagggaaaacagcaagacgtgaattggctggggcaggggctcattcagtccgccgccaaaagtacttccacccaaggactcgagcacgacctcgatgacgtgaatgcacggtggaagacattgaataagaaggtggcccaacgagcagcccagttgcaggaagctctactgcactgcggtagatttcaagatgcactagaatcactgttatcttggatggtggacactgaggaactggtggccaaccagaaacccccttcagcagagttcaaagtggtcaaagcgcagatccaggaacaaaagttactgcagaggcttttagacgataggaaaagcacggtggaagtgataaagcgcgaaggtgaaaaaatcgccactacggccgaaccggcagacaaagtcaaaatactaaagcagttgtcattgttggactcccgctgggaggcactcctgaacaaagcagaaacccgcaacagacagctggagggcatctctgttgtcgcccagcagtttcatgagacactcgaacctttgaatgagtggctgacaaccattgaaaaaaggctggtcaattgcgaaccgattggcacacaggctagcaagcttgaggagcagattgctcagcacaaggtcctgcaggaggatattcttcttcggaaacaaaacgtcgatcaggcccttcttaacgggctggagctcctaaagcaaaccacgggagacgaagtactgataattcaggacaaactggaagccattaaggcccgatacaaggacattaccaagctgagcacagacgttgctaagaccttggaacaggcgctacagctcgcaaggcgactgcacagcacgcatgaggagctctgcacttggctggacaaggtcgaagtggaactgctaagctatgaaactcaggttcttaagggcgaagaggcttcacaggcccagatgcgtcctaaagaactcaagaaagaggccaagaataataaggctttattggacagcctgaatgaggtgagctcagccctcctggagttggtcccttggcgcgcaagagaaggtctcgaaaagatggtcgcggaggataatgaaaggtataggcttgtgtccgacaccatcacccagaaagtcgaagaaatcgacgccgcaatcctacggtctcagcagtttgaccaggcagccgacgccgaactcagttggatcactgagacagagaagaaactgatgagtctgggcgatatccgtctggagcaagatcagacatccgctcagctccaggtgcagaagacttttaccatggagatactgaggcataaggatatcatcgatgatctggtgaagagcgggcacaaaattatgacggcatgcagcgaggaggaaaaacagagtatgaaaaagaaactcgataaggttctaaagaattacgacactatttgtcagattaattcagaacggtatctccaattagaacgcgctcagtcactggtcaaccaattttgggaaacttatgaggagctttggccatggttgacggagacacagtcaatcatctctcagctgcccgcacctgcgcttgaatacgagacactgcgccaacagcaggaggagcataggcagctgagagagctgattgctgaacacaagccgcacatagacaaaatgaacaaaacgggaccccagctcctggaactttcccccggtgaaggctttagtatccaagaaaaatatgtggcagctgatactctctactctcaaattaaagaggacgtgaagaagagggccgtggctcttgacgaagctatctcccaatctacacagtttcatgacaaaatcgatcaaatactggagtctcttgagcgaatcgttgagcgactcagacaacccccttccatctctgcagaggtggagaagatcaaagaacagatttcagagaacaagaatgtctccgtagatatggagaaacttcagcctttgtacgagacgctgaaacagcggggagaggagatgatcgctcgtagcggcgggaccgacaaagatatctcggccaaggccgttcaagacaagttagatcagatggtgttcatttgggagaacatacataccctagtagaggaaagagaagctaagctgctggacgtgatggagcttgctgaaaagttttggtgcgaccacatgtctcttatcgttactattaaggatacccaggacttcatccgggacttggaggatcctggaatcgacccttccgtagtaaagcaacagcaggaagccgcagagactatcagagaagagatcgacggtctgcaggaggagctggacatcgtcataaatctggggtcggagctcatcgctgcttgcggcgagcctgataagcctatcgttaagaagtccatcgatgagttgaatagtgcctgggactccctcaataaggcctggaaggataggatagacaaactagaagaggctatgcaggccgccgtccaataccaggacggattgcaggccgtcttcgactgggtagacattgccggagggaagctggcttcgatgagtcctattggtactgacctggaaacggtgaagcagcagattgaggaattaaaacagttcaaatccgaggcctaccagcagcagatcgagatggagcgcctcaatcatcaggctgaattacttctgaagaaagtgactgaggagagcgacaagcacacggtccaggacccacttatggaactgaagctgatctgggacagcctagaggaaaggatcataaatagacagcacaaattagagggggccttgcttgcactgggccagtttcagcacgcgctggatgagctcctcgcttggttgacccatactgagggtttgctctctgagcaaaaaccagtggggggggatcccaaagctatagagatcgagttagctaagcaccacgtcctgcagaacgatgtacttgcacaccaatctaccgtggaagccgttaacaaggctggcaatgatctgattgaatcgtccgcaggggaggaggcttccaaccttcagaataagttagaagtgctgaaccagaggtggcaaaacgtgcttgagaaaactgagcagagaaagcaacagctggacggagctttgcgacaagccaagggcttccatggagagatcgaggacctacagcagtggctgactgacactgaacggcatcttctggcttcaaaacctcttggaggtctgcccgagacagcaaaggaacagctgaatgtccacatggaggtttgtgctgccttcgaagccaaggaggagacctacaagagcctgatgcagaagggtcagcagatgcttgcccggtgccccaagagcgctgaaacgaatattgaccaggatatcaacaacctgaaggaaaaatgggagagtgtggaaactaagttaaatgaaaggaagactaagctggaggaagctttaaatttggcaatggaattccataacagcttgcaggattttatcaactggctcacccaggcagagcagaccctaaatgtcgcaagtaggccgtcattgattttggatacagtgctcttccaaattgatgaacacaaggtgttcgccaacgaggtcaactctcaccgggaacagattatagaacttgacaagaccgggacacatttgaaatacttttcccaaaaacaggatgtggtactgattaagaatctgctgatatctgtgcagagccgctgggaaaaggtggtgcagcggctcgttgagagggggcgatcactggacgatgctagaaaaagggccaaacagtttcatgaagcatggtcaaaattgatggaatggttagaagaaagcgaaaaaagtctagattcagagctggagatagcaaatgaccccgacaaaataaagacacagctggcacagcataaggaattccaaaagagcctgggggccaaacacagcgtgtatgacacaactaaccgcactggacgatcactgaaggaaaaaacatcgcttgcggacgacaatctcaagctcgacgatatgctcagcgaactgagggataaatgggacactatttgcggcaagagtgtagagagacaaaacaagctcgaggaggcccttctttttagtggtcagttcacagacgcattgcaagctcttatcgattggttataccgcgttgagccacagctcgcagaggaccaaccagtacatggtgatatcgatctggtgatgaatctgattgacaatcacaaagcattccagaaggagctgggcaaacggacatcctcagttcaagccctgaaaaggagcgcaagggaactgatcgaaggctctcgcgatgacagtagctgggtaaaggtgcagatgcaggagctcagcacccggtgggaaactgtatgcgctctgtcaatcagcaaacagacacgcctggaggcagctttgcgccaagctgaggagttccactctgttgtgcatgcccttttagaatggctggcagaggccgagcagactttgagattccatggcgtgctaccggacgacgaggacgcgctccggactttgattgaccagcataaggagttcatgaaaaaactcgaagaaaagcgcgccgagctcaataaagccaccaccatgggggacaccgttctcgctatctgccacccagatagtataacaacaataaagcattggattaccattattagggcccggttcgaagaagtactggcttgggcaaagcagcaccagcagcgactggccagtgccctggctgggctaatagctaaacaggaactgctcgaagcgttgctagcatggctgcaatgggccgagactaccctcactgataaagataaagaggtcatccctcaggagattgaagaggttaaagccctcatagcagaacaccaaaccttcatggaggaaatgaccaggaagcaacctgacgtggataaagtgacgaaaacctacaagcgtcgcgctgctgatccatccagtctgcaaagccacattccagtcctggataagggccgcgctggacgcaagcggtttcccgcctcgtctttgtacccctctggctctcagacacagatcgaaactaaaaatccccgggtcaatctgttggtttccaagtggcagcaggtgtggctcctggccctggaacgacgacgcaagttgaatgacgctcttgatagactcgaggaattgcgtgagtttgcaaactttgactttgacatttggaggaagaaatacatgaggtggatgaaccacaagaaatcgagagttatggacttctttcgccggattgacaaggatcaagatggaaaaataactagacaggagtttatagatggtatcttatcctcaaaatttcccacatctagacttgagatgagcgccgtggcagatatcttcgatagggatggagacggctacatcgattactacgagtttgtagcggctctacacccgaataaagatgcttacaaaccgattactgacgctgacaaaattgaggacgaagtgacacggcaggtagcaaaatgtaagtgcgcaaagcgattccaagtagagcagattggtgacaataagtataggttctttctgggaaaccagttcggtgactcgcagcagttacggctggtgagaatactgcggagtactgtgatggtcagagtgggcgggggctggatggccctcgatgaattccttgtgaagaatgacccttgtagggttcatcaccacggctctaagatgctgaggagcgaatcaaattcctcaatcacaacaactcagcccactatagctaaggggaggactaacatggaattgagagagaaattcatcctggccgacggcgcttcgcagggaatggctgccttcaggccgcggggtcgccggtccagaccttccagccgaggcgctagtcccaacagatcaacttcagtcagcagccaagccgcccaagctgccagtccccaagtccctgcaactactacgcctaaagggactccaatccagggctcgaaactgaggttacctgggtatctctccgggaagggattccactccggcgaggactccgggcttattaccacagctgccgctagagtgaggacacagtttgccgacagtaagaagactccatcgaggcccggctctcgtgcagggtctaaggcagggtcccgggcaagttctagacggggttccgacgcctcagacttcgatattagtgagatccagtccgtttgcagcgacgttgaaaccgtcccacagacacatcgtccgaccccccgcgcaggatccagaccttccactgccaagcctagtaaaatccccaccccccaacgcaagtccccggccagtaaactggacaagtcgtccaaacggtag

SEQ ID NO: 186112 - DNA, 23253 bp, synthetic construct
  misc_feature 1..23253: note = Description of Artificial Sequence: Synthetic coding sequence
  source 1..23253: mol_type = other DNA
atgatcgccgccgccttcctggtgctgctgcggccctacagcatccagtgcgctctgttcctgctgctccttctgctgggaaccatcgccacaatcgttttcttctgctgctggcaccgtaaattgcagaagggacgccatcccatgaaaagcgttttttcaggacgaagtcgaagccgcgacgcagtcctgaggtcccatcatttccgatccgagggctttcgggccagcccccgccacttgagaaggagagtcgcagcagcagctgccgcgaggcttgaggaagtcaagccagtcgttgaggtgcaccatcaaagtgaacaagagacctccgtgcgaaagagacgtatcaagaagtcatctagagtccagcctgaattttaccactccgtgcagggcgcttccatccgccgaccctcatcgggcaacgctagctatcggtgtagtatgagctcatcagcagatttctccgacgaagacgacttctctcaaaagagcggaagcgcttcccccgccccaggtgacacacttccatggaatcttcctaagcatgaaaggagcaaaaggaagattcaggggggctctgtcctggaccccgcggagcgcgccgtcctgaggatcgctgacgagagggacaaggtgcaaaagaagacctttaccaaatggatcaaccagcatttgatgaaagtgagaaaacacgtgaatgatctatatgaagacctcagagatggccacaatcttataagcctgttggaggtactctctggtgataccttaccccgggaaaaaggacgcatgagattccaccgcctgcagaatgtgcagatagccctcgactacctgaagaggcggcaggtaaaattagtgaatatccgcaacgacgatatcacagatggaaaccccaaactgaccttaggattgatctggacaatcattctccactttcagatctcagatatccacgtgacgggggagagtgaagatatgtccgctaaggagagactactgctgtggacacagcaggctactgagggttatgccggaatccgctgtgagaatttcaccacatgttggcgcgatggcaagctctttaacgccatcattcacaaatatagacccgacctaatcgacatgaacaccgtggcggtgcagtctaatctggctaacctcgagcacgcgttctacgtggcggagaagatcggggtgattaggctgctggatccagaagatgtggacgtgagcagcccagatgagaaatcagttataacttacgttagcagtctctacgatgcctttccgaaggttcctgagggaggtgagggcattggggccaatgacgtggaagtaaaatggatcgagtatcaaaatatggtcaactatcttatccaatggatcagacatcatgttaccacaatgtccgaacgtacctttcctaataatcccgtggagttgaaagctctgtataatcagtacttgcagttcaaggaaactgagatccccccaaaggagacagagaagtccaaaataaagcgcctatacaagcttttagagatttggatcgagttcgggagaatcaagcttctccaaggctaccacccaaacgacatcgaaaaagagtggggtaaactaatcattgccatgctggagcgtgagaaagctctgcgacctgaggtggaacggctcgagatgctccaacagatagcgaatagagtgcagagagatagtgtgatatgcgaagataagctcatcctagcaggcaacgctttacaatcagatagcaagcgtcttgaatctggagtgcaatttcagaacgaggcagagattgcaggatatatacttgagtgtgagaacctgctgcgccagcacgtcattgacgtgcaaatccttatcgatggcaaatactaccaggcagaccaactggtgcaacgagtcgccaagttgagggatgaaattatggcactcagaaatgagtgctcatccgtgtatagcaaagggcggattctgacaacagagcagaccaagctcatgataagtggtatcacacaaagcctgaacagcggctttgcccagacattgcatccatctttgacctcagggctgactcagtccctcactcctagcctcaccagctctagcatgacttccggactgagcagcggtatgaccagcaggctgactccctccgtgactccagcctacacaccagggtttccatctgggctagtccccaatttctcaagcggagtggagcccaattctctgcagactcttaagcttatgcaaattcgcaagccccttctcaagtcctcacttctggatcagaacctaacagaggaagaaatcaacatgaagttcgtccaggatcttctcaattgggttgacgagatgcaagtccagctagatcgtactgagtggggatctgatcttcccagtgtggagtcacacttggagaaccataaaaacgtgcaccgcgccattgaagagtttgagtctagtctgaaggaagccaaaataagtgaaatacagatgaccgctcccctgaaactgacttacgccgagaagctgcatcggctcgagagccagtacgccaagctgctgaataccagcagaaatcaggaacgacatcttgacaccctgcataatttcgtgagccgtgccacaaatgagctaatttggcttaacgaaaaggaagaggaggaggtggcctatgactggtcagagcgcaatactaacatagccagaaagaaggactatcacgccgagctgatgagagagctagatcagaaggaagagaacataaagtctgtccaagagatagccgagcaactgttgctggagaaccatccggccagattgacgatcgaagcctaccgcgcggcaatgcagacacagtggtcttggatcctgcagctgtgtcagtgtgtagaacagcatatcaaagagaacactgcatatttcgagttcttcaatgatgccaaagaggctacagattacctgagaaacctgaaggatgctattcagcgcaaatattcatgtgatcgctcctcttctatccacaagcttgaggatctggtgcaggaaagcatggaagaaaaggaggaacttttgcagtataaaagtacaatcgccaatcttatgggcaaggccaaaacaattatccaactgaagccccgcaactccgattgccccctaaaaactagcatacccatcaaagccatttgcgactatagacagattgaaatcaccatatataaagacgacgagtgcgtgttagctaacaacagccaccgagctaagtggaaggtcattagtcccactggtaacgaagccatggtcccttccgtgtgctttacagtcccacctcccaacaaagaagcggtggatcttgctaacaggattgagcagcagtaccagaacgtgctgactctctggcacgaatcacatatcaatatgaagtccgtggtgtcttggcactacctaatcaacgagatcgataggattcgggctagcaacgtggcaagtatcaagacaatgctgcctggcgagcaccagcaggtactcagtaacctgcagtctcggttcgaagattttttagaggattcacaggaatcccaggttttttcaggctctgacatcactcagctcgagaaggaagtgaacgtgtgcaagcagtactaccaggaactactgaagtccgcagaacgagaggaacaagaggagagtgtctacaacctgtacatcagcgaagttagaaacatcaggctcagacttgagaattgtgaggaccgtctaattagacagatcagaactcctctggagagggatgatttgcacgagtcggtctttaggatcacagagcaggagaagcttaagaaggagctggagcgactgaaggatgacctggggactattacaaataagtgtgaggagttcttttcgcaggctgcggccagctcttccgttcccacccttcgttctgaactgaatgtggtattgcagaatatgaatcaggtctatagtatgtcttccacttacatcgataagctgaaaaccgtgaacttagtcttgaagaatacccaagctgctgaagcgttggtcaagctgtatgaaaccaagctctgcgaagaggaagccgttatagcggacaaaaataacatcgagaatctgataagcactctgaagcaatggcggagcgaagtggacgagaaaagacaggtgtttcacgccctggaagatgagctacagaaggccaaagcaatttcagacgaaatgttcaagacctacaaggagcgtgacttagacttcgattggcataaagaaaaggccgatcagctcgtcgagaggtggcaaaatgtacacgtgcaaatagataacagactgcgcgatcttgaggggattggaaaatcgctgaaatactacagggacacttaccaccccctagacgactggatccagcaggtggagacaacacagagaaaaattcaagagaaccagccggagaattctaagacgctggctactcagctcaatcagcaaaaaatgttagtttccgagatcgaaatgaagcagagtaagatggatgagtgccagaagtacgcggaacaatactcagctactgtgaaagactacgagctgcaaacaatgacatacagagcgatggttgattcacaacagaaaagcccagtgaaaagaaggaggatgcagtccagtgctgaccttatcatacaggaattcatggatttacgcactcgatacaccgcacttgtcactctcatgacacagtacattaagtttgctggagactcgttaaaacgcctggaagaggaagaaaaaagcctggaagaggagaagaaagaacacgtggaaaaagcaaaggagctgcagaagtgggtgtccaatattagcaagacgttaaaggatgctgagaaagcaggaaaacctccattttctaagcagaaaataagtagcgaagaaatttccaccaagaaagagcagctgtccgaggcactgcaaacaatccagctgttcttggctaagcacggtgataaaatgacagatgaggagcgaaatgagttggaaaaacaggtgaagactctgcaggaatcatataatttacttttttcagaaagcctcaagcaactccaagaatcacagacaagtggcgacgtgaaagttgaagagaaactcgacaaggttattgcgggcacaattgatcagaccacaggtgaagtgctgtccgtgttccaggccgtgctgaggggattgatagattacgacaccggcattagattgttggaaacacaactgatgatctccggactcatctctcccgagctacggaaatgctttgacttgaaggatgcaaaatcccatggcctaattgatgaacagatcctctgccaattaaaggaactaagtaaagctaaagaaatcatctccgccgcctctccaaccacaattccggtcctggatgccttggctcagtctatgatcacagagtccatggcgattaaagtactcgagatactattgagcacgggcagtctggttataccagccactggagaacagctgacgctgcagaaagcctttcagcagaatctggtcagctcagccttattcagtaaagtgcttgaaaggcagaatatgtgtaaagatcttatcgatccttgtactagcgagaaagtgtccctcatagacatggtccaacgttctacactacaggagaatactggcatgtggctgctgccagtgaggcctcaggaggggggaagaatcactctgaaatgcggtaggaacatcagtatcttacgggccgcacacgagggacttatagatcgcgaaacgatgtttcgtcttctgtctgctcagctgctctccgggggactaataaactctaactccggccagagaatgactgtggaagaggcagtccgggaaggtgtcatcgatcgcgacaccgcttcatctatattgacataccaggtgcagacaggcggcattatacagtccaatccagccaagaggttaacggtggacgaggcagtccaatgcgacctgatcacatcgtcttcggctttacttgtgctagaagcccagagaggctacgtgggcctgatctggccccattccggcgaaatatttcccacaagtagtagcctccagcaagagctgattacaaatgaattggcttacaaaatcctgaacggtcgacaaaaaattgccgccctatacattcctgaatcctcacaggtgatagggctggatgcagctaaacagctgggcatcatagacaacaacactgcttctattctgaaaaatataacgttaccagataagatgccagacctgggggatctggaagcctgtaaaaacgcccgcagatggctatcattttgcaaattccagccaagcacagtccatgactatcgtcaggaggaggacgtgtttgacggagaggaacctgttacaacgcagactagtgaggagacgaaaaaattattcctttcgtacctcatgatcaatagctacatggacgccaacaccggccaacgattactcctctacgacggagatttggatgaagctgtcggcatgcttctggagggctgtcacgccgagtttgacggaaatacagccattaaagaatgtctggacgtactatcaagctctggcgtgttccttaacaacgcctctgggcgtgaaaaagacgaatgcacagccacgccttccagtttcaataaatgtcactgcggggagcccgagcacgaggaaactcctgaaaacaggaaatgtgctatcgatgaagagtttaatgagatgcgaaacacggtcatcaactctgagtttagtcaatcaggtaagctggcctcaacaatcagtattgaccccaaggttaacagttctcccagcgtgtgtgttccttctcttatatcgtacctaactcagaccgaacttgctgatatctctatgctgcgatcagacagcgagaacatactcaccaattacgagaatcaaagccgagtagaaacaaatgagcgagctaacgaatgcagtcatagtaagaatatccagaattttccttcagatctgatagaaaaccccatcatgaagtccaagatgtcaaaattttgtggggttaatgagaccgaaaatgaggataataccaatagggacagtccaatcttcgactattccccacgtctcagtgctctactgagccacgataaattaatgcactcccaagggtcttttaacgacacccataccccagagtctaatgggaataagtgcgaggcccctgccctgagcttttccgataagacgatgctctccggccaaaggataggtgaaaaatttcaggatcagttcctcgggatcgccgcaattaatatctcacttcctggcgaacagtatggccagaaatctcttaacatgataagtagtaatcctcaagtgcagtaccataacgacaaatacatcagtaacacgtcaggcgaagatgagaagacgcatccagggttccagcagatgcctgaggataaggaggatgagtcagagattgaagaatattcctgtgcagttacccccggaggtgacaccgacaatgccattgtgagtcttacatgcgccactcctctcctcgacgagaccatctctgccagtgactacgagacaagcctgctcaacgaccagcaaaacaacacaggaactgataccgattctgacgatgacttttacgatacacctctgttcgaggacgacgaccacgattctctgttactagacggagacgaccgcgattgcctccatcctgaggactacgacacattgcaagaagaaaacgatgagaccgcaagtccagcggatgtattttacgacgtttcgaaggagaatgagaactcaatggtaccccaaggggctccggtgggttctctgagcgtgaaaaataaggcccactgtctccaagacttcctgatggatgtggaaaaagacgagctggatagtggcgaaaagatccatctcaaccccgtgggttcagataaagtgaatgggcagtccctggaaacaggtagtgaacgcgagtgcacaaatatattggagggcgatgagtcggattccttgacggattacgatatagtggggggaaaagaatcctttacagccagtcttaagtttgacgattctggtagctggcggggcaggaaggaggaatatgtgactggccaggaattccacagcgacactgaccacctggattctatgcagtcggaggagagctacggtgactatatatacgatagtaatgaccaagatgatgatgacgatgatgggattgatgaggagggaggcggaattagggacgagaacggtaaacctagatgtcagaatgttgcggaagatatggacatccaattgtgtgcctccattctcaacgagaatagtgatgagaacgagaacatcaatactatgatcctcctggacaagatgcactcttgctccagtcttgaaaaacagcagcgcgtgaacgtggtgcagttggcttctccctcagagaacaatttagttactgaaaaatctaacctgcccgagtatacaaccgaaatagccggcaagtctaaagaaaacttgttaaatcacgaaatggtgctgaaggatgtgttgcctccaatcataaaggacacagagagcgaaaaaaccttcggtccagcatcgatctcccacgacaacaataacatatcttcaaccagcgagctgggtaccgatctcgccaacacgaaagttaagctcattcaggggagtgaactgcctgagctgacagattccgtgaagggaaaggatgagtatttcaagaatatgactcctaaggtcgattcatcgctggatcacatcatctgtactgagcccgacctgattgggaagccagcagaagagagccacctgagcttgatcgcgagcgtgaccgacaaagatccacagggcaacggaagtgatctgattaagggccgagacggtaagtccgacatcctcattgaggacgaaaccagcatccaaaagatgtaccttggggagggcgaggtcctagtggaaggattggtcgaggaggaaaaccgccacctgaagctgttgccaggcaagaatactcgcgattccttcaagctgattaatagccagttcccatttccccagatcacgaataacgaggagctgaatcagaagggatcactgaagaaggctacagtcacactgaaggatgagcccaataatttgcagatcatcgtgtcaaaaagtcccgttcagttcgaaaatctggaggagatattcgacaccagcgtaagcaaggagatctccgatgacattacatcagatatcactagttgggaggggaatacacactttgaggaaagcttcaccgacgggccagaaaaagagctggatctttttacatacctcaagcactgcgccaagaatataaaagcaaaagatgtcgccaagcccaatgaggacgttccttcccacgtgctgataacggctcccccgatgaaagaacacctgcagctgggagttaataatactaaggagaagagtacatcaacccagaaggacagccctctgaatgatatgattcagtccaacgatctctgttcaaaagagtctatttccggggggggcaccgaaatcagtcagtttactccagagtcaattgaagccacccttagcattctgtcccgcaagcatgtggaggatgttggaaaaaacgactttttgcaatcagagcggtgcgctaatggtctcgggaatgataactccagtaatacactgaatactgactacagttttctagagataaacaataaaaaggaacggatcgagcaacagcttccgaaggaacaggccttatctcctcggagccaggaaaaagaggtccaaattcccgaactctcacaggtgttcgtggaggacgttaaggacatcctcaaatcgaggcttaaggaggggcacatgaacccccaggaagtcgaagaaccgtccgcctgcgcggacacaaaaatcctcatacagaatctgattaaaaggatcacgacatctcagctggtgaatgaggcttcaactgtgccgagtgattcacaaatgtccgattcatcaggcgtcagtccaatgacgaattcaagcgaattaaagccagaatcaagagatgacccattttgtatcggcaatcttaaaagcgagctgcttctcaatattcttaagcaggatcagcactcgcaaaagattaccggagtatttgaactaatgagggaactaacacacatggaatacgaccttgagaaacgaggaatcactagtaaggttttacctttgcagcttgaaaacattttctataaactgctggctgatgggtactctgagaagatcgagcatgtaggcgactttaatcagaaggcctgcagcacctctgaaatgatggaggaaaaaccgcacatcctgggagatattaaatcaaaggaagggaactactattcccccaatttggaaacagtgaaagaaatcgggctggagtccagtacggtctgggcatctactctgcctcgagatgaaaagctgaaagatctgtgcaacgacttcccgtcccacctagagtgcacctcagggtctaaagagatggcatccggtgatagcagcaccgaacaattttcatctgaactacagcagtgtcttcaacacaccgaaaaaatgcacgaatacttgacactgttgcaggacatgaaacctccacttgataaccaggagagtttagacaacaaccttgaggccttaaagaatcaactcaggcagttggagacttttgagctaggtctggcaccaattgctgttattctcaggaaggacatgaagcttgccgaagaatttctgaaaagcctccctagtgatttccctagagggcacgtagaggaattatccatcagtcatcagagccttaagacggccttctccagtcttagcaacgttagctcagagaggactaagcagatcatgcttgcgatagacagtgagatgagcaagcttgctgtaagccatgaggagttcctccacaaactgaaatctttttccgattgggtgagtgagaagtccaagagcgttaaggacatcgagatcgtgaacgttcaagactcagagtatgtgaagaagagattagagtttctgaaagccaacaacgtgcttaaggatctaggacacacaaaaatgcagctggaaaccaccgcctttgacgtacagttttttatttctgagtatgctcaggacctctccccaaaccaaagcaaacagctactacgactactgaataccactcagaagtgttttttggacgtccaggagagcgtcaccacccaggtagagaggctggaaactcagttgcatcttgagcaggacctcgatgatcagaagatcgttgctgagcgccaacaggagtacaaggagaagctccagggaatatgcgacctgctgacccagaccgagaaccggcttatcggccaccaggaagccttcatgataggtgacggaaccgtggaattaaagaagtaccaaagtaaacaggaagagttgcagaaggatatgcagggatctgctcaggccctggctgaggttgtaaagaacacagagaactttttgaaggagaacggagaaaaactctctcaagaggacaaggctcttattgaacagaagctaaatgaggctaagattaaatgtgaacagctgaacctgaaggcagaacagagcaagaaggaactggacaaggtggtcactactgcaattaaggaggaaaccgaaaaggttgccgctgtgaagcagttggaagaatcgaagacaaaaattgagaatctacttgactggctgagtaacgtcgataaggacagtgaaagggccggcacaaagcacaagcaggtcattgagcagaacgggacacactttcaggaaggtgatggaaaaagcgccatcggtgaagaagacgaggtgaatgggaatttacttgagaccgacgtggacggtcaggtagggactacccaggagaacttgaaccagcagtaccagaaagtgaaggcccaacacgagaagatcatcagccagcatcaggccgttatcatcgcgactcaatctgcacaggtgctcctagagaagcagggtcagtacctgtcgcctgaagagaaggaaaagctccagaagaacatgaaggagctgaaggtccactatgaaactgctctagcggagtctgagaagaaaatgaagctaactcatagtctgcaggaggagctggaaaagttcgatgcggactataccgagtttgagcattggcttcagcagagcgaacaggagctcgagaatctcgaggccggggctgatgatattaacggcctgatgacaaagctcaagcgccaaaagtctttttccgaagatgtgatctcacataagggcgatctgcggtacatcaccatcagcggcaatcgggttctggaagctgcaaaaagctgttctaaaagagacggagggaaggtcgacacaagtgccactcatcgggaggtgcagcgcaaactggaccatgcgacagatcgtttccggagcctgtactctaaatgcaacgtcctgggaaataatctaaaagatctagttgataagtatcagcactatgaagacgcaagttgcgggctgcttgctggcttacaggcttgcgaggccaccgcctccaaacacctgtcagagccaatcgcagtagatccaaagaacctgcagaggcagctcgaggagacgaaagccctgcagggccagatatctagccagcaagtcgccgttgaaaagctgaagaaaactgcagaggttctactcgacgcccggggcagtttgctgcccgccaaaaatgacattcaaaaaacattggacgatatcgttggcagatacgaggacttatccaagagtgtcaatgagcgtaacgagaagcttcaaatcacactgactaggtcattaagcgttcaggatggcttagatgaaatgctggactggatgggtaacgtcgaaagctcactcaaggaacagggacaggttccactgaattcgaccgccttacaggacatcatatctaaaaatattatgctggagcaagacatcgccggcaggcagtcaagtatcaacgctatgaatgagaaagttaagaaattcatggagacgactgacccctctactgcttcctctctacaagcaaagatgaaagatctgtctgctcggttctcagaggcttcccacaagcacaaggagacactggcaaagatggaagaactgaaaactaaggtcgaactgtttgagaatctctcagaaaagctgcagacattcctggagacaaagacccaggctttgactgaggtcgacgtcccagggaaggacgtgacagagctgtcccagtatatgcaggaaagcacttctgagttcctcgaacacaagaagcacttagaggtgctgcactccctgcttaaagaaattagcagtcacggcctgccgagcgacaaggcgctagtgctggagaagaccaacaacctctcaaagaaattcaaggagatggaagacacaattaaggagaaaaaagaggccgtgactagctgtcaagagcagttagacgccttccaggtgctcgtgaaatccctcaaatcctggattaaggaaaccaccaaaaaagtaccaattgtgcagcctagctttggtgctgaagacctgggaaaatcactggaggatactaaaaagcttcaggagaaatggagtctaaagacacccgagattcaaaaggtgaacaattctggcatcagtttatgtaacctcattagtgccgttacgacgcctgcaaaggccattgctgcagtgaaaagcggcggggccgtcctgaatggcgagggcacagcaaccaatactgaagagttttgggccaacaaaggcctgacaagcattaaaaaagatatgaccgatatctcccacggatacgaggatctgggattgttgctcaaggacaagattgccgagctaaacacaaagctatctaagctgcagaaagcccaggaagagagctccgccatgatgcagtggctccaaaaaatgaacaaaaccgcgaccaagtggcagcaaacccccgcgccaaccgacaccgaagcagtgaagactcaagtcgagcagaataagtcatttgaggcagaactgaaacagaacgttaacaaggtccaggagctgaaggacaaactgacagagctcctcgaggagaatccagacacgcccgaggccccacgctggaaacagatgctcactgaaatagattctaagtggcaagagctgaaccagctaactattgatcgccagcaaaaacttgaagaaagctcaaacaacttgacacaattccagacagtggaagcgcagctgaaacagtggctggtcgagaaagagctgatggtatccgtcctcgggcctctttcgattgacccaaatatgctgaatacacagcggcagcaggtgcagatcttgctccaggagtttgcaactagaaagccacagtatgagcaattgacggcagccgggcagggtatactctccagacccggcgaggacccatctctgcggggtatcgttaaagagcagctggctgctgtcacacagaagtgggactctttgacaggacagctgagtgatagatgcgactggatcgaccaggccatcgtgaagtcaactcagtatcagtcccttctgcgttccctatctgacaagctgagcgacttggacaataaattgtcgagcagcctggcagtgtcaactcatcccgacgccatgaaccagcagttggagaccgctcagaaaatgaagcaggagatccagcaggagaagaaacagataaaggtcgctcaagctttatgcgaagacctttcagcactcgttaaagaagagtacctgaaggctgaactctctcgccagcttgagggtattttaaaatccttcaaagacgtagagcagaaggcggagaatcatgtgcaacacttgcagtctgcttgcgccagcagccatcaatttcagcagatgtcccgtgactttcaggcctggcttgatacaaagaaagaagaacagaacaaatctcaccctatcagcgctaaactcgatgtgctagagagcttgatcaaagaccacaaagacttttctaaaaccctaacagcccagtctcacatgtacgagaagacaattgctgagggcgaaaatctgctgctgaagacacagggatccgagaaagccgcgctccaactacagctgaacacaattaagactaactgggacaccttcaacaagcaggtcaaggaacgggaaaacaaactcaaagagagtctcgagaaagccctgaagtataaggagcaggtagaaaccctgtggccctggattgacaagtgccagaataatctcgaagaaattaaattctgtttggaccccgccgagggagaaaacagcattgccaagcttaaatctctacaaaaagagatggatcagcatttcggaatggtcgagcttctcaataataccgcaaattccttactgagcgtgtgcgagattgacaaggaggttgtgacagacgagaataagtcacttatacagaaggtggacatggtaaccgagcagctgcactctaaaaaattttgccttgagaatatgacacaaaagtttaaagaatttcaagaggtctcaaaggaatcaaaaaggcaacttcagtgcgccaaggagcaattggatattcacgacagcctggggtctcaggcttattccaataaatacttaacaatgctccagacccaacagaaatcactgcaggcccttaaacatcaggtggatctcgccaagagactggcccaagacctggtcgtggaagcatcagactcaaagggcacgtcggacgtgttactgcaggtggagactatcgcccaggaacacagcactctgagtcagcaggtagatgagaagtgtagttttctggagacaaagttgcaggggattggtcactttcagaatacaattcgggagatgttctcccagttcgctgaattcgacgacgagcttgactccatggccccagtcggacgcgatgcagaaactcttcagaaacagaaagaaacaatcaaagcgtttctgaagaagcttgaggcactgatggccagtaacgacaacgctaacaagacttgtaagatgatgctggccaccgaagaaacctcgcctgatctggtgggtattaagagagatctggaggctttgtcgaagcaatgcaataagctcctggatcgggcacaagctcgagaggaacaggtcgaaggaacaattaagcgcctggaagaattttactcaaagctgaaggaatttagcattctactgcaaaaggccgaggaacatgaggagagccaaggaccagtgggcatggaaaccgaaacaattaatcagcaactgaacatgtttaaagtgttccaaaaagaggagatagagcctctgcaggggaaacagcaggatgttaactggctggggcaaggtctcatccagtccgctgctaagtccactagtacgcaaggcctggagcatgacctcgatgacgtgaatgcccggtggaaaacgttgaacaaaaaagttgcgcagcgggctgcccaactgcaagaggcactgctgcactgtggtcgattccaagacgccctggaaagcttactaagctggatggtggatactgaagagcttgtggcaaatcagaagccaccctctgccgaattcaaggtggtgaaggcacagatccaggagcaaaagctcctgcaaaggctacttgacgatcgtaagtcgacagtcgaagttatcaaacgtgagggggagaaaatcgccacaacagcagaacccgcggataaggtgaagatccttaagcagcttagccttttagactcgcgctgggaagcgctgctgaacaaggctgagacccggaatcgccaattggagggcattagtgtggtagcacagcaatttcatgaaacactggaaccattaaacgaatggttaaccaccatcgaaaagcgactggtaaactgcgaacctatcgggacacaggcctctaaattggaggaacagatagcccagcataaggcgctggaagacgatattatcaaccacaataagcatctccaccaggcagtctcaatcgggcagagcttaaaggtgctgtctagtcgtgaagacaaggatatggtgcagtccaagctggacttctctcaggtctggtacatcgagattcaggagaagtcacacagtcgtagcgagctcctacaacaggccctctgtaacgccaagattttcggagaggacgaggtcgaattaatgaactggcttaacgaggtgcatgacaagctgagtaaactcagtgttcaggattatagcacagaagggctatggaagcagcagagcgaattgcgcgtgctacaggaagacatcctgctcagaaaacaaaacgttgaccaagctttgctaaacggactggagctgttaaaacagacgaccggagacgaggtgctgataattcaagacaagctggaggccattaaggctcggtataaagacattaccaaactctcaacggatgtcgcgaaaacgttggagcaagccttgcaacttgcccgccgcctgcactcaacacacgaagaactgtgtacctggttggacaaggttgaagtggaactgctgtcctatgaaacacaagtgttgaaaggggaagaagccagtcaggcccagatgagaccaaaggagttgaagaaggaagctaagaacaacaaagcactgctggacagcctcaacgaggttagttcagctctactcgaactggtcccttggcgggccagggagggtctggagaaaatggtcgccgaggataacgagcggtaccgtctggtcagcgacaccattactcagaaggtcgaagaaatcgatgccgctatcctccgctcacaacagtttgaccaggccgccgacgcagagctttcatggatcactgaaacagagaagaagctgatgagcttgggcgacattcgtctggagcaggaccaaacgagcgcccagttgcaggttcagaaaaccttcactatggaaatcttgcgccataaggatatcatcgacgacttagttaaatctggtcacaaaattatgacggcttgtagtgaagaagaaaaacagtccatgaaaaagaagcttgataaagttctgaaaaactacgatacaatctgtcagatcaatagtgaaaggtatctgcaactggagcgggcccagtctttggttaatcagttctgggaaacgtacgaggagctctggccatggttaacagagacccaaagtatcattagccagctcccggcccccgccctggagtacgaaaccctgagacagcagcaagaggagcaccggcagctgcgggaactgatcgccgagcacaagccgcacatagacaagatgaacaagacaggtcctcaattacttgagttatctcctggagaagggttcagtatacaagaaaaatatgtggccgctgatacactctactctcaaatcaaggaagatgtcaagaaaagagcggtggccttagacgaggctattagccagtccacccagtttcacgacaagatcgatcagatcctcgaatcactggaacggatcgtggagaggctccgccaacccccgtccatttctgcagaggtcgaaaaaattaaagagcagataagtgagaacaaaaacgtgagtgtggatatggagaagctccaacccctgtatgagacactgaaacagaggggagaggaaatgattgccaggagtggcggcacagacaaggatattagcgccaaggcggtgcaggacaagttggatcaaatggtgttcatctgggagaatatccatactctcgtggaagagcgagaggccaagcttctcgacgttatggagctggccgaaaagttctggtgcgaccatatgtcccttatcgtaactatcaaagacactcaggacttcatccgcgacctggaggacccgggcatagacccgtctgttgtgaagcagcagcaggaagctgctgagaccatcagggaagagatcgacggccttcaggaggagctcgacatcgttatcaatctgggatctgaactgatcgcagcttgtggagagcccgacaagccaattgttaaaaagagcatcgacgagctgaactcggcttgggatagccttaataaggcatggaaagatagaatcgataaattggaagaggcaatgcaggctgcagtccagtaccaggacggcctccaggctgtgttcgactgggtggacatagcgggcggcaaactcgctagcatgtcaccaatcggaacagatctcgagactgtgaaacagcagatcgaggagctcaagcagttcaagtcagaggcatatcagcagcagatcgagatggagcgcctgaaccaccaggccgagctattattgaaaaaggtaactgaggagagtgacaagcataccgttcaggatcccctcatggaactgaaactgatttgggatagtctggaagagcgcattattaataggcagcataaactggagggcgcattgctagctctaggccagttccagcacgctttggatgaactgctagcctggctcactcacactgagggcctgctgtcagaacagaaacccgtgggtggagacccaaaggccattgaaatcgaactggccaagcaccacgtgctccaaaacgatgtactcgcccaccagagtaccgtggaagcagtcaacaaggctggcaacgatttgatcgagtcttctgcaggagaggaagcatcgaacctgcagaataagcttgaggttctcaatcaaaggtggcagaatgtattggagaaaactgagcagcggaagcaacagctagacggcgctttacgccaagccaagggatttcacggcgagatcgaagacctccagcagtggctcacggacacagagcgacacctgctggcctctaagcctctgggagggctcccggagacagctaaggaacaattgaatgttcacatggaggtttgcgccgcttttgaagccaaggaagaaacttataaatctcttatgcagaagggtcagcagatgcttgccagatgtcctaagagtgctgaaacaaacattgaccaggatattaacaatctgaaagaaaaatgggagagtgtggagaccaaactaaatgagcgcaaaactaaattggaagaggctcttaaccttgccatggagttccacaacagtcttcaggacttcattaactggctgactcaggcagaacagacattgaatgtggccagccggcccagcctgatccttgatactgtgctgttccagatagacgaacataaagttttcgccaacgaagtcaatagccacagggaacagattatcgagctagataagactggcacacacttgaagtacttctcacagaaacaggatgtggttcttatcaaaaacctcttgattagcgtacagagtaggtgggagaaggtagtgcagaggctggttgaaagggggcggagtcttgatgacgcaagaaagagggcaaagcagttccatgaggcctggtccaagttaatggagtggctcgaggagtccgagaagtctttagacagtgagctcgaaatcgcgaacgaccccgacaaaattaagacacagctcgcacaacataaggaattccaaaagagcctgggcgctaaacactccgtgtacgatacaaccaatagaactggaaggagcctcaaggagaaaacatcacttgcagacgacaacctaaaactagatgatatgctgtcggagctgagagacaaatgggacacaatctgcgggaaaagcgtggagaggcaaaacaagctggaggaggctcttctgttttctggacaattcactgatgccctgcaagctttgattgactggctgtatagggtggaaccacaacttgcagaagaccaacccgttcacggagacattgatctagtgatgaatctcatagacaatcataaggcctttcagaaagaacttgggaagcggacgagctcggttcaagccctgaaacggagcgctcgcgaacttatagagggaagccgtgatgactccagttgggtaaaagtgcagatgcaggagttatctacacgctgggagacagtatgcgccctttcaatatccaaacagacccggctggaggccgcactgcgacaggccgaggagttccacagcgttgtgcatgctctcctggagtggctggctgaagcagaacagactttgcggttccacggcgttctgcccgatgacgaggatgccctccgcaccctcatagaccagcacaaggagtttatgaagaagcttgaagaaaagagagcagaattgaacaaggcaaccaccatgggcgatacagtgctcgccatctgtcatccagacagtatcactaccatcaagcactggatcactattatacgggcccggtttgaggaggttctggcttgggccaagcaacaccagcagcgactggccagcgcattagccgggctcatagcgaaacaggaattactcgaagcgctcctggcttggctgcaatgggcagagaccaccctcaccgacaaggataaggaggtaatccctcaggaaatcgaagaggtaaaggctcttatcgccgaacatcaaacatttatggaagagatgacacgaaagcagccagacgtcgataaagtgacaaagacatataaaagacgtgctgccgatccctctagtttgcaaagtcacatcccggtgcttgataaaggccgggccgggagaaagagattccctgcaagtagtctctatcccagtgggtcacaaacacagatagaaacgaagaaccctcgggtaaacctgttggtctcaaaatggcagcaggtctggctgcttgcactggagcgacggagaaagttgaacgacgcactggatagactcgaagagctgcgtgaattcgcaaacttcgacttcgatatctggaggaagaaatatatgcgctggatgaatcataaaaagagcagggtgatggatttctttagaaggatcgataaagaccaggacggtaagatcactcgacaggaatttatcgatgggatcctcagcagcaagttccccacctcccggctggagatgagcgcagtggcagacatcttcgatcgagatggcgatgggtacatcgactactatgagttcgtcgcagccctgcaccctaacaaagatgcctacaagcccatcaccgatgccgacaagatcgaggacgaggtgaccagacaggtggctaaatgcaagtgtgctaaacgcttccaagttgagcagattggcgacaataagtaccgggtgagctttcagagtaacttcggggacagtcagcagctgcgattagtacggatactgagatccaccgtaatggtacgtgtggggggtggatggatggcattagatgagttcctggtgaaaaatgacccgtgtcgcgtgcatcaccatggtagcaagatgctgcggtctgagtccaacagtagcatcactaccacccagcccacaattgcaaaaggccgtacgaatatggagctgcgagagaagtttatccttgcggacggcgctagtcaaggcatggccgccttccggcctcgcggaaggcggtctcgcccatcttcacgaggggcctcaccaaaccgaagcacgagcgtctccagccaggcagcccaggccgcatccccacaagtgccagctaccacaacgcccaagggcacacccatacagggatccaagttgaggctgcctggctacttgagtgggaaagggttccactcaggggaggattctgggctgatcaccacagccgctgcccgcgttcgtacccagttcgccgattccaaaaagacaccgtccaggccaggtagtagagctggaagcaaagctggctcccgggcatcatctcgaaggggcagtgacgcttcagattttgacattagcgagatccagagcgtgtgtagcgacgtagaaaccgtccctcagacacaccggcctaccccgcgtgcaggatctaggccaagcacggctaaaccctcaaagattccaacaccacagaggaagagcccggcttctaagcttgataaatctagtaaaagatag

SEQ ID NO: 186113 - DNA, 7950 bp, synthetic construct
  misc_feature 1..7950: note = Description of Artificial Sequence: Synthetic coding sequence
  source 1..7950: mol_type = other DNA
atgcacagcagcagctacagctaccggagcagcgacagcgtgttctcgaacactacttcgacacgaacatccttggatagcaacgaaaacctgctcctcgtgcactgcgggcccacgcttatcaattcctgcatatcatttggatcagaaagctttgatggtcataggctggagatgctgcagcaaattgcaaacagagtgcaacgggacagcgttatctgtgaagacaagttgatcctggccggtaacgccttgcagtctgattctaagagactggagtccggtgttcagttccagaacgaggccgagatcgcgggctacatcctggaatgcgagaatctcttgagacaacacgttatcgacgttcagatcctgatcgacggcaagtattaccaggcagatcagctcgttcagagagtcgcaaagctccgcgatgaaattatggctcttagaaacgagtgtagtagcgtttatagcaagggacgaatactcacgacagagcaaactaaactcatgatttcaggcataacgcagtcgctcaatagtggtttcgcccagaccctccacccgagccttacatctgggctcacacagtccctgacccctagtctgacatccagctcaatgacttccggactgtcgtcagggatgacgagtcgactaaccccgtccgtcacccccgcatacactccaggatttcccagcggattggtgcctaatttttcaagtggggttgagcccaattcactgcaaacgctgaagttaatgcagatccgcaaacccctgttaaagtcctcccttctggatcagaacttgaccgaagaagagatcaacatgaagttcgttcaggacctccttaactgggtagatgagatgcaggtccagttagacaggaccgaatggggatccgacctcccatccgtggagtcccaccttgaaaaccacaaaaatgtacatcgcgccatcgaagagttcgaatcgagcctgaaggaagctaagattagcgaaatccaaatgactgcacctctaaaactgacctatgcagaaaaactccaccgtctggagtctcagtacgccaaacttttgaacacttcacgcaaccaggagaggcacctcgatactctccataatttcgtgtcgcgggcaacaaacgaattgatatggctcaacgagaaggaagaggaggaggtggcttacgactggagcgagcgtaacacaaatatagcgaggaaaaaggactaccacgctgagctgatgcgggagctggatcagaaggaagagaacatcaaatcagtgcaggaaattgcagaacaactgcttctggagaaccatccagcgaggcttaccatcgaggcttatcgagccgccatgcagacacagtggtcgtggatcctacagctgtgccagtgtgtggaacaacatataaaggagaatacggcatacttcgagttcttcaacgacgcaaaagaggctaccgattacctgcgcaacctaaaagatgcaatccagcggaaatatagctgcgatagatcttccagcattcataagttggaggatctggtccaagagtcgatggaggagaaagaagaactgcttcagtacaaatccacaatcgcaaatcttatgggaaaagccaaaaccattattcagttgaagccgagaaactctgattgtccgcttaaaacctccatccccattaaagcaatctgcgactaccgtcagatcgaaatcaccatctacaaggatgacgagtgtgtcttggccaataattcacacagagccaagtggaaagtgataagccctaccggcaatgaagcaatggttcctagtgtttgctttacagtgcctccccctaacaaggaggccgttgacctggctaaccgcattgagcaacagtatcaaaatgtccttaccctttggcatgagtcacacattaatatgaaatcggtggtcagctggcattacctgattaacgagattgacaggatccgagcctccaacgttgcatccataaaaaccatgttgccaggagagcaccagcaggtactctcaaatctgcaaagtcggttcgaagattttctcgaggactctcaggagagccaggtgttttccggcagcgacattacgcagctggaaaaggaagtgaacgtgtgcaaacagtattatcaggaactgctgaagtcagccgagcgagaagagcaggaggaaagtgtctataatctctatatttcggaagtgcgcaacataagactgcgtttagagaactgtgaagatcggttgattcggcagatcagaaccccactggagcgggacgacttgcatgagtccgtgtttcgcataacagagcaggagaagctgaagaaggagttagaacgcttaaaggatgatcttgggactataacaaacaaatgcgaagaatttttctcacaggcagctgcctcttcaagcgttcccacgctgagatcagaactcaacgtggtattgcagaatatgaaccaggtgtatagcatgagttccacttacatagacaaactgaagaccgtgaatctggttctcaagaacacacaggctgccgaggccctggtgaagctgtacgagaccaagctgtgcgaagaggaggcagttatcgccgacaagaataatatcgagaacttgatttcaacgctcaagcagtggagaagtgaagttgatgagaaaagacaggttttccacgccttggaagacgagttgcaaaaagcaaaagccattagcgatgaaatgtttaaaacctataaggaaagagatctagactttgactggcataaagagaaggccgatcagcttgttgaacgctggcagaatgtgcacgtccagatcgataaccggttacgagatctggaaggtattgggaaatcattgaagtactacagagacacctaccatcctctcgatgactggattcagcaggtcgagaccacgcaaagaaagatccaggaaaatcagccagagaacagcaaaaccctcgcaacgcagctgaaccagcagaagatgcttgtgtccgagattgaaatgaaacagtccaagatggatgagtgtcagaaatatgccgagcagtattctgccacagtgaaagactacgagttgcagaccatgacctacagagccatggtagactcacaacagaagtctccagtcaaaaggaggaggatgcagagctcagccgatttgataatccaggaattcatggatctgagaactaggtatacagctttggtgacactgatgacacagtacatcaagttcgcaggtgactcactgaagcgcctggaagaagaagagatcaaacggtgcaaggaaacatcagagcacggcgcttatagtgatctgctgcagagacagaaagccaccgtgctagagaatagcaagctgaccggtaagataagcgagcttgagcgaatggtggccgagcttaaaaaacagaagagtagagtcgaagaagaactgccaaaggtgcgggaagccgctgagaacgagctgcggaagcagcagaggaacgtggaggatatctctttgcaaaaaatacgagccgagtctgaagccaagcagtataggagagagcttgagacgattgtcagggaaaaggaggccgcggagcgggagctggaaagggttcgtcagcttactattgaggcagaagccaagcgcgccgcagttgaggagaacctgcttaacttccggaaccagctcgaagagaacacatttacacgccggactctggaggatcacctgaagcggaaggacctctctcttaatgacctggagcaacagaagaacaaacttatggaggagctacgtcggaagcgtgataacgaggaggagctactgaaactgattaaacagatggagaaggacctcgcattccagaagcaagtggccgaaaagcagctgaaggaaaagcaaaagatcgaactggaagctcggaggaagatcaccgaaattcagtatacgtgtcgcgaaaatgccttgcctgtttgcccgatcacacaggcgaccagctgtagggcagtcaccggcctgcagcaggaacacgacaagcagaaggcagaggaactgaaacagcaggtggacgaactcactgccgccaacaggaaagcagagcaggacatgcgggagttgacctacgagctgaacgcccttcaacttgaaaaaacatcaagtgaagagaaagccaggctcctgaaggataaactggacgaaacgaataacaccctgaggtgtttgaaactggagctcgagaggaaggaccaggcggaaaagggatattcccaacaactcagagagctgggtagacaactgaatcagacaacaggcaaggctgaggaggccatgcaggaagcctcagacttaaaaaagattaaaaggaactaccaactggagttggagagcctgaaccacgagaaaggtaagcttcagcgggaggtggatcgcataacaagggctcatgccgtcgctgagaagaatatccaacatctgaattcgcagattcacagtttcagggacgaaaaagagctcgaaagactgcagatctgtcagcgtaagtccgatcacctgaaggagcaattcgagaaatcccatgagcaattgctgcagaacatcaaggccgaaaaagagaacaacgacaaaatccaaagattaaatgaagagcttgagaaaagtaacgaatgcgccgaaatgctcaaacagaaagtggaggagctcacacgccagaacaatgaaactaagcttatgatgcagagaattcaggcggagtccgaaaacatcgtactcgaaaaacagacaatccagcagcggtgcgaagccctcaagattcaggctgacggctttaaggaccaactgcgaagtactaatgagcacctgcacaaacaaacaaagacagaacaggacttccagcgtaaaatcaaatgtctggaagaggatctggctaagtcccagaacctggtttccgaattcaaacaaaaatgcgatcaacaaaatataattattcagaatacgaagaaagaggtccggaacttgaacgccgagctgaacgcttctaaggaagagaaaagacggggcgagcagaaagttcagctgcagcaggcccaggttcaagagcttaataacagactgaagaaagtccaggacgagcttcacctgaaaacaattgaggagcagatgacacacagaaagatggtgttgttccaggaggagtctggaaaattcaaacaatcagctgaggagttccgcaagaaaatggagaaacttatggagtctaaggtgattactgagaatgatattagcggcattagactggattttgtgagcctccagcaggaaaacagcagagcgcaagagaatgccaagctgtgcgagacaaatattaaagaacttgaacggcagctgcagcagtatcgggagcagatgcaacagggacagcatatggaagctaaccactatcaaaagtgtcaaaagctggaagacgaactgatcgctcagaagagggaagtggagaacctgaagcagaaaatggaccagcagatcaaggagcatgagcaccagctcgtactcttgcagtgtgaaatccagaagaagagcacagctaaagactgtacattcaagcctgacttcgagatgactgtcaaggagtgtcaacattcaggagaattgtctagcaggaatacaggccacctgcatcccacacctcgaagccccctgctgaggtggacgcaggagccccagccacttgaggagaaatggcaacatcgggtcgtggagcagatccctaaagaagtgcagttccaaccgcccggcgccccattagagaaggaaaagagtcagcaatgctattcggaatacttttcacagacgtccaccgaactgcagattacttttgatgaaacaaatccaattacaaggcttagcgagatcgagaagattcgggaccaagcacttaacaacagcagacctcctgtccggtaccaggacaacgcctgtgagatggaactcgtgaaagtcctcacacctctggagattgctaagaataagcagtatgatatgcataccgaagtgaccaccctgaagcaagagaaaaatccggtgccttccgccgaagagtggatgctggagggctgtcgcgctagtggcgggttgaagaaaggcgatttcctcaaaaaaggcctggagcccgagacttttcagaactttgacggggaccatgcctgcagtgtgagggacgacgaattcaaatttcaaggtttaagacacaccgtcacggcccggcagctagtggaagcaaaacttctcgatatgcgaaccatcgagcagttgaggttgggcttaaaaacagtggaagaggttcaaaaaacactaaataagttcctgacgaaggctactagcattgcagggctgtatctggaaagtacgaaagagaagatctcttttgcttcagccgcagaaaggattattattgacaagatggtagctctcgcattcttggaagcccaggccgccacagggttcatcatagaccccatttccggccaaacttatagcgtggaggacgctgtgctgaagggagtggtggaccccgaatttcggatccggcttttagaggcagaaaaagccgctgtgggatatagctactcctccaagaccttaagtgtttttcaggcaatggaaaaccgaatgttggataggcagaaaggaaaacacatcctggaagcgcagatcgcatcagggggggtgattgaccctgtgagaggcatccgagtgccccccgagatcgctcttcaacagggcctgctcaacaacgcaatcctgcaatttctgcacgagcctagctcgaataccagagtgtttcccaatccaaataataaacaggccctctactattctgagcttctgcgcatgtgcgtttttgatgtcgagagccagtgctttcttttccctttcggagagcggaacatttctaatctcaatgttaaaaagacgcaccgaatcagtgtggtggacactaaaacagggtctgaactcacggtctacgaagccttccagcgtaatcttatcgagaaatccatatatctcgagctgtccggccagcagtaccagtggaaggaagcaatgttcttcgaaagctacgggcatagctcccacatgttaaccgatactaagacagggctgcattttaatattaatgaggcaatcgagcagggcaccatcgataaagctctcgtgaagaagtaccaggagggtctgattaccttgactgagctggctgattctctactgtctagactggtccccaagaaggacctgcactcaccagtggctggctattggttaaccgcaagtggagagagaattagcgtcctgaaagcctcccgaaggaatctggtcgacaggatcactgctctgagatgcctcgaagcccaggttagcactggaggcatcatcgaccccctgaccggcaagaagtacagagtcgctgaggcactgcacagagggctggtggatgagggctttgcccagcagttaaggcagtgtgagctagtgattacagggattggacacccgatcaccaataagatgatgagtgtggttgaggcagtaaatgccaacattataaacaaggagatgggtatcaggtgtctggaattccagtatctgacagggggcctcatcgaacctcaggttcattcccggctgtctatagaggaagccctgcaagttggcatcattgatgtgcttattgcaacgaagctaaaggatcagaagtcttacgtgagaaacattatttgtcctcaaaccaagagaaaactcacctacaaagaagctttagagaaagcggattttgacttccatacaggcctgaaactgctggaagtctctgagcccctgatgactggaatctccagcctgtattactcatcctag

SEQ ID NO: 186114 - DNA, 22719 bp, synthetic construct
  misc_feature 1..22719: note = Description of Artificial Sequence: Synthetic coding sequence
  source 1..22719: mol_type = other DNA
atggccggctacctgagccccgccgcctacctgtacgtggaggagcaggaatatctacaggcttatgaagatgtgctggagcggtataaagatgagagagataaagtgcagaagaagaccttcaccaagtggataaatcagcacctgatgaaggtgcgcaagcacgttaatgatctgtacgaagaccttcgggatggacacaatctgatcagccttctggaggtgttgagtggcgacaccctcccacgcgagaaagggcggatgcgttttcacaggttacagaatgtgcagatcgccctagactacctgaaaagacggcaggtgaaactggtgaatatcagaaacgacgacatcactgatggcaacccaaaacttaccctcggcctgatctggactataattcttcacttccagatttctgacatccatgtgactggggaatctgaggacatgagcgccaaagagaggctgctgctgtggactcagcaggcaaccgaggggtacgctggcatccgctgtgaaaacttcactacttgttggcgggacggcaagttgtttaacgccattattcataaatatcggcccgacctcatcgacatgaatacagtagcagtgcagagcaacctggccaacttagagcacgcattttatgtggcagagaagataggcgtgatacggctgctggaccccgaggatgtagatgtctcaagtcctgatgaaaagtctgtgattacctatgtgagttcattatacgacgcattcccaaaggtgcccgagggaggagaaggtattggcgccaacgacgtcgaggtcaagtggattgagtaccagaacatggtgaactacctcatccaatggatccgacaccacgtgacaaccatgtccgaacgcacttttcccaataatcccgtggagcttaaagcactgtacaatcagtaccttcagttcaaggagacagagatcccaccgaaagaaactgaaaagtccaagataaagcgtctgtataagctgctggagatctggatcgagtttggacggatcaaactcctgcagggttatcaccccaacgatatcgagaaagaatggggtaagctgataattgccatgcttgaaagagagaaagcgcttagacccgaggtggagaggctggaaatgctccaacagatagccaaccgcgtccagcgggactccgtcatctgtgaggacaagctgattctggccggcaatgctctacagagtgactcaaagcgcttggaatccggggttcagtttcagaacgaagccgaaattgctggctacattctagagtgcgaaaacctgcttagacagcatgttattgatgtgcagatcctaattgatggaaaatattatcaggcagaccagctggtgcagcgtgtggccaaactgagggatgaaatcatggctctgcgaaacgaatgtagctcagtatatagcaagggccggatcttgacgaccgagcagactaagttgatgatctcaggcatcactcaaagcttaaattccgggtttgctcaaacgctccacccctccttaaccagcggcctaactcagtctctcaccccctctctcacgtcctctagtatgacgagcggcctgtccagcggcatgactagtagactcacaccctccgttacccccgcatatactcctgggttcccgtctgggctggtccccaatttttctagtggtgtggaacccaattctctacagaccctcaaactaatgcagattagaaagcccctgttgaagtcatcactcctggaccaaaatctgaccgaggaggaaattaacatgaaatttgtccaagacctgttgaattgggttgacgagatgcaggttcagctggatagaaccgagtgggggtccgatctcccttcagttgagtcgcatcttgagaatcataaaaacgtgcacagggccatagaagaattcgagagctcactcaaggaagctaaaatctcggaaatccagatgactgcgcctctgaagctgacgtacgctgagaaattacatcgccttgaaagccagtatgccaagcttcttaataccagcagaaaccaagaacggcatctggacacactgcacaactttgtaagccgtgctactaatgagttgatttggcttaacgaaaaagaggaggaggaggtcgcttacgattggtctgaacgaaacaccaacattgcccggaaaaaggattaccacgcagagctgatgcgtgagctggaccaaaaggaagaaaacattaaatccgtgcaggaaatcgcagaacaactcctgctggagaaccaccccgcaaggcttaccattgaggcctaccgggccgccatgcaaactcaatggtcatggatcctgcagctgtgtcaatgcgtggaacagcacatcaaagagaacaccgcctactttgaattcttcaatgatgctaaagaggcaactgactacctcaggaacctgaaggatgctatacagcgcaaatattcgtgcgaccgaagctcttctatccataagctagaggacctggttcaggaatctatggaagaaaaagaagaactgttgcaatataagagcaccatcgccaacctcatggggaaggccaagacgatcatccagctgaaaccacggaactccgactgcccattaaagaccagcattcccataaaagccatctgcgactataggcagatagagattactatctacaaggacgacgagtgcgtgctcgctaacaactcccacagggccaagtggaaggtaatctcgcctacaggcaatgaggcaatggtccccagtgtatgcttcacagtaccccctcctaacaaagaagcagttgatcttgccaaccggatcgagcaacagtatcagaacgtcctgaccttgtggcacgaaagccacattaatatgaagagtgtggtttcctggcattacctgatcaacgagatcgatagaattcgcgcaagtaatgtcgccagcattaagaccatgctgccaggtgaacaccagcaggtattaagcaatctgcagtctcggttcgaggactttttagaggactcacaagaaagccaggtgtttagtgggtctgacatcacccagttagagaaggaggtcaatgtgtgcaagcagtactaccaggagctgctgaagagcgcggaacgagaagagcaggaggagagcgtatataatctctatattagcgaggtacgcaatataaggctgcgcctggaaaactgtgaagataggctcatccgccagattaggactcccttagaaagggacgatctccacgagtccgtctttaggattaccgagcaagaaaagttgaagaaggaacttgagaggctgaaggatgatcttggaacgatcaccaacaagtgcgaggaatttttttcacaggcagccgcgtcctcctcggtacctacactgaggagtgagctgaatgttgtgttgcagaacatgaatcaggtgtattccatgagctctacatacattgacaagttaaagaccgtgaacctcgtgctgaagaacacccaggctgccgaggcccttgtcaagttgtacgagactaaactctgcgaagaggaggcggtgattgccgacaaaaacaacattgagaacctcatcagcacccttaaacagtggcggagcgaggttgacgagaagagacaggtgttccacgcattggaggatgagctacagaaagcaaaagcgatatccgatgagatgttcaaaacctataaggaacgtgacttggactttgactggcacaaagaaaaggcagaccagctggttgagcggtggcagaacgtacacgtacagattgacaaccgactccgtgacctggaagggattgggaagtcactgaagtattatcgcgatacgtatcacccgcttgacgactggatacagcaagtcgagaccactcagagaaagatccaggaaaaccagcctgagaattccaagactctggccacacaactcaaccaacagaaaatgctggtgagcgaaatcgaaatgaagcagagcaagatggatgagtgccagaaatatgcggagcagtatagcgctaccgtgaaggattatgagctgcagaccatgacctatcgggccatggtggatagtcaacagaagagccccgtcaagaggcgaagaatgcagagctcagcggacctgatcatccaagagttcatggacctgcgaacccgctatacggctttagtcactctgatgactcagtacattaagttcgccggggattccctgaagcggctcgaggaagaggagaagtcacttgaggaagagaaaaaggagcacgtcgagaaggcaaaggaactgcaaaaatgggtgagcaacatcagcaaaacacttaaggacgctgagaaggctggaaaaccgcccttcagcaaacagaaaattagttctgaagaaatatccactaagaaggagcagctgtcagaggcactgcagaccatccagctgtttctggcaaagcacggagataagatgaccgatgaggagagaaacgaattggagaagcaggttaagacgctgcaggaatcttataatctgttgttttctgaatcgctgaagcaattacaggagtctcagactagcggcgacgtgaaggtcgaggaaaagttggataaggtgatcgccggaacgatagatcaaactactggtgaggtcctgagtgtgttccaggccgttctgcggggtctaatcgattacgatacgggaattaggttgctggagactcaactgatgatttcaggcctgatctcacctgaattgcgaaaatgttttgacctgaaggatgcaaagagccatgggctgatcgacgagcagatcctctgccaactgaaggagctgagcaaggctaaggaaatcatctccgctgcttcaccaacaaccatccctgtcttggacgctctcgcacaatcaatgatcactgaatctatggccatcaaggtgctcgagatcctgctgagtaccgggagcctggtaatcccagcaactggggagcagctgaccctccagaaggcctttcagcagaatctggttagctcagcactgttttccaaggtgctggaacgccagaacatgtgtaaggacttgatcgacccttgtacctctgagaaagtcagcctgatcgacatggttcaaagatccacactgcaggagaacacagggatgtggctgctcccagtcaggccacaggagggaggtcgcatcacattaaagtgcggccgcaacattagcatcttacgcgctgcccacgagggactaatcgaccgggagactatgtttcgcctgttaagcgctcagctgctctccgggggcttaattaactccaactcgggtcaaaggatgactgtcgaggaagcggtgcgcgagggcgtgatcgaccgagacaccgcctcctccatcctcacataccaagtgcagaccgggggaatcattcaaagtaacccagccaaaagactgacagtggacgaggctgtccagtgcgatctgataactagcagttctgctctgctcgtgttggaggcccagagaggctatgtaggtctcatatggccacactccggtgagatcttccccacatcttcatccctccagcaggaactgattaccaacgagttggcatacaaaatccttaacggacgtcaaaagattgcagccctgtacattccggagagctcccaggtcatcggtctggacgctgccaaacagctggggatcatcgataacaataccgcgtccatcttaaaaaacattaccttacccgataagatgcccgatttgggggatctagaggcctgcaagaacgcccgcaggtggttgtccttctgcaaattccaaccttctacagtgcatgactacagacaggaggaagacgtgttcgatggagaggagcctgtgacaacccaaacaagcgaggagactaaaaagctgttcctgagttacctgatgattaactcctacatggacgcaaacaccgggcaacgactactgctatacgacggcgaccttgatgaggccgtgggtatgctgctcgagggctgtcacgcagaatttgatggcaatacagcaatcaaggagtgtctggatgtcctgtcatcctccggtgtcttcctgaataacgccagcggcagagaaaaggacgagtgcaccgccaccccgagttccttcaacaagtgccattgtggcgagcccgagcatgaggaaacacctgagaatcgcaaatgtgccatcgatgaggaatttaacgagatgaggaacactgtcatcaactccgagttcagccagtcagggaaattggctagtaccatttctatcgatccaaaggtgaactcatcccccagcgtttgcgtgccatcactgatttcatacctcactcagaccgaattagcagatatctcaatgttacgctccgactccgaaaacatcctgactaactacgaaaatcagtccagggttgaaacaaatgaaagagcgaacgaatgttctcattcaaaaaatatccagaacttcccaagcgacttgatcgaaaaccctatcatgaagagcaagatgtctaagttctgtggcgtcaacgagactgaaaacgaagacaatacaaatagggattccccaatttttgactactctcctcggctgagtgcccttttgagccacgacaagctcatgcactcgcagggctcttttaatgacactcatacaccagaatcaaacggaaataagtgtgaggccccagcactgtccttttctgataaaaccatgcttagtgggcagcggatcggggagaaattccaggaccagtttctgggcatcgcagccattaatatctctcttccgggcgagcagtacgggcaaaaatccctgaacatgatctcaagcaatccacaggtgcagtatcataatgacaaatacatctcgaacaccagcggcgaagatgagaaaacacatccagggtttcaacagatgcccgaggacaaggaggatgagagtgagattgaggagtattcatgcgctgtcacacccggcggtgataccgacaacgccatagtttctctgacctgtgcgacccctctgctcgacgagacaatatcagcatctgattacgagacctctcttttaaacgatcaacagaacaacacgggcacagatacagatagcgatgacgatttctatgatactcctttgttcgaggatgatgaccacgacagtctgcttctggacggagatgatagagactgcctgcatcccgaggactacgacacattacaggaggagaacgacgagactgccagtccagctgacgtcttttacgacgtgtcaaaggaaaacgagaatagcatggtgccacagggagcacctgtgggatctctttccgttaagaacaaggcacactgtttgcaagatttccttatggacgtcgagaaggacgagctggatagtggcgaaaagattcatttgaatcccgttgggtccgacaaagtaaacggccagtcgcttgaaaccggatccgagcgcgagtgcactaacattctggagggcgacgaatctgacagcctgaccgattacgacatagtgggcggaaaagaaagtttcacagctagcctgaagtttgatgatagcgggtcatggcgggggcgcaaagaagagtacgttactggccaggaattccactcggacacagatcacctggattctatgcagtctgaagaatcttatggtgactatatttacgacagcaacgaccaggatgatgacgatgacgatggaattgacgaggaaggaggcggcataagggacgaaaacggtaaaccacgatgccagaacgtggcggaggatatggacatacagctgtgcgccagtatacttaacgagaactccgatgaaaacgagaacattaatacaatgatactgctggataagatgcatagctgttcctctcttgagaagcagcagcgagttaacgttgtgcagttggcatccccatctgaaaacaacctggttacagagaaaagcaacctacccgaatacaccacggaaatcgccggcaaatctaaagaaaatttgctgaatcatgaaatggtgcttaaggacgttctgcctcccatcatcaaggatacagagtccgagaagacttttgggccagctagtatatcacatgacaataataacattagctccacatctgagctaggcactgacctagccaatacaaaggtcaaactgattcagggtagtgaactgcctgagctgacagattcagtcaaaggcaaagacgagtactttaagaacatgactccgaaggtggattcgagccttgatcacattatctgtaccgagcccgacctcattggtaaacccgcagaggaaagtcacctgagtttgatcgcctcggtgaccgacaaggacccccaaggtaatggctccgatctgatcaaaggacgtgacggaaagtccgacattctgatcgaggacgagacgtccatccaaaagatgtacctcggtgaaggcgaggtgctggtcgaggggcttgttgaagaggagaatcgtcatctcaagctgctgcctggcaagaacacgagagactcttttaaactgatcaattcccagtttccttttccacaaattacgaataacgaggagttaaaccagaagggttcactgaagaaggccacagtcactctcaaagacgagcctaataacctacagattattgttagtaagagccccgttcagtttgagaatctagaggagatttttgacacctccgtcagcaaagaaatatctgacgatattacatcagatattaccagctgggaaggtaacacccactttgaagaaagcttcaccgatggtcccgagaaagaactcgacctctttacttatctgaagcattgtgctaagaatattaaagcgaaagacgtggccaaaccaaacgaggatgttcccagtcacgtcctgatcacagccccacctatgaaggaacacttgcaactgggggtaaacaacactaaagagaaatcaacttcaactcagaaggactcaccattgaacgatatgatccagagcaacgatttatgcagtaaggaatctatatcaggcgggggcacggagatctcacagttcacacctgagtcaattgaggccacgctgagtatccttagccgtaaacatgtcgaagacgtgggtaagaacgatttcctgcaaagcgagcgctgcgcgaacggattaggcaatgataatagctctaatacattgaacaccgactatagctttttggagatcaacaataaaaaggagaggatcgagcagcagcttcctaaggaacaggcgctgagcccccgctctcaagagaaggaagtgcagatccccgagctatcacaggtcttcgtcgaggatgttaaggacattctcaaaagtagactgaaagagggacacatgaacccccaggaagtggaggaaccatcggcttgcgccgacacaaagattctgattcaaaatctcattaagagaatcaccacaagccagctggtgaatgaggcctccaccgtcccctctgactcgcagatgtcggactcctcaggggtgtcacccatgaccaattccagcgagttgaagccagagtcaagggatgaccctttttgtatagggaatctgaagtcggagctgcttctcaatatcctaaaacaggaccagcacagccagaaaatcactggagtgtttgaacttatgagagagttgacccacatggagtatgacctggagaaacggggcataaccagcaaagtgctcccactgcagctggaaaatattttctataaacttctggctgacgggtacagtgagaagatcgagcatgtgggtgatttcaatcagaaggcatgtagcacaagcgagatgatggaagagaagccgcatattcttggggatattaaatccaaggaaggtaattactactctcccaacctcgaaactgtcaaggagattggtctggaatccagcacggtatgggccagtacattgcctagggatgaaaagttgaaggatctgtgtaatgacttcccatcccatctcgagtgtacatccgggtcgaaagaaatggcctctggggattcatctactgagcaatttagcagcgagctgcagcaatgcttacagcacaccgaaaagatgcacgagtatctgacactgctacaggatatgaagccacctttggataaccaggaatcactggataacaacctggaggcattgaagaaccagctcaggcagcttgagacctttgagcttgggctcgctcccattgctgtaatactgagaaaggatatgaaactggctgaggaattcctgaagtctctccctagcgattttcccaggggacatgtcgaggaactgagcatcagccaccagtcccttaaaaccgccttttctagcctgtctaacgtctcctctgagcgcacaaaacagatcatgttagctatcgactctgaaatgtcaaaactggcagtgtcacacgaagagttcctgcataagctaaagagtttttccgactgggtatccgagaagtctaagagcgtgaaggatattgagattgtgaatgtgcaggatagcgagtatgttaaaaaacgtctcgaatttctgaaggctaataatgttcttaaggatctgggacatacaaagatgcagctcgaaaccactgccttcgatgtacagtttttcatttctgagtatgcacaggacctgtcacccaatcaaagtaagcagttattacggctgctcaatactacccaaaaatgtttcctggatgtgcaagagagcgtgactactcaggtcgagaggctggagacacagcttcacctggagcaggatctagacgatcagaagatagtcgccgaaaggcagcaggagtacaaggagaagttgcaggggatatgcgatcttttaacgcagacagaaaaccgcctgatcgggcatcaagaggcctttatgatcggtgatggaacagtcgaactgaaaaagtatcagagtaaacaggaggaactgcagaaagatatgcaggggtcagctcaggccctagctgaggtggtgaagaataccgaaaatttcctgaaagagaacggcgagaagttgagtcaagaggataaagccttaatagaacagaagctgaacgaggccaagattaagtgtgagcagttaaacctgaaagcagaacagtctaaaaaagagttagacaaggtcgtaaccacggctattaaggaagagaccgaaaaggtagccgcagtgaagcagctggaggaatcgaagacaaagattgagaacctgctcgattggttgtcaaacgtcgacaaggacagtgagcgagctggcacaaaacacaaacaagtcattgagcagaatggcacccacttccaggagggcgacggcaaatcagcaattggcgaggaagacgaggtgaatggaaacttactggagactgacgtggacgggcaggtaggaaccacccaggaaaatctcaaccaacaatatcagaaagtgaaagctcagcatgaaaagataatctctcagcatcaggcagtgattattgctacacagtccgctcaggtgcttctagaaaaacagggacagtacctttctccagaggagaaagaaaagctgcagaagaatatgaaggaattaaaggtgcactacgagaccgcccttgctgaaagtgaaaaaaaaatgaagctgacccattcacttcaggaagagctggaaaagtttgatgccgactataccgagttcgagcactggcttcaacagtccgaacaggagctggaaaacctggaagcgggcgccgatgacatcaatggcctgatgaccaaactgaaacgccaaaagagcttctctgaagatgtgataagccacaagggggatctcaggtacatcaccatctccggcaatagagtgctggaggcagccaagagttgtagcaagagagacgggggaaaggttgacaccagcgccactcaccgcgaagtgcaacggaagctcgaccatgctactgaccgctttcgcagcttgtattccaaatgtaatgttcttgggaataatcttaaagatctggttgataagtaccagcactatgaggatgctagctgtggtttgctggctggcctgcaagcatgtgaagcaactgccagcaaacacctgtccgaacccattgctgtagaccctaagaatctgcagaggcagttagaggaaactaaggccttacagggacagatctcaagccagcaggttgccgtcgaaaagttgaagaagacggccgaggtattgctcgatgctagaggctctctcctaccagctaagaatgatatccagaagaccctggacgacattgtgggccgctacgaggacttaagcaagtcagtgaatgagagaaacgagaaactccagatcacgctaacccgcagtctgtccgtgcaggatggtttggatgagatgctggactggatgggtaatgttgaatctagcctcaaagagcagggtcaggtgcccctgaatagtaccgcattgcaagacattatatccaagaacattatgctggagcaagacattgcaggccgtcaaagcagtatcaacgccatgaatgagaaagtgaagaaatttatggagaccaccgacccaagcacggcaagcagcctccaggccaagatgaaggatttaagcgcacgatttagtgaggcgagccacaagcataaagagacactggcaaaaatggaagagctcaagaccaaagttgagctcttcgagaatctgagcgaaaagcttcaaacttttttagagactaagacacaagctcttactgaagtggatgtgcccggcaaggacgtgaccgaactgagccagtacatgcaagagtcaacatctgaatttctggaacacaaaaaacatctagaagttttgcactcccttctgaaggaaatatcttctcatggactcccgagcgacaaggcattagttttagaaaaaacaaataacctgtcaaagaagtttaaagaaatggaagatactatcaaggagaaaaaagaggcagttacctcctgccaggagcagcttgacgctttccaggtgctggttaagtcgctgaaaagttggattaaagaaaccacaaagaaggtcccaattgtccagccgtccttcggcgcggaagatcttggaaagtccctcgaagacacaaaaaaactgcaggaaaagtggtcacttaaaacacccgaaatccagaaggtgaacaacagcggaattagcttatgcaacttgatttctgccgtgacaacgcctgcaaaggcaattgccgccgtgaagtccgggggagctgtgctaaacggagaggggaccgcgacaaatacagaggagttttgggctaacaagggccttacttccattaaaaaggatatgaccgacatctcccacgggtatgaggacctcggcttactgctgaaagacaaaattgcggaactaaatactaagctgagtaagctacagaaggctcaagaggaaagctccgcaatgatgcagtggctgcagaaaatgaacaagaccgcaacaaagtggcagcagacaccggcgccgacagataccgaagctgttaaaacccaggttgagcagaacaagagcttcgaggcagaattaaagcagaatgtgaacaaagtccaagagcttaaggacaagctaaccgagctactagaggagaacccagacaccccagaggcaccacgttggaaacagatgttaactgagatcgattccaagtggcaggagcttaatcagctgaccatcgataggcagcagaagctagaagaatcgtcaaacaaccttactcagtttcagaccgtggaggcacagttgaaacaatggttggtggagaaagaacttatggtttctgtgttgggtccattatcgatcgacccaaatatgttgaatactcagagacaacaggtacagattctgctacaggagtttgctacgcgaaagcctcagtacgaacaattaacagcagctggacaaggcatcctctcccgacccggcgaggacccatcgctcagaggtatcgtgaaggagcagctcgctgcggtgactcaaaagtgggacagtctgaccggtcagctaagcgatcgatgtgattggatagaccaagcaatcgtgaaatctacacagtaccagtctcttctgcgctcattgtctgataaactgtcagatttggacaacaagctctcttcatcccttgccgttagcactcatcctgatgccatgaaccagcaactggaaaccgctcagaagatgaaacaagagattcaacaagaaaagaaacagataaaagtcgcccaagcactctgtgaggatctttcggctctcgtgaaagaagagtacctaaaggcagaactttctcgccagttggagggaatacttaagtccttcaaagacgtggagcaaaaggccgagaaccatgttcagcacctacagtccgcctgcgcctctagtcaccaatttcagcagatgagccgagactttcaggcttggctggataccaagaaggaggagcagaacaagtctcacccaatatcagcaaaactggacgttttggagagcttgattaaggaccacaaggacttctcaaaaactctgaccgctcaaagtcacatgtacgagaagaccatcgctgagggagagaacctcttactgaagacccagggcagtgagaaagccgccttacaattacagctcaatactattaaaaccaactgggataccttcaataaacaagtgaaggaaagggaaaacaaactcaaggagtcattggagaaggcattgaagtacaaagagcaggttgagacactgtggccatggattgacaagtgccaaaacaacttggaagaaatcaagttctgtctggacccagctgagggcgagaactcgatcgcaaaactcaagtctctccagaaggagatggatcagcacttcggcatggttgagctgcttaataacaccgctaactctttgctctcagtgtgtgagatcgacaaggaggtggtaacagacgagaataagtccctcatccagaaagtggatatggtgacagaacagttacactcaaagaagttttgcttggaaaacatgactcagaagttcaaggagttccaggaggtgtcaaaggaaagtaagaggcagctccagtgcgccaaggaacagctagacattcatgacagcctcggatcacaggcctattcaaataaatacttgacaatgctgcagacccagcagaagtcgcttcaagctttaaagcaccaggtcgatttggcaaaacgactagctcaggacctcgtggtggaagctagtgacagcaagggtacaagcgacgtcctgctgcaggtggagaccatagcgcaagagcacagcacactctctcagcaagtcgatgagaagtgttccttcctcgaaactaagctccagggcatcggtcactttcaaaacacgattcgcgagatgttcagccagtttgccgagttcgacgacgaactagactctatggcgcccgtgggaagagatgcagagacactgcagaaacagaaggagacgatcaaagctttcctgaaaaaactggaggctctgatggccagtaacgataacgccaataagacgtgcaagatgatgctcgctactgaggagacatccccggatctggttggcattaagcgggacctagaggctctatccaagcagtgcaacaagttactcgatagagctcaagcccgcgaagagcaagttgaaggcacaattaaacgattggaggagttttatagcaagctgaaggaatttagcattctattgcagaaagcagaggagcatgaggaaagccaaggacccgtcggcatggaaacggaaaccattaaccagcagctgaatatgtttaaggtgtttcaaaaagaagaaatcgagcctctccagggcaaacagcaggatgtaaactggctgggtcaggggctcatccagtctgccgctaagtcaacctccacgcaaggccttgagcatgatttggatgacgtgaacgcaagatggaagactctaaacaagaaggtggcccaacgtgcagcacaactgcaagaagccctgctgcactgtgggagattccaagacgccctggagtcactgctcagctggatggtggatacagaagaactcgtggcaaatcagaagcccccttctgccgagttcaaagtcgttaaagcgcagatccaggagcagaaattgttacagcgactcctggacgacaggaagtccactgtggaggtcatcaaacgggaaggagaaaagatagcaacaactgctgagccagccgacaaagttaaaatcttgaagcagctttcccttctggatagtaggtgggaggcattgctgaataaagccgagacgcggaaccggcaacttgaaggaatttctgtggtggctcagcagtttcacgagactttagagcctctcaacgaatggttgacgacgattgagaagcggctggtaaactgcgagccaattgggacccaagcgagcaagctggaagagcagatcgctcagcataaagccctcgaagacgacataatcaatcataataaacacctgcatcaggctgtttctataggccagagcctgaaagtgcttagcagccgggaggacaaagatatggtccagagcaagctggatttctcacaggtgtggtatatcgaaatacaggagaagtcgcactcccggagtgagttactgcagcaggccctgtgcaatgcgaaaattttcggcgaggacgaagtggaactcatgaattggctgaacgaagtgcacgacaagctgagcaagctgtccgtgcaggactactcaacggagggactgtggaagcaacagagtgagctacgggtgctgcaggaggacattctgctgcggaaacagaacgtagatcaagctctgctaaacggtctggagctcctgaagcagacgactggagacgaagttctgatcatccaggacaagctggaagcaattaaagccaggtacaaagacatcaccaagctgagcaccgacgtggccaaaacactggaacaggcactccagctggcacgcagattacacagtactcatgaagaactgtgtacatggttggacaaggttgaggtggagctcctctcatacgagacccaagttttaaagggtgaggaagcttctcaagcacaaatgagacctaaggaactgaagaaggaggcgaagaataataaggcgctactagattctctgaacgaggtcagcagcgctctgctggagctggtgccatggcgagctcgggagggcctcgagaaaatggtggccgaggataatgaacgatatcgcctagtgtctgatactataacccagaaagtggaagagatcgacgccgccattctgcgaagtcagcagttcgatcaggctgcagacgcagaactgtcctggataactgaaaccgaaaaaaagctgatgagtctaggcgacatcaggttagagcaggatcaaacgagtgcccaactgcaggttcaaaagaccttcaccatggagatcctgcgacataaagacatcattgatgacttggtgaagagtggccacaaaataatgaccgcttgcagtgaggaagaaaaacagtcgatgaagaagaaattggataaagtgctaaagaattacgataccatctgccagatcaatagtgaacgatatcttcagctggagcgagcccaatcattagttaatcagttctgggaaacttacgaagaactatggccatggctcacagaaacgcagtctatcataagccagctgccggctcccgctctagaatatgaaacactgcgtcagcaacaggaggaacaccggcagctgcgcgagctcatagccgagcacaagccccacattgacaagatgaataagaccggccctcagctcctggagctgtccccaggcgagggcttttcaattcaggagaagtatgttgccgccgacaccctgtatagtcagattaaggaggacgtgaagaaaagggcggttgcactggatgaagctatcagccagtccactcaattccacgataagatagatcaaattcttgaaagcctggaacgcatcgtggagcgactgaggcagcctccttcaatttccgcggaggtggagaagattaaggaacagatttcggagaataaaaacgtatccgtagatatggaaaagttacagccactgtacgaaacgctgaagcagcgcggagaggaaatgatagcgcgttcgggagggacagacaaggacatatccgctaaagccgtccaggataagctggaccagatggtgtttatctgggaaaacatccacacccttgtggaggagcgcgaggcgaagcttctggatgtgatggaactggccgaaaaattttggtgtgaccacatgtcactcatcgtgacaattaaggacacacaggattttattagggacctcgaggaccctggcatcgacccatcggtggttaaacaacagcaggaagctgctgagaccattcgcgaggagattgacggtctgcaagaggagctggatattgttatcaatctggggtcagaactgatcgctgcatgcggagaacccgacaagcccatcgtcaaaaagtccatagatgagctgaactctgcctgggacagcttgaacaaagcatggaaggaccgcatcgacaagctggaggaggccatgcaagcagccgtccagtaccaggatgggctgcaggcagtgttcgactgggttgacatagcgggtggcaagcttgctagcatgtcccccatagggaccgacctcgaaactgtcaaacagcagattgaggagctcaagcagttcaagtccgaggcctaccagcagcagatcgaaatggagcgtctcaaccaccaggctgagctgctcctaaaaaaagtgaccgaggagtcagacaaacacacagtccaggatcctcttatggagctcaagttaatctgggactcactggaggagagaattatcaataggcagcacaagctggaaggcgcccttcttgctctgggtcagtttcagcacgcactcgatgagctcctggcgtggctgacccacaccgaggggcttcttagcgaacaaaaacctgtagggggagatccaaaggcaatcgagatcgagcttgcaaaacatcatgtgcttcagaacgacgttctggctcaccaaagcacagtggaggcagtgaacaaagctggcaacgacctgatcgagtcctctgccggagaggaggcatcaaatctgcagaataagttagaagtcctcaaccaaagatggcaaaacgtgttggagaaaactgagcagcgcaaacagcagctggatggggccctgaggcaagctaagggatttcacggagagatcgaggatctccagcagtggctgacggataccgaacggcatctgttagccagcaaacctctgggtggactgcccgaaactgcgaaggaacagttgaatgttcatatggaggtctgcgccgcttttgaggctaaggaggagacttataagagccttatgcagaaaggccaacagatgcttgcacgatgtccaaagtccgccgagactaatatcgatcaggatatcaataacctcaaggagaaatgggagtcggtggagaccaagctcaatgaacggaagacaaagctcgaagaggcccttaatctggctatggaattccacaacagtctgcaggattttatcaactggctgacacaagcagaacagaccttaaatgtggctagtagaccgagcctgattttggataccgtactgtttcaaattgacgaacacaaagtctttgccaacgaggtgaactcacaccgggaacagattatcgagcttgataaaacaggaacccatctgaaatatttctcccagaagcaggacgttgtgctcattaagaatctgctgataagtgtgcaatctcggtgggaaaaagtcgtgcagagattggtggagaggggtaggtctttggatgacgcccggaaaagagcaaaacagtttcacgaggcgtggagcaagctgatggaatggttagaagagtccgaaaaatccctggatagcgagctagagatcgccaatgatcctgataagataaagactcagcttgctcaacacaaggaatttcagaaatcccttggagctaaacactcagtctacgatacaacaaacaggaccggaagatcccttaaggaaaagacatctctagccgacgacaacctgaaacttgacgacatgctcagcgaactgagagacaagtgggataccatttgcgggaagtctgtggaacggcagaataaactcgaggaagcccttttattctctggacaatttactgatgcattacaggctttaatcgactggctttaccgcgtcgaaccccagctcgctgaagatcagccagtccacggcgacattgacttagtgatgaaccttatagataaccataaggcctttcagaaagaactggggaaacggaccagcagtgtccaggccctgaagcgcagcgcccgggagctcatagagggcagccgcgatgacagttcctgggtcaaggtgcagatgcaggagctgtccacccggtgggaaacagtgtgcgccctgagcatctctaagcagactagactggaagctgctctgaggcaagccgaagagttccattccgtggtccatgccctgctggagtggctggccgaagctgagcagacattacgcttccatggggtgctccccgatgatgaggatgctctgaggacactcatcgaccagcacaaggagtttatgaaaaaattggaggaaaagagagccgagctgaataaggccacaactatgggcgacaccgtcctggccatctgtcaccccgattctatcacaacgattaagcattggatcaccataattcgggccagattcgaagaagtcctcgcctgggctaagcagcaccagcagcgcctcgcatcggccctcgcaggtctaatcgctaaacaggaactactggaggcacttcttgcttggcttcagtgggcagagacaacactgaccgataaggacaaggaagtcataccccaagagatagaggaggttaaggccctgatagccgagcaccagaccttcatggaagaaatgacccgcaaacagcctgacgtggataaagttactaagacctacaagcggcgggccgctgatccatcctctctgcagtcccacattcctgtgctcgataaggggcgcgctgggcgaaagcgatttcctgcaagcagcctgtatccaagtggaagccagacgcaaattgagacaaaaaacccacgcgtcaatctactggtgtctaaatggcagcaggtctggctgctcgccctcgagagaaggcgaaaactcaatgacgcccttgatcggctcgaagaattgagagaattcgctaatttcgatttcgatatatggcgtaaaaagtacatgaggtggatgaatcacaagaagagccgcgtgatggactttttcagacgcatcgataaggaccaagacgggaagattaccagacaggagttcatcgatgggatcctttccagcaagttcccaaccagccggctcgagatgagtgctgtcgccgacattttcgatcgtgatggggacggatacattgactattatgagtttgtggctgcactgcaccctaataaggatgcctacaagccaattaccgacgccgacaagatcgaagacgaagttactcgccaggtggctaaatgtaaatgcgcgaaaagatttcaggtggagcaaatcggtgacaataagtacagagtgtccttccagagtaattttggtgactcccagcagctccgactagtgcgcatcctcagatcaacagtaatggttagggtgggaggagggtggatggccctcgatgaatttcttgtcaaaaatgatccttgtcgcgtacaccatcacggaagtaagatgcttagaagtgagtcaaactcgagtattaccacaactcagcctaccatcgcgaaggggcgcaccaatatggagctaagagaaaagttcatcctcgccgatggcgcgagccaaggcatggcagccttccggcccagagggcgccgctcccgcccaagctccaggggcgcctcaccaaacagaagtacttcggtgagctctcaggctgcccaggccgcttctccacaggtgcccgctacaacaactccgaagggtactccgatacagggctctaagcttcgccttccggggtacctgagcggcaagggcttccattcaggtgaagattcggggttgattaccacagctgcagcccgcgttaggacgcagttcgcggactcaaagaagaccccctcaagaccaggctcgcgcgctggctcaaaagccggaagccgcgcaagctcacgaagaggcagcgacgcaagcgattttgacatctccgaaatccagtccgtgtgtagcgacgtcgagactgtcccacaaacccaccggcctactccaagggccgggagccggccatcaaccgccaagccctccaagattcctacccctcagcgcaaatcccccgccagcaagctcgacaaatcttctaagcggtag

SEQ ID NO: 186115 - DNA, 16374 bp, synthetic construct
  misc_feature 1..16374: note = Description of Artificial Sequence: Synthetic coding sequence
  source 1..16374: mol_type = other DNA
atggccggctacctgagccccgccgcctacctgtacgtggaggagcaggagtatctccaggcttacgaagatgtgctggagagatataaggacgaacgtgacaaagtacagaaaaagacattcactaaatggatcaaccagcatctaatgaaagttaggaagcacgtcaacgatctgtacgaagatcttagagatggccacaacctcatatcactcttagaagtactgagcggcgatactttaccgcgtgagaagggcagaatgcgtttccaccggctccagaacgttcagattgctctggattatctgaaaagacggcaagtcaagctagtgaacatccgtaatgacgacattaccgatggaaaccctaaattaactctcggactgatctggactattattttacattttcagatcagcgatatccatgtcactggagaatccgaggatatgtcggctaaggaacgcctcctactgtggactcaacaggccactgagggttatgctgggatccgctgcgagaatttcactacttgttggagggacggcaaactgttcaatgccatcatccataagtaccgcccagatctgattgacatgaatacagttgccgtgcagtcaaacctggcaaatctggaacacgctttctacgtggctgagaagatcggcgtaattcgactgctggatccagaagatgtagacgtttcttcacctgatgaaaagagtgttataacttacgtgagtagcttgtacgatgccttcccaaaggtgccagagggcggggagggcataggagcaaacgacgtagaggtcaagtggatcgagtaccagaacatggtcaattacctcatacagtggattcgccatcatgtaacgaccatgtcagaacggaccttcccaaataaccctgtggagctgaaggctttgtacaaccagtaccttcagtttaaagaaacggagattcctcctaaagagaccgaaaagagtaagatcaagaggttgtataaactgctggaaatatggattgagtttggacgcatcaagttactccagggctatcaccccaatgatatcgagaaggaatggggtaagctaatcatcgccatgctggagcgcgagaaggctctaaggcccgaggtcgagcgactggagatgctgcagcagatagccaatcgcgtgcaaagggatagcgtgatttgcgaggataaattaattctagccggcaacgctctgcagagtgacagtaagcggctcgaatccggtgtgcaattccagaatgaagccgagattgctgggtacattctcgaatgcgaaaacctcctaagacagcatgtaatagatgtgcagattcttatcgacgggaagtactatcaggcagatcagctggtgcaacgtgtagctaaactcagggatgagatcatggcccttagaaatgaatgctcctctgtgtattctaagggcagaatccttaccacagaacagacgaaacttatgatttctggcattacccaatctcttaatagcggcttcgcccagaccttgcatccatcactcaccagcggactgacgcaaagcctgacacccagtcttacttcctccagtatgacgtcgggactcagcagtggaatgacaagccggcttacaccatccgtgacgccagcatacactcctggattcccctctggattggtaccgaacttttcaagtggagtagaacctaactcactacaaaccttgaagcttatgcagattaggaaaccgctcctgaaaagcagcctgctcgaccagaatctgacagaggaggaaatcaatatgaagtttgtgcaggatttgctgaactgggtcgatgaaatgcaagtgcagttggaccgaacggagtgggggtcggatctacccagtgtggaaagtcatctagagaatcacaaaaacgtgcatcgagcgatcgaagaattcgaatcctctctgaaggaagctaagatcagtgaaattcagatgaccgccccattgaagttgacatatgccgagaaactgcaccggctggagtcccaatacgccaaactccttaacacctctcgaaaccaggagcgccacctggatacactgcataactttgtgtcccgtgccaccaatgaactgatctggttaaatgagaaagaagaagaagaagtggcctacgattggagcgagcggaatacgaatattgcccgaaagaaggactatcatgcggaacttatgcgcgagctggaccagaaagaggagaacataaaatccgtgcaagagattgctgaacagttactgctcgagaaccatcccgcaaggctgactatagaggcctaccgagccgccatgcaaacccagtggagttggatcttgcagctgtgccaatgcgtagaacaacacatcaaagagaatactgcttattttgaatttttcaatgatgcaaaagaggcaactgattacctgcggaacctcaaggacgcaattcagcgtaaatactcttgtgaccgaagctcaagcattcacaaactggaggatcttgttcaggaatccatggaggagaaggaggaactgttgcagtacaaatctaccatagctaatctgatgggaaaagccaagactataattcagttgaagccgagaaatagcgattgccccctcaagacttcgatcccaattaaggcaatttgcgattatcgtcagattgagattaccatctacaaggatgatgaatgtgttcttgcaaataacagccaccgggccaagtggaaagttatatcgcctaccggcaacgaggctatggtgccctccgtctgtttcactgtacctcctccaaataaagaagccgtggacctggctaaccgaattgagcagcaataccagaatgtgctcacattatggcatgaatcgcatattaacatgaagtctgtggtgtcatggcattacttaattaacgaaattgacagaatcagagcctccaacgtagctagcatcaagacgatgcttcccggcgaacaccagcaggtactatcaaacttgcagtctaggttcgaggacttcttggaggacagccaagaatctcaggttttcagcggcagtgacataacccagctcgagaaggaagtgaatgtgtgtaaacagtattatcaggagcttctcaagagcgctgagagggaggaacaagaagagtccgtctataacctgtacatcagcgaggtccggaatatccgccttaggcttgaaaattgcgaagatcgtctgatcaggcagattagaacccctctcgaaagagacgacttgcatgagtccgtgtttcggatcaccgagcaagaaaaactgaagaaggagctggagagactgaaagacgatctggggacaattaccaataagtgtgaggagtttttctctcaggccgctgcctctagcagcgtcccgacgctgagaagcgagctgaatgtggtcctacagaatatgaatcaggtttattctatgagcagcacctatatcgacaagctaaagaccgtaaacctcgttctcaagaacactcaggctgcagaggctctggtcaagctgtatgagaccaaactgtgcgaagaggaagcagtgatcgcagataaaaacaatatcgaaaatcttatctctacactgaagcaatggcgcagtgaggtcgatgagaagaggcaagttttccacgcactggaggacgagctgcaaaaggcgaaggctatttcggatgagatgtttaagacctataaggagcgagacctggatttcgactggcataaggaaaaagccgaccagctcgtggagcgttggcaaaacgtgcatgtgcagatcgacaacaggctgcgcgatctcgagggaatagggaaaagcttgaaatactaccgtgacacataccatcccctggatgactggattcaacaggtggagacaacccaacgaaagatccaggaaaaccaacccgagaactcaaaaaccctggcgacacagctcaaccaacagaagatgctagtttcggagatcgagatgaaacagtccaagatggatgagtgtcagaaatacgccgagcagtactccgcaaccgtgaaggattacgagctccaaaccatgacgtaccgggctatggtggattcccagcagaagagccccgtgaagagaagacgcatgcaaagctctgctgatctgatcatccaggagttcatggacctgagaacaagatacacagctctggtcaccttaatgacccaatatataaaattcgccggcgattcactcaaaaggcttgaagaagaagagaaatcactggaggaggagaaaaaggaacatgtcgagaaggctaaagaactgcagaaatgggtctccaacatctcaaagactctcaaggacgcagagaaggctggcaagccaccatttagtaagcaaaaaatctccagcgaggagataagtacaaagaaggagcaacttagtgaggccctccagacaatccagcttttccttgctaagcatggggataagatgacggatgaggagcgtaacgaactggaaaaacaggtgaaaacactccaggaatcttacaacctgctgttctctgaatctctcaaacagttacaggaaagccaaacctcaggggatgtcaaggtggaggagaagattgtcgcagaacggcagcaggagtacaaggaaaaattacagggaatctgtgatctcctgactcaaaccgagaatcggttaataggccatcaagaagcctttatgattggggacggaaccgtcgagctgaagaaatatcagagtaagcaggaagaactgcagaaggatatgcagggctcagcccaggctctggcagaagtggtgaagaatacagagaacttcttaaaagaaaatggcgagaagctgtctcaggaggacaaagctctcattgaacaaaagctgaacgaggctaagatcaaatgtgaacagctgaacttgaaggccgagcagagtaagaaggagttagacaaggtggtcacaactgcaatcaaggaagagacagagaaggtcgccgcagtgaagcagctggaagagagtaaaacgaagatagagaatctcttggattggttatcgaacgtcgacaaagactccgagcgagcaggcacaaagcataagcaggtgatcgagcagaacggaacccactttcaggagggggacggaaaatccgctattggggaggaagacgaagtgaacggcaatctgttagaaaccgatgttgacgggcaggtcgggaccacacaagagaatttgaatcagcaatatcagaaggtgaaagctcagcatgaaaaaattatcagtcagcaccaagctgtgatcattgctactcaaagtgcccaggtcctgttagaaaagcagggccagtacctttcacccgaggaaaaagaaaagttgcagaagaacatgaaagagctgaaagtgcattatgagacagcactggccgaatccgagaagaagatgaagctgacacattccctgcaagaggagcttgagaagtttgatgctgattacaccgaattcgagcactggcttcagcagagtgaacaagagcttgaaaacctggaagcaggggcagatgatataaatggccttatgaccaaacttaaacggcagaaatcattcagtgaagatgtcattagccacaagggcgacctcagatacataactatcagtgggaaccgcgtactcgaggcagctaagtcttgttccaaacgcgatggagggaaagtggatacgagtgcgactcatcgggaggtccagcgaaagctggatcacgcaaccgaccgctttagatcactttattccaagtgtaatgttctggggaacaacctcaaggacctggttgataaataccagcattatgaggatgcgtcgtgtggtctcctcgcagggcttcaggcctgtgaggccacagcctccaagcatctctctgaaccgattgccgtcgatcctaaaaacctgcagcgtcagcttgaagagactaaggccctgcaggggcagatttccagtcagcaggtggccgtggagaagctcaagaaaacggctgaagtcttgctggatgccagaggctcgctacttccggcaaagaacgatatacagaaaactcttgacgatatcgtgggcagatacgaggatttatctaagtctgtcaatgaacggaatgaaaaattgcagatcaccctcactcggagcctctccgtccaggacggactcgacgagatgctggactggatgggcaatgtggaatcgagcctcaaggaacaagggcaggtccctctgaacagtaccgcccttcaggacattatctccaaaaacatcatgctggaacaggacattgctggacggcaatcatctattaacgccatgaatgagaaggtgaagaagttcatggagacaaccgaccctagcactgcctcaagcttacaggccaaaatgaaggaccttagtgcccgcttcagtgaagcatcccataaacacaaagagacactggccaagatggaggaactgaagacaaaagtggagctcttcgagaacctgtctgagaaactccagacattcttggagacgaaaacacaggcacttacggaggtggatgttcctggcaaagacgtcaccgagcttagtcagtatatgcaagaatcaacctccgagttcttagagcataagaaacacctggaggtcctccacagcctcctgaaagaaatcagcagccacggacttccttccgacaaggccctggttctggagaagaccaacaatctgagtaaaaagttcaaagagatggaagacacgatcaaggagaaaaaggaagccgtgacatcctgccaggagcagctcgacgccttccaagtcttggtaaagtcccttaaatcatggattaaggagacgaccaaaaaggtgcctattgtccagccatccttcggcgccgaagaccttggaaagagtcttgaggatactaaaaaattacaggagaagtggtctctgaagactcccgagatacagaaggtcaacaactcgggtatctctctgtgtaacctgattagtgctgtgactacgcccgcaaaagcgattgctgccgtcaagtccgggggggctgtcctgaacggagaaggcaccgccaccaacacagaggagttctgggcgaataaaggcctgacatccattaaaaaagatatgaccgacatctcccacggctacgaagacctggggttgctcctcaaggataaaatcgctgaacttaacaccaagttgagtaagctgcagaaagctcaggaagagagttcagctatgatgcagtggctccagaaaatgaataaaactgctaccaagtggcagcaaacgcccgcccccactgacactgaagccgtgaagacgcaagtcgaacagaacaaatctttcgaagccgagctgaagcagaatgtgaacaaagttcaagaactgaaggacaagctcacagaactcctcgaggagaatcctgacacccctgaagcgccgaggtggaagcagatgctcaccgagatcgactcaaaatggcaagaactgaatcagctcactattgacagacaacagaagctcgaggaatcttccaacaacttgactcagttccaaaccgtggaggctcagctgaagcagtggttggtggagaaggagttgatggtttccgtcctgggacccctatcaatcgacccaaacatgctgaatacacagagacagcaggtgcagatcttactgcaggagttcgccaccagaaagccacaatatgagcaacttaccgctgccggccagggaatcctgagtcggccaggcgaagacccttctctgcgcggaatagtgaaagaacaactcgccgctgtcacacaaaaatgggacagtctgaccggccagctttctgatagatgcgactggattgaccaggccatcgtgaagtctacccagtaccagagtctgctgcggtccctcagcgacaagctttccgatttagacaacaagcttagctcctctctggcagttagcacgcatccagatgccatgaatcagcagctagagaccgcacagaagatgaaacaggagatccaacaggagaaaaaacaaatcaaagtggcacaggctctctgcgaagatttatccgctctggtaaaggaggagtatctcaaggccgagctgagtcgccagctggaggggattctgaagtcattcaaagacgtggaacagaaagccgaaaaccacgtgcagcacttgcaatctgcctgtgccagttctcatcaatttcaacaaatgagtcgggacttccaggcctggctggataccaagaaggaggaacagaataagagtcatcccatctccgctaaactggacgttcttgagagtctgattaaggatcacaaggactttagtaagacactgacagcccaatcacatatgtatgaaaaaactatcgctgagggtgagaacctcctgctaaagacgcaggggagcgagaaagcggcccttcagctccagctaaataccataaagactaattgggacaccttcaataagcaggtaaaggagcgggagaataagcttaaagaaagcctcgaaaaagcccttaaatacaaagaacaggtggagacgctgtggccatggatcgacaaatgtcaaaacaatcttgaggagataaagttctgtcttgatccagcagaaggagagaattcaatagccaagctgaaatcccttcagaaagagatggatcagcattttggtatggtggagttgctcaacaacacagctaactccttgctgtcggtctgcgagattgacaaggaagtggtcactgatgagaataaatccctgatccaaaaagtagatatggtcactgaacaattacatagcaagaagttttgcctcgagaatatgacgcagaagtttaaggagttccaagaggtctctaaagagtccaaacgccaactccagtgcgctaaggaacaactggacatccacgatagcctgggaagtcaggcctacagtaacaaatacctgacgatgctgcagactcaacaaaaaagcctccaggccctaaagcaccaggtggatcttgctaaacgtctggcacaggacctcgtcgttgaggcatctgattctaaggggacctccgacgtcttactccaagtggaaacaattgcacaagagcacagtacactgtcacagcaagtggacgaaaaatgcagtttcctggagaccaaactccagggaattggtcattttcaaaatactattcgggaaatgttcagccagtttgcggaattcgacgacgagctggactccatggcacccgttggcagagatgcggagacactgcaaaagcaaaaagaaacaattaaagcgtttctgaaaaagctggaagccttaatggcatccaatgataatgccaataaaacttgcaagatgatgttagctactgaggaaacgtctccagacttggttggtatcaagcgggatctagaagccctgagcaagcaatgcaataaacttctggatcgggcccaagccagggaagaacaggtggagggcaccatcaagagactggaagaattttacagcaagctgaaggaattcagcatcctgctgcagaaagccgaggaacacgaagaaagccagggacccgtgggtatggagactgaaacaataaaccagcagctgaatatgttcaaggtctttcagaaagaagaaatcgaaccgctgcaaggcaaacagcaggacgttaattggttgggccagggccttattcaatccgcagcaaagtctacaagcacacagggtctcgagcacgatcttgacgacgtgaatgcccgctggaagacattaaacaaaaaagttgcccagcgcgcagctcaactgcaggaggcgcttctgcactgcgggcggtttcaggacgcccttgagtcacttctttcatggatggttgacacagaggagctggtagctaatcaaaaaccccccagcgccgagttcaaggtggtgaaagctcagatccaggagcaaaagcttttgcaaagactcctggatgataggaaatctactgtcgaggttataaaacgggaaggagagaagattgctaccacggcggaacccgctgacaaggtgaagattcttaagcagttatctcttctggactctagatgggaagcgcttcttaataaggccgagacccggaatcggcagctcgaaggtatttccgtggtggctcagcagtttcatgagacattggaaccactgaatgagtggcttaccacaatcgaaaagaggctggtgaattgtgagccaataggcacgcaggcttcaaagttagaggaacagattgctcaacataaggccctagaggacgacatcatcaatcataacaaacacttgcatcaagccgtctcgattggtcaatcgctgaaagtcctttcctctagggaggataaagacatggttcagtctaagctggatttctctcaggtgtggtacattgagatccaggaaaaatcacactcgaggtccgagctgcttcaacaagccctctgcaacgctaaaatctttggggaggatgaggttgaactgatgaactggctcaatgaagtgcatgataagctctctaaactgagcgtacaagactatagtactgaggggctttggaaacaacagtccgagctccgcgtattacaggaagatatccttctgaggaagcagaacgttgaccaggcattgctgaacgggttggagttgctgaagcagaccacaggggacgaagtacttattattcaggacaagctggaggcgattaaggcccggtacaaagacatcaccaagctgtctaccgatgtcgccaaaactttagagcaggctcttcagctagcccggcgcttgcacagcacccatgaagaactctgcacgtggctggacaaagtggaggtggagcttttatcatatgagactcaagtactgaaaggggaggaggcaagtcaggcgcagatgagaccaaaggagttaaagaaagaagctaagaacaacaaggccctcctcgactccctcaatgaggtttcaagtgctctgctcgaactggtgccatggcgcgccagagagggcctcgagaagatggtcgccgaggacaacgagcgctacagactcgtatcggacaccatcacacagaaggtggaggagattgatgccgccatattacgatctcagcagtttgaccaggcagcagacgctgagctttcctggataaccgagaccgaaaagaaactgatgtcgcttggggacatccgactcgaacaggaccagacttcagctcaactccaggtgcagaagaccttcacaatggagattttacgacacaaagacatcatagacgatttagtgaagtctggccataagatcatgacggcttgctctgaggaggaaaaacaaagtatgaagaagaagctcgataaagtccttaaaaattacgatactatttgtcaaataaattctgagcggtacctacaactcgagagggctcagtctttagtgaatcagttttgggaaacctatgaggagctttggccctggctgacggagacgcagagcatcataagccagcttcccgcccccgcgctggaatacgaaaccctgcgtcaacaacaggaggagcaccggcagctgagggaactaatagctgaacacaaacctcacatcgacaaaatgaataagacaggcccccagctgttagagctttcccccggcgagggcttttccattcaggagaagtacgtggctgccgacacactgtacagtcagataaaggaagacgtgaagaagagggctgttgcactcgacgaggcgatcagccagtctacccagtttcatgacaaaatagaccagattcttgagtccctcgaacgtatagttgagcgcctgcgacaaccaccaagcatctccgcagaagtggagaagattaaagaacagatatctgagaacaagaacgtgagcgtggatatggagaagctgcagcccctctatgagactttgaaacagcgcggagaagagatgatcgcccgtagcggtggcaccgacaaagacatctcagccaaggccgttcaggacaagctcgatcagatggtttttatatgggagaacattcacacgctggtggaggaaagggaggctaaacttttggacgtgatggaactcgccgagaagttttggtgcgaccacatgtctctcatagtgactataaaagatacacaagatttcattcgcgatctagaagacccgggaattgatccatccgtggtcaagcagcagcaagaagccgctgagaccatccgggaagaaatagatggacttcaggaggagcttgacattgtaattaatctggggtcagaactgatcgccgcctgcggggaaccagacaaaccaatcgtcaaaaagagtatcgacgagctgaattccgcatgggactcgctcaacaaggcatggaaggaccggattgacaaacttgaggaagccatgcaggccgctgtgcagtatcaggacggacttcaggctgtgtttgattgggtagacatcgccggaggtaagctggcctccatgtcacctattggcactgacttagaaaccgttaaacagcagattgaggagctcaagcagtttaaatctgaggcctaccagcagcaaatcgagatggagcggctgaaccaccaagcagagctcttattgaaaaaggtgactgaggagtcagataagcacacagtgcaggacccactgatggaactcaagctaatctgggatagcttagaggaacggattatcaacaggcaacacaagctggaaggcgccctgcttgcgctcggtcagtttcagcacgcactcgacgagctcctggcctggctgacccatacggaaggcctgctgtccgaacaaaagcctgtaggaggtgaccccaaggccatcgagatcgaactggctaagcaccatgtcctgcagaacgacgttctcgctcaccagtcaaccgtggaggccgttaacaaggcagggaacgacttaatcgaatccagcgcaggggaagaggcctccaacctccaaaataaactggaggtgttaaaccagcggtggcagaacgttctcgaaaagacagagcagcggaagcagcagctggacggtgcccttaggcaggccaagggattccacggtgagattgaggatcttcagcagtggctgacagataccgagaggcacttgctcgcctctaagcctttgggtggcctcccagaaactgccaaggaacagctcaacgttcatatggaggtgtgtgcagcctttgaagccaaggaggaaacctacaagagcctgatgcagaaggggcagcaaatgctcgcccgctgcccgaagagcgctgaaactaatatcgaccaggatatcaataatttaaaggaaaaatgggaatccgtagaaacaaagttgaacgagcggaaaactaagctggaagaggcgctcaacttggccatggagtttcacaatagcttacaggattttatcaattggttgactcaggcggagcagactctgaatgtggcctctagaccgtccttaatcctagacacggttctcttccagattgacgagcacaaggtttttgctaatgaggtgaactctcatcgcgagcaaattattgaacttgacaagacgggcactcatctcaaatactttagtcagaagcaagatgtcgtgctgatcaaaaatctgttgatctccgtgcagagccgatgggagaaggtcgtgcagaggcttgtcgagaggggacgctcactcgatgacgctagaaagcgcgctaagcagttccatgaagcctggagcaaattgatggagtggctagaagaaagtgaaaagagcctagacagtgagctggaaatcgcaaatgaccccgacaaaatcaaaactcaattggcacagcacaaagagtttcagaagtcactgggtgcgaaacactccgtatatgatacaactaacagaacaggcagatctttgaaagagaagacatccttggcagacgacaacttgaaactagacgacatgctctctgaactgagagacaagtgggacaccatttgcgggaagagtgttgaaaggcaaaacaagctagaggaggctttactctttagcggccagttcacagacgccctgcaagctctcatcgattggctgtaccgggtcgagccacaactcgctgaggaccagccggttcacggcgacattgatttagtcatgaatctgatcgataaccacaaggcttttcagaaagaattgggtaagcgcacttccagcgtgcaggcgttgaaacggagcgccagggaactgatagagggaagcagagatgacagctcttgggtaaaagtccagatgcaagaactgtctacaagatgggaaaccgtatgcgccctttcaatctccaaacagaccaggttggaagctgccctgcgacaggccgaagaattccactcagtggtccacgcactgctggaatggctcgctgaagcagaacagactctcagattccacggtgtgcttccagatgacgaggatgctctgcggacactgatcgatcagcacaaggaattcatgaagaagctggaagagaaaagggccgagctgaataaagccaccaccatgggcgacactgtccttgccatatgccatccagactccattactaccatcaaacactggataacaatcatcagagcccgctttgaggaggtgctcgcgtgggcgaaacagcatcagcagcgattagccagcgccctggccggacttattgctaaacaagaattgttggaagctctgctggcctggctgcagtgggcagagactactcttaccgacaaagataaggaggtgatcccccaggagattgaggaggtgaaggcactgatcgccgaacatcagacatttatggaagagatgacacggaaacaaccagacgttgataaggtgaccaaaacgtacaaacgtcgggccgctgacccctccagtctacaatcacacattccagtgcttgataagggcagagccggacgcaaaaggttccccgcttcttctttgtacccttctggctcccagacccagatcgagaccaaaaaccctagagtaaacctgctcttacgagaatttgcaaactttgactttgacatttggcgaaagaaatacatgagatggatgaaccacaagaaaagccgggtaatggacttcttcaggaggattgataaggaccaggatggcaagatcaccagacaggaatttatcgacgggatactcagttccaagttccctacttcaagactggagatgtctgccgtcgccgacatcttcgatcgagatggcgatggatatattgactattacgaatttgtggccgccctgcatccaaacaaggatgcttacaagccaattacagatgccgacaaaatcgaagatgaggttacacggcaagtggctaagtgcaaatgcgcgaagagatttcaagtggagcagatcggggacaataaatatagagtgtcatttcagtcaaattttggtgacagccagcaacttagactagtgcggattttgcgcagtaccgtgatggtgcgtgttggggggggatggatggccctcgatgagttcttagtcaagaacgatccttgccgagtgcatcatcacggaagcaaaatgctcagatcagagagcaatagcagcatcaccaccacacaaccaaccattgccaaaggccgtaccaacatggaactacgggagaagttcatcttggctgatggggcaagtcaaggtatggccgcttttaggcccagaggccgtcgttccagaccttcatccagaggcgcgtccccgaataggtcgacttccgtttcctcacaggctgcccaggcagcctccccgcaggtgcctgccactacaacccccaaaggcactcctatccagggatcaaagttgcggctacccggctacctgtctggaaagggcttccatagcggcgaggattccggtcttattacgactgcagctgcgcgggtgagaactcagttcgcagactccaagaagacgccgtctaggcctgggtcccgagcaggtagcaaggctgggagtcgcgcctcttcccgtaggggatcggacgcgtctgatttcgatatcagcgagattcagtccgtttgctcagatgtcgagacagtgccgcaaactcaccggccaaccccacgggctgggagccggccgtctacagccaaacctagcaagatccctactccccagcggaagagtccagcctcaaagctcgataagagcagtaagcggtag

SEQ ID NO: 186116 - DNA, 9183 bp, synthetic construct
  misc_feature 1..9183: note = Description of Artificial Sequence: Synthetic coding sequence
  source 1..9183: mol_type = other DNA
atgcacagcagcagctacagctaccggagcagcgacagcgtgttctccaatacaacaagcacacggacatcactggactcaaatgaaaatctcctcctcgtgcactgtggccctaccctgatcaattcctgcatatccttcggctctgagtccttcgatggtcacagattagaaatgctccagcagattgctaacagagttcagcgggattctgtaatctgcgaggacaagctgatcctggccggcaacgcccttcaatccgactccaaaagacttgaatctggtgttcagttccagaacgaagccgagatcgcgggctatatactggaatgcgagaacctcctaaggcaacatgtcatcgatgtgcaaatactcattgacggcaagtattatcaggccgaccagctggttcaaagagtcgctaagttgcgggacgagattatggccctgagaaacgaatgcagcagtgtctattccaaagggagaatactcacaactgagcagacaaagctcatgataagtgggatcacacaatccttaaatagcgggttcgctcagaccttacatccgtccctgacttccggactaacacagagtctgactccttcgcttaccagttcctcaatgacaagcggcctatcttccggaatgactagtcggctgaccccttcggtcactcctgcttatactcctgggtttccttccggcctggtgccaaatttttcctctggggtcgaacctaatagcttacaaactcttaagttaatgcagattcgtaaacctctgctcaagtcttccttactggatcaaaacctcaccgaagaggagatcaatatgaagtttgtgcaggatctcctgaactgggtcgatgagatgcaggtgcagttagaccgtactgagtggggctcagatctgccgtccgtagaaagtcatcttgagaaccataaaaatgtccatcgcgccatcgaggagttcgaaagctccctgaaagaggcgaagattagcgagattcagatgacagctcctctcaagctgacttatgcggagaagcttcacaggttagagtcccaatacgcaaaactgttaaacacaagcaggaatcaggagcgccatctggacacactccacaacttcgtgtcccgggctacaaatgaacttatttggttgaacgagaaagaggaagaggaggtagcgtatgattggtcggaaagaaacacaaatatcgccagaaaaaaggattaccacgccgagcttatgcgtgaattggatcagaaggaagaaaacatcaagagtgtgcaagaaatagccgagcagctccttctggagaaccaccctgcacgactgacgatagaagcttacagagcggcaatgcaaacccagtggtcatggattctccaactctgtcagtgcgttgagcagcacattaaggagaataccgcctatttcgagttcttcaatgacgcgaaggaggcgacagactatctaaggaacctcaaagacgccatacagcgtaaatatagttgcgaccgctcatcgtccattcacaaacttgaagatctggttcaagagagcatggaggaaaaggaagaactcttacagtataagagtactatcgcgaacctgatgggtaaagcaaaaactattatccagttgaaaccccggaatagcgactgccccctgaagacatcgataccaatcaaagctatctgtgattaccgccaaatcgagatcactatttacaaagacgacgagtgcgtactagcaaataattctcatcgggctaagtggaaagtgatcagcccgactggcaacgaagccatggtaccaagtgtgtgctttactgtcccacctccaaataaggaagcagtggacctcgctaacagaattgagcagcaataccagaacgtcttaacgctttggcacgaatctcacatcaacatgaaatctgtcgtctcctggcactacctcatcaatgagatcgaccggattcgggcgtcaaatgttgcaagtatcaaaaccatgctgccaggcgagcaccagcaagtcctgagtaacctgcagagccgatttgaggatttcctggaggattcacaggagtctcaggtgttctcaggatctgacataactcagctggaaaaggaggttaacgtctgcaagcagtactaccaggaactgttaaagagtgccgagagagaagagcaggaggaatctgtgtacaacctttacataagcgaggtgcgtaacattcggctgagactagagaactgcgaagacaggctcataagacagatccgtacacccctggaacgagatgatctgcatgagtctgtgtttagaataactgagcaggaaaaactcaagaaagagctggagcggcttaaggatgacctgggaacgatcactaacaagtgtgaggagtttttctcacaagcagctgcttcttcatctgtgccaactcttaggtctgaactgaacgtcgtgctccaaaatatgaaccaagtttacagtatgtcctcgacttacatagacaaactgaagacagtcaatctcgtgttgaagaacacccaggcagcggaagctcttgtcaagctgtatgaaactaaactctgtgaagaagaggccgtgattgctgataagaacaatatcgaaaatttgatctccactctgaaacaatggcggagcgaggtcgacgaaaaaagacaagtgttccatgcccttgaagatgaactgcaaaaagccaaggctatctcagatgaaatgttcaaaacttacaaggagagggatctggatttcgactggcacaaggaaaaggccgatcagctcgtggaacggtggcagaacgtccacgtgcagattgacaaccgcctgcgagatctggaagggatcggcaaaagtctcaagtactacagggatacttatcaccctcttgatgattggatacagcaggtggaaacaactcagagaaagatccaggaaaatcaaccagagaatagcaaaaccctggcaacccagcttaaccagcagaagatgctggtgagcgaaatcgagatgaaacagagcaaaatggatgagtgtcagaagtatgccgagcaatacagcgcaaccgtgaaagactacgagctgcagactatgacatacagggcaatggttgattctcagcagaaaagcccagtcaagaggaggagaatgcagagtagcgcagatcttatcatccaggaatttatggatctgagaactcgctatactgccctagtgactttaatgacgcagtacatcaaattcgccggagactcgctgaaacgactggaagaagaggagaagtcactggaggaagagaaaaaggaacacgtggagaaagccaaggaactgcagaaatgggtcagcaatatctcaaaaacattgaaagatgccgagaaggcaggaaagcctccattttcaaaacagaaaatcagttcagaggaaatttccaccaagaaggagcaattgagcgaggcgctgcaaactatccagctgtttctggccaaacatggtgacaaaatgactgacgaagagaggaacgagctcgaaaagcaggtgaagacactgcaggaaagctacaaccttctgttcagtgagtccctaaaacagctgcaggagtctcagacctcaggtgatgtcaaggtggaagagaagctggataaggtgattgccggcaccatcgatcagacaactggggaagtgctgtccgtgtttcaggcagtccttcgcggcctgatcgactatgacaccggcattaggctgttggaaacccaactgatgatcagcggcctaatttcacccgagctgcggaagtgtttcgacctcaaagacgccaaaagccacggactgatcgacgagcaaatcctctgccagctgaaggagctgtctaaggctaaggagattatcagcgccgcttcacctactaccattcctgtgcttgatgcgctggcacagagcatgataaccgagtcgatggctatcaaggtgctggaaatcctgttgtctactggctccctcgtcatccccgcgacgggcgagcagttaacgctgcagaaggccttccagcagaacctggtgtcttccgcattattcagcaaagtgctggagcgacaaaacatgtgcaaggatcttattgacccgtgcacttctgagaaagtctcactgatcgacatggtgcagaggtctacccttcaggagaatactggaatgtggctgttgccggtgcgcccccaagagggggggagaattactttgaagtgtggaagaaatataagcatactgcgggccgctcacgaaggactgatcgaccgggagaccatgtttaggttactgagcgcccagctcctgagcggcggacttattaatagcaatagcggacagagaatgacggtcgaggaagccgtgcgagagggtgtgattgacagggacacagcttctagtatcctgacctatcaggttcaaactggaggcataatccaaagcaatccagccaagaggctcacagttgacgaagccgtacagtgcgatttaatcacaagctcatccgcacttttagtgctagaggcacaaagaggttatgtgggattaatatggccccactctggcgagatattcccgacttcttcctctctccaacaggaactcatcacgaatgaactcgcctacaagatactcaatggaagacagaaaatcgcagctctgtacattcctgagtcttcccaggtgatcggcctggacgccgcaaagcagctgggaataatcgataacaatacggcaagcatactgaagaacatcaccctccccgacaaaatgcccgaccttggcgacctggaggcttgtaagaatgctcgaaggtggctatctttctgtaaattccaaccatctacggtccacgactatcggcaagaggaggatgtgttcgacggtgaggaaccagttacgacccagacttccgaagagaccaagaagctgtttctatcctacctgatgatcaattcctatatggacgcaaacactggccagcggctcctgttgtacgatggggatctggatgaggcagtcggtatgctacttgaaggatgtcatgcggaattcgacggcaatacagccataaaagagtgcctggatgtcctgtcaagctccggagttttcctcaacaacgccagcggtagggagaaggacgaatgcaccgcaacaccgtcttcctttaataaatgccattgtggggagccagagcatgaggagacaccagaaaacagaaaatgcgctatagatgaagagtttaacgaaatgcggaacacggtcatcaacagcgagttttcccagtccggcaagctcgctagtaccatatctattgatcccaaagtgaactcctcaccgtccgtgtgcgtgccttctctgatatcctatctcacacagacggaattggctgacatctccatgctccgttccgattcagaaaacattttgactaattatgaaaatcagtcccgggtcgagacaaatgagagagccaacgagtgctctcacagcaaaaatatccaaaactttccctcagatctgattgagaaccctattatgaagtccaaaatgagcaagttctgtggagttaatgagacggaaaatgaggacaataccaacagggatagcccaatttttgactactccccaaggctaagcgcgttactaagccatgataaactcatgcactcgcagggctcctttaatgacacacacactccagagtccaacggaaacaagtgtgaggctccagccctgagttttagcgacaagacgatgctgagcggccagcgcatcggcgagaagttccaggaccaatttctgggcatcgcggcaattaacatttctctgcccggcgaacagtatgggcaaaagtccctgaatatgattagttccaacccacaggtgcaataccataacgataaatacatatcgaatacatccggcgaggacgagaaaacccatccaggttttcaacagatgccagaggacaaggaggatgagtccgaaatagaagagtactcctgtgcggtcactcccggaggagatacagataatgccatcgtttcgctcacttgcgcaaccccactccttgacgagactatatccgcctctgactatgaaactagtttactgaacgatcagcagaacaatactggcacagatacagattccgatgatgacttttacgatacacctcttttcgaggatgacgaccatgactccctgcttcttgatggtgatgatagggactgcctgcaccccgaggactacgacaccctccaggaggagaacgacgagaccgcatctcctgctgatgtgttctatgacgtcagcaaggaaaatgagaactcaatggtgccgcagggagccccggttggatcactgagtgtaaagaataaagcgcactgtctgcaggacttccttatggacgtagagaaagatgaacttgactcgggcgagaagatccacctcaatcctgttggcagcgacaaagtaaacggccagagcctggaaacgggatcagaacgcgagtgcacgaatatcttagaaggagatgaatctgatagcctaaccgactacgacattgtcggcggcaaagagtcctttacagccagcctgaaatttgatgatagcggctcctggagaggcaggaaagaagagtatgttaccgggcaggagtttcactctgacacagatcacttagactctatgcaatcagaggaatcctatggggattatatctacgactctaacgatcaggacgacgacgacgacgacggaattgacgaggagggcggcggcattagggatgaaaatggcaagcctcgttgccagaatgtcgctgaagatatggatatccagctatgcgcaagcatcttgaacgagaacagcgatgagaacgagaatatcaacaccatgatccttctggataagatgcactcctgctctagcctggaaaaacaacaaagagtgaacgttgtacaactggcctcgccttccgagaataacctggtgacagaaaagtctaatctgcctgagtataccaccgaaattgctggcaagtcaaaagagaatctccttaatcatgagatggtgttaaaggatgtgttgccccctatcattaaggacaccgaaagtgaaaaaactttcggcccagcctccattagccacgataacaataacattagtagcacaagcgaactcgggactgacttggcaaacaccaaagtgaagctgattcagggttccgaacttcctgaactgacagatagcgtgaagggcaaggatgaatatttcaagaatatgacccccaaggtggactcctcactggatcacataatctgtaccgaacccgacctgattggcaaaccggctgaggagtcccatttatcactgatcgcaagcgtgaccgataaggaccctcagggaaacggcagtgacctcatcaaaggtagagacggcaagagcgatatactgattgaggatgagacatccattcagaaaatgtaccttggggaaggcgaagtgctagtggagggactcgtcgaagaggaaaatcgccacctaaagctcctgccaggcaagaatacccgagactcctttaaattaattaatagccagtttcccttccctcagattactaacaacgaagagctgaatcagaagggaagtttgaaaaaggctaccgtcaccttgaaagatgagcccaacaacctccagatcatcgtcagcaagtcacccgtccaattcgagaacttagaggaaatctttgatacttcggtctcaaaggagatatccgacgacatcacatccgatatcacctcgtgggaaggaaatacccattttgaagaatccttcactgacggaccagaaaaggaattagacctgtttacttacttaaaacactgtgctaaaaacatcaaggccaaagacgttgccaaaccgaatgaagacgtaccgagccacgtccttatcacagcaccgcctatgaaagagcatctgcaactgggagtgaacaacactaaggaaaagagcacctctacacagaaagattccccgcttaatgatatgatacagtcaaatgacttgtgctctaaagagagtatcagcggaggcgggaccgaaataagtcagttcactccggagtctatcgaggctaccttgagcatattaagccgaaagcatgtcgaagacgtcggcaaaaacgacttcctacagtccgagcgctgtgctaacgggttgggcaatgacaactcttcaaacactctcaacacagactacagcttcttggagattaataataagaaggagagaattgaacaacagctgcctaaggaacaggctttgtcccccaggagccaggaaaaagaagtacagattccggaattgtcccaggtgtttgtagaggacgttaaggatattctgaaatcccgactgaaggaaggacacatgaaccctcaagaagtggaagagccttcagcttgcgcagacaccaaaatacttattcaaaaccttataaagcgcatcacgacttcccagttggtcaacgaagctagcactgtcccatcagacagtcagatgagcgatagttccggtgtttcccccatgaccaacagctctgagttaaagcctgaaagtagagacgaccctttttgcatcggcaacttgaagtctgagttgctgctgaatattctgaagcaagatcagcactcccagaagatcaccggagttttcgaactcatgagggaactgacacacatggagtacgatcttgaaaagagggggatcacgtccaaggtcctaccattgcagctcgaaaacattttttataagctcctggccgacggatactctgaaaaaatcgagcatgtgggcgatttcaaccagaaagcgtgttctacttctgagatgatggaggaaaaaccacatatattgggcgatatcaaatctaaggaggggaactattatagtcccaatctggagaccgttaaagagatcggcctggagtctagtaccgtttgggcaagcacgcttccccgcgatgaaaaactgaaggacctgtgcaacgattttccctctcatctagagtgcactagtggctctaaggaaatggcctcgggcgattccagtactgagcagtag

SEQ ID NO: 186117 - DNA, 21741 bp, synthetic construct
  misc_feature 1..21741: note = Description of Artificial Sequence: Synthetic coding sequence
  source 1..21741: mol_type = other DNA
atgcacagcagcagctacagctaccggagcagcgacagcgtgttctcaaacacgacttccactaggacctcactcgattccaacgaaaatcttcttctggtacactgcggacccaccctgatcaactcctgcatcagttttggatccgagtcttttgacggacacagactggagatgctgcaacagatcgcgaatagagtccagagggacagcgtgatctgtgaggataaactgattctggccggaaatgccctccaaagcgactcaaagagattggaatcgggtgtgcaatttcagaatgaggcagaaattgctggctatattctggaatgcgaaaatctgctccggcagcatgtgattgacgtgcagatcctgatcgacggaaaatactaccaagccgatcagttggtccagcgggtcgcaaagctgcgagatgaaataatggccttgaggaacgagtgcagctcagtctacagtaagggccgcatcttgaccacggaacaaacgaaactgatgatttcggggatcacacagtcattgaatagtggcttcgcccaaaccctgcacccatctctgaccagcggtctgacccaatccctgacaccgtcccttacgtcgagctctatgacaagtggactttcttctggcatgacaagtaggctaactccaagcgtgactcccgcctatacaccagggtttccatctggcttggtgcccaatttctcctctggtgtggaaccaaacagtctgcagaccctcaagttgatgcagatccggaagccgctactgaagagctcgcttctggaccagaacctcaccgaggaagagatcaatatgaagttcgtccaggacctactgaattgggtggatgagatgcaggtccagttagaccggactgagtggggctccgatctgccctccgttgaatcccacttagagaatcataaaaatgtgcacagggccatcgaagagtttgaatcatctctgaaagaagccaagatctccgagattcagatgaccgcccctttgaagttaacttatgccgagaagctgcatcggctagagagtcagtacgctaagttgcttaataccagccgcaatcaggaaagacatctggataccctccataactttgtgagtcgtgcaacaaacgagctaatctggttgaacgaaaaagaggaggaggaggtagcatatgactggtcggaacggaatactaacatcgccaggaaaaaggactaccatgccgagttgatgcgggaacttgaccagaaagaagaaaatataaaaagcgtgcaggagatagccgagcagctgttgcttgagaaccatccagcccggcttaccatcgaagcgtatagagcggccatgcaaacgcaatggagctggatcctgcagttgtgccagtgtgtcgaacagcacatcaaggaaaacaccgcatatttcgaattcttcaatgacgctaaagaagccactgattacttgaggaacttgaaggacgccatccagcggaagtactcttgcgatcgatcctcctccattcacaaactggaagacttggtgcaagagagcatggaagagaaggaagagctgcttcagtacaagtccactatcgcaaacttgatgggcaaggccaagacaattatacagctgaaaccccggaactctgactgccccctgaagactagtatccctattaaggcaatatgtgactatcgccagattgaaattacaatttacaaggacgatgagtgtgtactggcaaacaatagtcacagagctaagtggaaggtgatcagccccaccggcaacgaagccatggtccctagcgtgtgttttaccgtgcccccccctaataaggaagcagtcgacttagcaaaccgtatagaacagcagtaccagaacgttctcaccctgtggcacgaaagccacatcaacatgaagagtgtggtttcctggcattatctgatcaacgagattgatcgcatccgcgccagcaacgtggcgtcgatcaaaaccatgttgcccggtgaacatcagcaggtgttatctaacttacagtcaaggtttgaagattttttggaagactcccaagagtcacaggttttctccggttcggacattacgcaactggaaaaggaagtcaacgtgtgcaaacagtactaccaggaattactcaaatctgccgaaagggaggaacaggaggagagcgtttataacctgtacatatctgaggtccggaatatccgccttaggctcgagaattgcgaggataggttgattcgacaaatccggaccccactcgaacgagatgatctgcacgagagtgtgttccgcattaccgaacaggagaagttaaagaaagaactcgagcgactgaaagacgacctgggcacaatcactaacaagtgcgaggagtttttcagccaagccgcagccagttcttctgtgccaacacttaggagcgagttgaacgttgttctgcaaaacatgaatcaggtatatagtatgagcagtacttacatcgataagctgaagaccgtcaatctggttttgaaaaatacccaagccgctgaggcattggtcaagctatacgagacaaagctatgcgaggaggaagcggtcatagctgacaaaaacaacattgaaaatttgatctcaaccctcaaacagtggagatctgaagtagatgaaaaacgtcaggtttttcatgctctagaagatgagcttcagaaagccaaggctatcagcgatgagatgtttaagacatacaaagagcgggacctggactttgactggcacaaagaaaaagcagatcagctcgtagaacgttggcagaacgtccacgttcagatagataaccgtcttcgggatctggaagggatagggaagagcttgaaatactaccgggatacttaccaccccttagacgactggatccagcaggtggaaacaacacagcgcaaaattcaagagaaccagccagaaaactctaagactttagctacccagctgaaccagcaaaagatgttggtgtcagagatcgaaatgaaacaaagcaaaatggacgagtgccagaagtatgcggagcagtactccgcgacagtgaaggactacgagctacaaaccatgacctacagagctatggtcgattcacagcagaaatcacccgtgaaacgccgaagaatgcagtcatccgcagatttgatcatacaagaatttatggatctccggacgagatacaccgctctggtgacactcatgacgcagtatatcaaattcgctggagactctctaaaaaggctggaagaggaggagaaatccctggaggaggagaaaaaagaacatgtcgagaaagctaaagaactccaaaagtgggtttccaacatcagcaagacacttaaggacgccgaaaaagccggtaagcctcccttctccaaacaaaagatttcgagcgaagagatcagtacgaagaaggagcagctttccgaagcgcttcagaccatccaattgttcttagcaaaacatggggataaaatgaccgacgaagaaaggaatgagctggagaaacaggtgaaaaccctccaagaaagttacaaccttctgtttagcgagtcacttaagcaactccaggagagccagacctccggcgatgtaaaggtggaagaaaagctcgataaagtcattgcagggacaatcgaccaaacaaccggtgaagtgttgtccgtcttccaggctgtcctgcgtggcctgatcgattatgacaccggcatcagactgctggaaacccagctgatgatctcaggcctaatttctcctgagcttcggaagtgttttgaccttaaggacgctaagagccatggactaatcgacgagcagatattgtgccagctcaaggagctgtcaaaggctaaagaaattatttcagctgcctcacccacaaccattcccgtcctggacgctttagcacagagcatgattacagaatcaatggcaataaaagtgctcgagattctgttgtccaccgggtctctagtgatcccggctacaggcgaacagctcaccttgcagaaggcttttcagcaaaatctggtaagtagtgcattattttccaaggtgctcgagaggcagaacatgtgcaaagacttaatagacccctgcacttccgagaaggttagcctcatcgatatggtgcaacggagtacactacaagagaatactgggatgtggttgttgccagtgcggcctcaggaggggggtcgcatcaccctgaagtgtggccgcaacattagtatcttacgcgcagctcatgaaggcctgattgaccgcgaaacgatgttccgtctgctctctgcccagctgcttagtggcggactgatcaactctaacagtgggcagcgaatgactgtggaggaggctgttcgcgagggcgttattgatcgcgacaccgcttcctcaattcttacctatcaagtgcagaccggtgggatcattcaaagtaatccagccaaacggctgaccgtagacgaagccgtccagtgcgatttaattacttcctccagtgcactactggtcttggaggcccagcgcgggtacgtcggcttgatctggccgcactctggagagatttttccaacaagctcatctctacagcaggagttaataacaaacgagcttgcatataagattctgaacggaaggcagaagatcgcagccttatatattccagagagcagccaagtgatcggcctcgatgccgccaaacagcttgggatcattgataataacacagcatcaatactgaaaaatattaccctacctgacaagatgcccgatcttggggacctggaagcttgtaagaacgcacggcggtggctcagcttctgcaagttccagccatccactgtacatgattatagacaggaggaagacgtattcgacggagaagaaccagtcacaactcaaacatctgaagagacaaaaaaactcttcttatcataccttatgattaactcttacatggatgctaacacgggtcaacgtctgctcctgtatgacggtgacctggacgaggcggttgggatgttattagaaggatgtcatgcggagtttgacgggaacaccgcaatcaaggagtgtcttgatgtcctttccagctctggggttttcctgaacaatgccagtggcagagaaaaggatgagtgcacagctacaccttcaagcttcaacaagtgtcactgcggagaacctgagcacgaggagacacctgagaacagaaaatgtgctatcgacgaggagttcaacgagatgcgcaatactgtgatcaattccgagttctctcaaagcgggaaactcgcttcaaccattagcattgatcctaaagtcaactccagcccaagtgtgtgtgtgcccagcctgatctcgtacctgacacaaaccgagctagctgacatcagtatgctgcggtccgacagtgaaaatatcctcacaaattacgagaaccagtcccgggtcgaaacaaacgaaagggccaacgagtgttcacactctaaaaatatacagaatttcccttctgatcttattgagaaccccataatgaagtcgaagatgtctaagttctgtggggttaatgagaccgagaatgaggacaacacaaacagagactcacctatcttcgattatagcccccgcctttccgcgctcctcagccatgataagctcatgcatagccagggatccttcaatgatactcatacaccagagtctaatggaaataagtgcgaggcaccagcccttagtttctcagataaaaccatgctaagcgggcaaagaatcggagagaaattccaggatcaattcctgggaatagctgccatcaatatatcccttccgggggagcagtacggacagaaatccttaaatatgatttcctccaatccccaggtgcaatatcacaacgacaaatatatttctaatacctcaggcgaggatgagaaaacacatccggggtttcagcagatgcctgaagataaggaggatgaaagcgagattgaggaatactcatgcgccgtgacgccaggcggtgacaccgacaacgccatcgtgtcactcacctgcgctacacccttgctggacgaaaccatcagcgcctcagactatgagaccagcctcctgaacgaccagcagaataacaccggaacagacactgactccgatgacgatttctatgatacaccgctattcgaagatgacgaccatgattcactgctgctggatggtgatgatagagactgccttcatcctgaggattacgatactttgcaagaggaaaacgatgaaactgcttcgcccgccgacgtgttctatgacgtttctaaggagaatgagaactccatggttccccaaggcgctccagtggggtcgctgtctgtcaaaaacaaagcacactgcctgcaggacttcctaatggatgtggaaaaggacgaactggacagcggggaaaaaatacacctcaatcccgtcggtagtgacaaagtgaatggacagagccttgagacagggtccgaacgcgagtgcacaaatattttggagggagacgagtcggacagtttgactgattacgacatcgtcggaggtaaagagtcatttaccgcttctctcaaatttgatgattccgggtcttggagaggacgcaaagaggaatacgtgaccgggcaggagtttcattccgacaccgatcatctcgattcaatgcagtccgaggagagctacggggactatatctacgactctaatgatcaggacgatgacgacgacgacgggatagatgaggaaggaggcggaatacgagatgagaatggaaaaccaaggtgtcagaatgttgcagaagatatggacatccagctgtgcgcctctattctgaatgaaaactccgatgagaatgagaacataaatactatgattctgctggacaagatgcattcctgctccagcttagagaagcagcaacgggtgaacgtggtacagttggctagcccctccgagaacaatttagtcacagagaaatctaacttacccgagtacacaaccgaaatcgccgggaaatccaaggaaaacctgctgaaccacgagatggtcctgaaggatgttctccctcccatcataaaggataccgagtcagagaagacttttggacccgcaagtatttctcacgacaataacaatattagttctacctcggagttagggaccgatttagcgaatactaaagtcaaactcattcagggatctgaactaccggaactgaccgattctgttaaaggcaaggacgagtactttaagaatatgactccaaaagttgacagctcgctggatcatatcatttgtacagaacctgatttaatcggtaagccagctgaggaatcccacttgtcgctgatagcatctgtcacagataaggaccctcagggcaatgggagcgacctgattaagggtcgcgacgggaagtccgacatccttatcgaggatgagacttccattcagaagatgtacctcggcgaaggcgaggttctggttgaaggtttagtggaggaggagaatcgtcatcttaaactacttcctggcaagaacacacgggacagttttaagctgattaattctcagtttccctttccacagatcaccaataacgaggagttgaaccagaaaggctccctcaaaaaggccaccgtcaccctgaaggacgagcctaacaatctacagattatcgtatccaaaagccccgtgcagttcgagaacttggaggagatattcgatacctctgtgtcaaaggaaataagtgacgatatcacctctgacattacttcgtgggagggaaacactcattttgaagagtcttttactgatggacccgaaaaagagctagatttgtttacttacctgaagcactgtgccaaaaacattaaggccaaggacgtcgcaaaacctaacgaggatgtgcctagtcatgtgctcattaccgcaccacctatgaaagagcacctgcagcttggcgtaaacaataccaaggagaagtctacctccactcagaaggacagtccactgaacgatatgatacagagcaacgacctgtgttccaaggagtccatctccggcggcggcacggagatttcccaattcacacctgaaagcatcgaggctactttgtccatcctcagccgaaaacacgtggaagacgtggggaaaaatgacttcctccagtctgagagatgcgccaatggtctggggaatgacaactcaagtaacactctcaacacagactactcatttcttgaaataaacaataaaaaagagcgcattgaacagcagttacctaaggagcaagctctgtctcctcgttcacaggagaaggaggttcagatcccagagcttagccaggtttttgtggaagatgttaaagatattctgaaaagtcgacttaaggagggacacatgaacccccaagaagtggaagagccctctgcctgtgctgataccaagattctgatccagaatctgatcaagagaattacaacctcgcagctggtaaatgaagccagtactgtcccgagtgactcacaaatgtcggactcatcaggcgtctcaccgatgactaatagtagtgagctgaagcctgaatcaagggacgatcctttttgtataggaaatctcaaatctgaactgctcttgaacatcctgaaacaagaccaacattcgcaaaagatcacgggggtgtttgagctgatgagagagttgacacacatggaatacgacctggagaaaagaggaatcacatctaaggtgctgccactacaattggagaacatcttctacaaactcctggctgatggatactccgagaaaatcgagcatgtgggggactttaatcaaaaggcatgcagcaccagtgagatgatggaagaaaagccccatatcctcggagatatcaaaagtaaggagggcaactattatagccctaatctcgagacggtgaaagaaattgggctggagagcagcactgtttgggctagcacactcccaagagatgagaagctgaaggatctgtgcaacgacttccctagccacctcgagtgtacatctggcagtaaagagatggcctccggagatagcagcacagaacagttttcatccgagctgcagcagtgtctgcaacatacagagaaaatgcacgaataccttaccctcctgcaggacatgaaaccacccctggacaatcaggaatccctagacaataatctggaagccctgaaaaaccagcttagacagctggaaacctttgaactggggctggcacctatcgcagtgattctgagaaaggatatgaagctggctgaggagttcctgaagagtcttcccagtgattttcccaggggacatgtggaagagctgagtatcagccaccagtccctcaaaactgccttcagctccctgagtaacgtgagctctgagagaaccaagcagataatgttggccatagattccgaaatgtcaaagcttgcagtgtcccatgaagaattcctgcataagttgaaatctttttccgattgggtgtccgagaaatcaaaatcggttaaggacatcgaaatcgtgaacgtgcaggactcagaatacgtcaagaagaggctggaattcctgaaagccaacaacgttctcaaagacttaggtcacaccaaaatgcagctggaaacaaccgccttcgacgttcaattctttattagtgaatatgcgcaggacctctcgccgaatcagtctaagcagctgttgaggctcctgaatacaacacagaagtgtttcctcgatgtccaggagtccgttaccacacaagtcgaaagactggagactcaattacacttagaacaggatctcgacgaccagaagattgtcgccgagcgccagcaagaatacaaggagaagctgcaggggatttgcgacctgctgactcaaaccgagaatcggctgatcggtcaccaagaggcattcatgattggcgatggtaccgtcgaactcaaaaaataccagagcaaacaagaggagctacagaaagatatgcaaggctctgcccaagccctcgccgaggtggtgaagaatacagaaaacttcctgaaagaaaatggagaaaaattgtctcaggaggacaaggcgctgatcgaacagaaactgaacgaggcaaagattaagtgtgagcagctcaacttgaaagccgagcaatccaaaaaggaactggacaaggtagttaccaccgctattaaagaggagactgagaaagtggcggcagtgaagcagttggaggaatctaagacaaaaatcgagaatctgctggattggttatcaaatgtagacaaagactcagaacgggcaggaacaaagcacaagcaggtgattgagcagaatggaacgcattttcaggaaggcgacggtaagtccgcaattggggaggaggatgaggttaacggaaatctattagagaccgatgtagatggacaggtgggtactacccaggagaatttaaatcagcagtatcagaaggtgaaggcccagcacgagaaaatcatttcccaacatcaagccgtgataatagctacccagtccgctcaagttctcctggagaaacagggacagtatttgtccccagaagagaaggagaaactgcagaaaaacatgaaggaattaaaagtgcactacgaaactgccctggccgaaagcgagaagaagatgaagctgacgcacagcctgcaggaggagttagagaagtttgacgccgactatacagaattcgagcattggctgcagcagtcagaacaagagctggagaacctggaggcaggggcagatgatattaacgggctgatgacaaagttaaagcgccagaaatcattctctgaggatgtgatcagtcacaaaggcgatctgaggtatattacaatcagcggcaaccgcgtgctcgaggcagctaagagctgtagcaagcgcgatgggggaaaagtcgacaccagcgcgactcacagagaggttcagcgcaagttggaccatgcaacggatcgttttcgctcactgtattcgaagtgcaatgtgctcgggaacaacttaaaagacctggtggacaagtatcagcactatgaggacgcgagctgcggcctcctggctggactgcaagcttgcgaagctacagcctccaaacacttatcagagccaatagccgtggatccaaagaacctgcagaggcagctcgaagagaccaaagctttgcaggggcaaatttcaagtcaacaggtagctgtggagaagctcaagaagacagctgaagtgctgctcgacgcaagagggagcctgctgcctgcgaagaacgatattcagaagaccttggacgatatcgtcgggcggtatgaggacctgagcaaaagcgtcaatgaaagaaacgaaaagcttcagatcactcttactagatcactgtctgtccaggatggactggacgaaatgctggactggatggggaacgtcgaaagttcgctaaaagagcaaggacaggtaccactgaacagcacggctctgcaggacatcatatctaaaaatataatgttggagcaggacatagcgggccgccaatcaagtataaatgcgatgaatgagaaggttaaaaagtttatggaaacaacagatccgtctaccgcctctagtttgcaggcgaagatgaaggacctgtctgcccgcttctccgaggcttcccacaaacacaaagaaactctcgcaaaaatggaagaattaaagacgaaagtcgagctgttcgagaatctgtccgagaagctccagacgtttctggagaccaaaacacaagcactgactgaggtcgacgtccctggaaaagacgtcacagaactgtctcaatatatgcaggaaagtacttcagaattcttagaacacaaaaagcacttggaggtgctccactctctgctcaaagagatcagcagccatggattgccgagcgataaagccctggtgttggaaaagacgaataacctgtccaagaagtttaaggagatggaggatacaatcaaggagaaaaaggaagccgtcacaagctgccaagagcagttggacgctttccaggtcttggtgaagtcgctcaagtcctggatcaaggagactacaaagaaagtacccatcgtacagccctctttcggggcagaagatctgggaaagtcattggaagacaccaaaaagttgcaggagaagtggagtcttaaaactcccgagattcagaaggtcaacaactctggaatatcactgtgcaacctcatcagtgccgtaacaacacccgccaaggccattgccgcggtcaagagtggcggggcggttctgaacggtgaaggcactgccacgaatactgaagaattttgggctaataaagggctgacgagtattaagaaggatatgaccgacatctcacacgggtatgaagaccttggtctgctgttaaaggacaagattgcagaactgaacacaaagttgtctaagttgcagaaagcccaagaggagtccagcgctatgatgcagtggctgcaaaaaatgaacaagaccgccactaaatggcagcaaacccccgcccctacagacacggaggctgtgaagactcaggttgagcaaaataagtcctttgaagcagaattgaaacagaacgttaataaggtgcaggaactgaaagataaactgaccgaactcttggaagaaaacccagacactccagaggctccccggtggaagcagatgctcacagagatcgactctaagtggcaggaactgaatcagctgactatagaccgccagcagaagttggaagaaagttccaataatctgactcagttccagactgtggaggcccagcttaagcagtggctggtggaaaaagaacttatggtaagtgtcttggggccactttctattgaccctaacatgctaaatacacagcgccagcaagttcagatcctgctgcaagaatttgccacacgaaaacctcagtacgagcagctaacagccgcaggtcagggaattctgtccaggcccggggaggacccttccctgcggggcattgtaaaagagcagttagccgcagtaacacaaaagtgggactcacttacaggtcagttatccgatcggtgtgactggatcgaccaagccatcgtgaagtctacccagtaccagagccttctgcggagtctgtcagacaagctaagcgatctggataacaaattaagttccagcttggcagtttctacccaccccgatgccatgaatcagcaactcgagaccgcgcagaagatgaaacaagagattcagcaagagaaaaaacagatcaaagttgcacaagccctctgtgaggacctgagtgccctcgttaaagaggaataccttaaggccgagctctcccgacagctggaaggaatcctgaagtcattcaaggatgtggaacagaaggccgaaaatcatgtgcagcatctccagagcgcttgcgctagctcacatcagttccagcagatgtcgagagatttccaggcctggctggatacaaagaaggaagaacagaacaaatctcaccccattagtgcgaagctggatgtcctggagagccttatcaaggaccacaaagacttcagtaaaacactaaccgctcagtctcacatgtacgagaagacaatcgccgaaggcgaaaatctgctgcttaagacccaaggcagcgaaaaggccgctttgcagttgcagctgaatacaattaagaccaattgggacactttcaataagcaggtgaaggagagggagaacaaactcaaggagagtctggaaaaggctctgaagtacaaggaacaggtcgagactctgtggccctggatcgataaatgtcagaacaaccttgaggagattaaattttgcctggaccctgcggagggtgaaaacagtatagccaagcttaagtctttacagaaggaaatggaccagcatttcggcatggtcgagctcctgaataacacagccaacagtctactgagcgtgtgtgaaattgacaaggaggtggtgactgatgaaaataagtcacttattcaaaaagtcgacatggtgactgaacaacttcacagcaagaagttttgtttagagaacatgactcaaaagtttaaggagttccaggaggtgagcaaagaatctaagcgacagcttcaatgtgctaaagaacaattagacatccacgattctctcggaagccaggcctactcgaacaagtatctgacaatgcttcaaactcaacaaaagtcactgcaggctttaaaacaccaggtcgatctcgcaaaacgcctggctcaggacctggtggtggaggccagcgactccaagggcactagcgatgtgttgttgcaggtcgaaacaatcgcccaggagcattcgaccctcagccagcaggttgacgagaaatgttcctttttggaaactaaactgcagggcatcgggcactttcagaacaccatacgggaaatgtttagccagtttgccgagttcgatgacgaactggacagtatggcgcctgtcggacgagacgctgaaacacttcagaaacaaaaagagacaatcaaagcctttctcaaaaaacttgaagcgctgatggccagcaacgacaatgccaataagacatgcaaaatgatgctggctactgaagagacttcacccgatctcgttggcatcaagcgtgacctggaggcattgtccaagcagtgtaacaaactattagaccgggcacaggcccgggaagagcaagtggaggggaccatcaagaggctggaggaattttacagtaaactaaaggagtttagtattcttctgcagaaggctgaagagcacgaagaaagccagggccccgtgggtatggagaccgaaacgatcaaccagcaactgaacatgtttaaggttttccagaaggaagagatcgagcctttgcaggggaagcagcaggacgtgaattggctgggccaggggcttatccagagtgccgcaaaatcaacgtctacacaggggctggagcacgacctggatgatgtaaacgcgcgctggaagactctgaataagaaggtggctcagagggctgcacagctgcaggaagcactgctccactgcgggaggtttcaggatgccctcgaaagcttgctctcatggatggtggataccgaagaactagtagccaatcagaagccaccttctgcagaatttaaggttgtgaaagctcagattcaggagcagaaactcctccaaaggctgctcgatgaccgaaaaagtaccgtggaagtgataaaacgggaaggcgaaaaaattgcaaccactgccgagcctgcagacaaagtgaaaatcctcaagcagcttagtctgctggactctcgctgggaagcgctgcttaacaaggctgagactcggaatcgtcagcttgagggaatctctgttgtggctcagcagtttcatgagactttggaacccctaaacgaatggctaacaaccatcgaaaagaggttagtgaactgcgagcccattgggacacaagcaagtaagctcgaggagcagatcgcacagcacaaggcactcgaggacgacatcatcaaccacaataagcacctgcaccaggcagtgagcataggtcaatccctaaaagtactgagctcccgtgaagataaggacatggtgcaaagtaaactcgatttctcccaggtttggtacatagagattcaggagaaatcccacagtcggtcagaattactgcagcaggccctgtgtaatgcaaaaatcttcggcgaagacgaggttgagctcatgaactggctgaatgaggtgcatgataaactttcaaagctatcagttcaggattactcaacagaggggctctggaagcagcagtcagagctccgcgttctgcaggaagatattctcctgcgcaaacaaaatgtcgaccaggccctgttgaatgggttggagctccttaagcagacgaccggcgacgaggtcctgattatccaggacaagctggaagcaatcaaggctaggtacaaggacattaccaagttaagcaccgacgtagccaagaccctggagcaagctctgcagttggcacgaaggttgcatagcacgcacgaagagctgtgtacctggctcgataaagtggaggtcgagctgctgtcgtatgagacccaggtactcaagggtgaggaggcatcacaggctcagatgagaccaaaggagctcaagaaggaagcaaagaataacaaggccctactggactccctgaatgaagtgtccagcgcactgctggaactggttccttggcgggcgcgggagggattagaaaagatggtcgcagaagataatgagaggtaccggctcgtgagcgatacaatcactcagaaagttgaggaaattgatgcagcaatcttacggagccaacagttcgatcaagctgctgacgctgagctcagttggataaccgagacagaaaaaaaactcatgtcgcttggcgacattcgccttgagcaagatcagacatcagcgcagctgcaggtgcagaaaacgttcactatggagatcctgagacataaagacatcatcgatgacctcgtgaagtccggacacaagatcatgaccgcgtgtagcgaggaagaaaagcagagcatgaaaaaaaagctggataaggtattaaagaattatgacacaatatgccagatcaactccgagagatacctccaactggagcgcgcccagtccctggtaaaccagttctgggagacatacgaagagctgtggccctggctcaccgaaacgcagagcattatatctcagctgccagcccccgcactcgaatatgagactctgagacagcaacaggaggagcaccgccaacttcgggagctgatcgcggagcataaaccgcacattgacaaaatgaataaaaccggacctcaattgctggagctgagcccgggagagggattctcgatacaagagaagtacgtcgctgcagatacactttacagccagataaaggaggacgtgaaaaaaagggcggttgcactggacgaggcgatcagccagagtacacagttccatgataagattgaccagatactcgaaagtctggagcgtattgtcgaacggctgagacagcccccctcaattagtgcagaagtcgaaaaaattaaggaacagatttctgagaacaaaaatgtttcggtggacatggaaaaattgcaaccgctttacgaaacactgaaacaacggggagaagaaatgatagcccgtagcggcggcaccgataaagacatctctgccaaagccgtccaggacaagctcgaccagatggtgttcatttgggaaaatatccacacattagtagaagagagagaggctaaactattagacgtgatggagcttgctgagaaattttggtgtgatcacatgagtttaattgtgacaattaaagacacgcaggacttcatccgagatctcgaggacccaggaattgacccctcagtggttaaacaacaacaggaggctgcagagaccatccgggaagagatcgacgggcttcaggaggaacttgacatagtcatcaatcttggctccgaactcatcgccgcctgcggagagccagacaaacccatcgttaagaaatccatcgacgaactcaattctgcttgggactctttaaacaaggcttggaaggatagaattgacaaactggaggaggcgatgcaggcagcagttcagtatcaggatgggttacaggccgtgtttgattgggtcgatatcgcaggaggaaagttagctagcatgagccccataggtacagatcttgagactgtcaagcagcagatagaagagcttaaacagtttaaaagcgaggcataccaacagcagatcgagatggaaagattgaaccaccaggctgaactgctgctcaagaaagttacagaagaaagcgacaagcacaccgtccaggatcctctgatggagctcaaattgatatgggacagcctcgaggaaaggattataaatcgacagcataaactggaaggggcgctgctggccctggggcagttccagcacgctctggatgagttactggcatggctaactcacacagaaggactgctcagcgagcagaagccggtcggcggagaccccaaagctattgaaattgagctggccaaacaccatgttctgcagaacgacgtgctcgcacaccaaagtactgtggaagctgtgaacaaagccggaaacgacctcatcgagtcctcggccggcgaagaagccagtaatctgcagaacaaactcgaggttcttaaccagaggtggcagaatgttctagaaaagacagagcagcgcaagcagcagctggacggtgcgctacggcaggccaaagggtttcacggagagatcgaggatctgcagcagtggctcaccgatacagaacgtcacctgctcgcctctaaaccacttggaggactgcctgaaacagccaaggagcagctgaacgtacacatggaggtctgcgcagcctttgaagccaaggaggagacctacaagtctctcatgcagaagggtcagcaaatgcttgcacgctgccctaaatctgcagaaaccaatatagaccaggatataaataacctaaaggagaagtgggaatctgtggaaacaaagctgaacgagaggaaaactaaactggaagaggccctgaacctggccatggagtttcacaactctcttcaggacttcatcaactggttaactcaggctgagcaaacacttaacgtcgcgtcacggccctcattgatactggatactgtactgtttcagattgatgaacataaggttttcgcaaacgaagttaactcccacagggaacagattattgagctagacaagacagggacccatttgaaatacttttcccaaaagcaagacgttgttttaatcaaaaatttgctcattagtgtgcaaagtcggtgggagaaggtagtgcagaggctggtggagcggggacggtccttagacgacgccaggaagcgggcaaagcagttccacgaggcatggtcaaaactgatggagtggctggaagaaagcgagaagagcctggactctgagcttgagatcgccaatgatccagacaagataaagacgcagctggcccagcataaggaattccagaaaagcctcggggccaagcactccgtgtacgacactactaaccgcacggggcgatccctgaaagaaaagacatcccttgccgatgataacctgaagctggatgacatgttatccgaacttcgggataagtgggatacaatttgcggcaaatcagtggaaagacagaacaagttggaagaggcgctgctattcagtgggcagtttacagatgcgctgcaagcactcatcgattggttgtaccgtgtggaaccacagctcgccgaggatcaaccagttcacggggatattgacctggtcatgaacctcatcgataatcataaagccttccaaaaagaattgggcaaaagaacctctagtgtacaggcccttaagcggtccgccagagagctcattgagggaagccgggatgactcatcttgggttaaggtccaaatgcaggagctcagcacccgctgggagaccgtgtgcgctctgagtatatccaagcagacccgactcgaggccgccctccggcaggccgaggagttccattccgtggttcacgccctcctcgagtggctggccgaggctgagcagacgctaaggttccatggcgtcctgcccgacgatgaagacgcgctcaggaccctgatcgaccagcacaaggagttcatgaaaaaacttgaagagaagcgcgccgagcttaacaaggccaccacgatgggagacactgtcctcgccatttgccatccagatagtatcacgaccattaaacattggattaccattatcagagcgcggtttgaagaggttctagcatgggccaagcagcaccagcagcgactcgcgagtgcccttgctggtctcattgctaagcaggaactcctagaggctctactggcctggctccagtgggctgagacaactctcaccgacaaagacaaagaggtgattccacaggaaatcgaagaggtgaaggccctgattgccgaacaccagacctttatggaggagatgacccgcaagcaacccgatgtcgataaagtgactaagacctacaaacggcgggccgccgacccttcttccctgcaaagccacattcctgtcctcgataaaggccgtgcaggacgaaaaaggttccccgcttcctcactttatccctctggtagtcagacccagattgaaacaaaaaaccctcgagtcaatttgcttgtctcaaaatggcagcaggtgtggcttctggcattagagcggaggaggaagcttaatgacgctttggatcgcttggaggaattaagggagttcgcaaactttgattttgacatttggaggaagaagtacatgagatggatgaaccacaaaaaaagccgcgtgatggacttcttccgtaggattgacaaggatcaggatggaaaaattacaagacaagagttcattgatggtattttgtcctctaaattccctacgagtcgtctcgagatgagtgctgtggcagacatcttcgaccgggacggtgatggctatattgactactatgagtttgtggccgccttgcacccaaacaaagatgcatataagccaatcacagatgctgataaaatcgaggatgaagttacccggcaggtcgccaagtgcaagtgtgctaaacggtttcaagtggagcaaataggcgataataagtaccgcgtttcatttcagtccaatttcggtgattcccagcagttgaggcttgtgcgcatcctgcgctccacagttatggtccgcgtgggcggtgggtggatggccctggatgaatttctggttaagaacgacccttgccgcgtgcatcaccacgggtcgaagatgcttaggtctgaatcaaacagcagcataactacgacgcaacccactattgccaaaggaaggactaacatggagctgcgcgaaaagttcatcctcgccgacggcgctagccaaggaatggccgcatttagaccccgcggtagacggtcgagaccctcaagcaggggggcgtcgcccaatagaagcacaagcgtgagctcccaggccgcacaggctgccagcccacaggtgccggcgacaacaacacccaagggcactccgatccagggctctaagctgaggctgcccggttacctaagcggcaaaggattccacagcggggaggacagtggccttataacaacagcggcggctcgggtcaggactcagtttgcagacagtaaaaagactcctagtcggcctgggtcaagagccgggagtaaagcaggcagcagggcctccagccggagagggagcgacgcttcggactttgatatttccgagatccagtccgtgtgctccgatgtggagaccgttccccagacgcatcgtcccacaccacgggcaggcagccggccttccacagccaaaccatccaagattccaacacctcagaggaagagtcccgcctctaaactagacaagagcagtaaacggtag

SEQ ID NO: 186118 - DNA, 768 bp, synthetic construct
  misc_feature 1..768: note = Description of Artificial Sequence: Synthetic coding sequence
  source 1..768: mol_type = other DNA
atgaacaagaccggcccccagctgctggagctgagccccggcgagggattctccatccaggagaagtacgtggccgccgacactctgtacagtcagattaaggaggacgtgaagaaacgtgcagtggccttggatgaagctatttcacagtccacccagttccacgataaaattgaccagattcttgaaagtctggagcggattgtggagcggcttaggcagcctccatcgatatctgccgaagttgagaaaatcaaagagcagatatccgaaaataagaacgtatcggtggatatggagaaactgcaaccattatacgagaccctgaagcaacggggtgaggagatgattgcccggagcgggggaacggacaaggatataagtgctaaggctgtccaggataaactagaccaaatggtgttcatttgggagaacatccatacgctggttgaagaacgcgaggcaaaattgctggacgtgatggagctagcagaaaagttctggtgcgaccatatgtcccttatagtgaccataaaagatactcaggatttcattcgcgatttggaagatccaggcatcgatcctagcgtggtcaagcagcagcaggaagcagcggaaactattcgagaggagatcgatggattacaggaagaactcgatatcgtcattaatctgggatctgaacttattgctgcctgtggagagcccgacaaaccgatcgttaaaaagtctattgacgagttgaacagcatgggcttcagtaaatag

SEQ ID NO: 186119 - DNA, 1359 bp, synthetic construct
  misc_feature 1..1359: note = Description of Artificial Sequence: Synthetic coding sequence
  source 1..1359: mol_type = other DNA
atgttccccgaccagcccgagaagcccctgaacctggcccacatcgtgcctccacgtccggtgaccagcatgaatgataccctcttcagccattctgttcctagcagtggaagcccgttcatcacgcgacgacttcccgagggtattagcgcctcttcccccgttgcagaggagcactcattaattaaactgtacgtgaatcagttagatcacggtgctcgatctcccccaaaggactctgaggtcgaacagaacaagctcctcgctcgcgctgcgcccgcattccttaaaggaaaaggcatccagtattcattgaacgtggccgatcggctggccgatgagcacgtgctcattggtctctatgtgaatatgctgcgaaataatccctcttgcatgctcgaatcctcaaaccgccttgacgaagagcaccggcttattgcacggtacgccgctcgcctggcagcggagagttcctcatctcagcctccacagcagcggagcgccccagacatctctttcaccatcgacgctaataagcagcagcgtcaattaattgccgagctcgaaaacaaaaatagggaaatcctgcaggagatccagaggctccgcctggagcacgagcaggcctctcagccgacccctgagaaggcccagcagaatcctactcttctcgccgagctccgtttactccgccagcgtaaagacgaacttgagcagaggatgagcgccctccaggagtcccggcgcgagctcatggtgcagctggaaggattgatgaaacttttaaaaacccagggcgcgggaagcccacgctcgtccccctcccatacaatcagcagaccaatccccatgccaattcggagtgcatctgcctgttccacccctacccacaccccacaggactccctcaccggggtcggcggggatgtccaagaagccttcgcgcaatcaagccgcaggaacctgagaaacgacctgctagtcgccgccgattccattacaaacacgatgagctccttggtgaaagaactgaattcagaggtggggtcagaaactgagtccaacgttgactctgagtttgctcgtacccagttcgaggacctggtgccaagtccaacgagcgagaaggctttcctggcgcagattcacgcccggaaaccaggctatattcactccggcgctaccacatcgaccatgcggggagatatggtcacggaggacgcagatccatatgtacagcctgaggacgagaactacgaaaatgactctgtgaggcagctggagaatgagctccagatggaagaatatcttaaacagaaactccaggatgaagcctatcaggtcagtctgcagggatag

SEQ ID NO: 186120 - DNA, 1116 bp, synthetic construct
  misc_feature 1..1116: note = Description of Artificial Sequence: Synthetic coding sequence
  source 1..1116: mol_type = other DNA
atgatcgaggacagcggcaagcggggcaacaccatggccgagcggcgacagctgttcgccgaaatgcgcgcgcaggaccttgatcggattcgattgagcacatatagaacggcatgtaagttacggtttgtacagaagaagtgcaatctccacttagtcgatatctggaatgtgatagaggccttacgcgagaatgcgctgaataatctagatcctaacaccgagctgaacgtgtcaaggctggaggccgtgctgtctactattttctatcaactgaataagcgcatgcccactactcatcagatacacgtcgaacagagcatctcgctgctcttgaactttttattggccgcctttgaccctgaggggcacggaaagattagtgtctttgccgtgaagatggcactggccaccctatgcggaggaaaaatcatggataaactgcggtatattttttccatgattagtgactctagcggcgtgatggtgtacggccgttacgatcagttcctgagggaggtcctcaagctgcctacggccgtattcgagggaccctccttcgggtacactgagcagtctgccagatcttgtttctctcagcagaagaaggtgactctcaatggattcctggatactttgatgtccgacccccctccccagtgtctggtgtggcttcctctcttgcaccgcctagcaaacgtggaaaatgtcttccaccctgtggagtgctcatactgtcacagcgagtcgatgatgggctttagatatcgatgtcagcagtgccacaactatcagctctgtcaggattgcttctggcgcggacatgccggtggctcccatagcaaccaacaccagatgaaagagtatacctcttggaagtcccctgcaaagaagctcaccaatgctctctccaagtccctatcttgtgcttcctctagggagcctctgcatcccatgtttccagaccagcccgagaagccattgaatttggcacatatcgtgccacccaggcctgttacgagcatgaatgacacccttttctctcatagtgttccatctagcggttcaccattcatcacccgaagctccgatggcgcatttggagggtgcgtctag

SEQ ID NO: 186121 - DNA, 1188 bp, synthetic construct
  misc_feature 1..1188: note = Description of Artificial Sequence: Synthetic coding sequence
  source 1..1188: mol_type = other DNA
atgttccccgaccagcccgagaagcccctgaacctggcccacatcgtacccccccggccagtgactagcatgaacgacaccctcttcagccactctgtgcccagtagcggctcaccttttattaccaggagactgcctgaaggaatctctgcttctagcccagtagctgaagagcactctctcattaagttgtatgtcaatcagttagatcatggagctagaatgcttgaatcttccaacaggcttgatgaggaacaccgcctcattgcgcgctacgctgcaagacttgccgccgaaagcagctccagccaaccgccgcaacagcgctcggcacccgacatctcattcactatcgacgctaataaacaacaacgacagcttatcgcggagctggagaataagaaccgggagatcctccaggaaatacagcgcctccggttagaacacgagcaggcctcgcaacctactccagaaaaggcgcagcagaacccaacactcctagcagagctgcgacttctgcggcaaagaaaagacgaattggagcagcgaatgtccgctctccaggaatcgcgcagagagctgatggttcagttggaggggcttatgaaactgctgaagacccaaggcgccggttcaccacgatcttcccctagtcacaccatctctcgccccatcccaatgccgatcaggtccgcttcagcctgctccacccctacccacacaccacaggatagcctgacaggcgtgggcggtgatgtgcaggaggcttttgctcagagtagtaggagaaacttaaggaatgacttgctggtggctgccgattctatcacgaacactatgtctagtctcgtgaaggaactaaacagcgaggttggaagcgaaacagaatccaatgtagactcagagttcgccagaacacaatttgaggacctggtcccaagccccacctccgagaaagcctttctcgcccagatccacgcccgaaagccaggatacattcatagcggcgcgactacttctaccatgcggggggatatggtgaccgaggatgccgatccctatgtccagcccgaggacgagaattatgagaacgactccgtgcggcagctcgagaacgaactgcaaatggaggagtatctgaagcaaaagctgcaggacgaggcttatcaggtgtcactccagggctag

SEQ ID NO: 186122 - DNA, 2175 bp, synthetic construct
  misc_feature 1..2175: note = Description of Artificial Sequence: Synthetic coding sequence
  source 1..2175: mol_type = other DNA
atgatcgaggacagcggcaagcggggcaacaccatggccgagcggagacagctcttcgcagaaatgcgggctcaggatcttgaccgcataagactctccacatacaggactgcatgtaaactacgattcgtgcaaaaaaagtgtaatctgcacctcgtggacatatggaacgtaatcgaggccctgcgggaaaatgctctgaacaatctcgatccaaataccgagctgaacgtttcaaggctcgaagccgtcttgtcaaccatattttatcaactgaacaaacggatgcctacaacccaccaaatccacgtggagcagagtatttcactgctgctgaactttctcctggccgctttcgacccagagggacacggaaagatctctgtcttcgccgtcaagatggccctcgcaactttgtgcggaggcaagatcatggacaagctacgctatatcttttccatgatttctgattcctccggcgtcatggtgtatgggcgatatgaccagtttctgagagaggtgttaaaactgccgaccgctgtgttcgagggcccaagcttcggctatacagagcaaagcgccagaagttgctttagccagcaaaagaaggtgaccctgaacggatttctggacacactcatgagtgaccctccaccccagtgcttagtttggctgccccttctccaccgtctcgccaacgtggagaatgtttttcatccagtcgagtgtagttattgccactctgaaagcatgatgggcttcagatatagatgccagcagtgccataactatcagctgtgtcaagactgtttttggaggggtcacgcgggtgggtctcactccaatcagcatcagatgaaggaatatacgtcctggaaatcacccgccaagaagctgacgaatgccctgtcaaagtccctgtcctgcgccagcagcagggaacccttgcatcctatgttccctgatcaacccgagaagccactgaaccttgcccatatagtgcctccccgccctgtgacaagtatgaatgatacgttgttttctcacagcgtcccatcgtcagggtcgccttttataacaagatccatgctggagagcagcaatcgcctggatgaggagcaccgactgattgcacggtacgctgccaggctagcagcagagtcatcttcttcacagcctccccagcaaagatcagcccctgacatcagtttcaccattgacgcgaacaaacagcagaggcagttgattgctgagctggagaataaaaacagagaaatcctccaggaaatccaaagacttcgcctggagcatgagcaggctagtcaacctacaccggagaaagctcaacagaacccaacattattagccgagctccgcctcttgagacagcgaaaggacgaacttgagcagagaatgtcagctctgcaggaatcgagacgggaactgatggtgcagttagaaggtttaatgaaattgctcaagacccaaggcgctggatcccccagatccagcccatctcatacaatctccagaccaattcctatgcctatccgaagtgccagcgcatgcagcacacctacccacaccccccaggattctctaacaggcgttggaggcgacgtgcaggaggcctttgctcaatctagtcgcaggaacttacggaacgacctcttggtggccgcagatagcattacaaataccatgagctctctcgtaaaggagctgaactcggaggtgggaagtgagacggaaagcaacgtcgactccgagttcgcccgcactcagtttgaagatctagttccctcacctacgagtgaaaaagcctttttagcacagattcacgcccgtaagcccggatatatacactctggcgccaccacttctaccatgcggggagatatggttactgaggatgccgacccctatgttcagccagaagatgagaactatgaaaatgattcagtgagacagctcgagaacgaattacagatggaggagtatttaaaacagaagctccaggacgaggcctatcagctgcatgtaagtaccgagacaaggctcgagcacccttgccccgtgtctgagaccaagtggagagtactgttctggggatttgtgttcttcgggggctttctatctcttgcacttcagatctacttttggggactcttctag

SEQ ID NO: 186123 - DNA, 912 bp, synthetic construct
  misc_feature 1..912: note = Description of Artificial Sequence: Synthetic coding sequence
  source 1..912: mol_type = other DNA
atgctggagaccctgcgggagcggctgctgagcgtgcagcaggacttcacaagcggtttgaagacccttagcgataaatctcgcgaggctaaggttaagtcaaagccccgcacagtgcccttcctccctaagtactcagctggcctggaacttctgtcccggtacgaagatacttgggctgccctccaccggcgcgctaaagactgtgcatccgccggcgaactcgttgattctgaagtcgtgatgctcagtgctcactgggaaaaaaaaaaaacctcgctagtggaactgcaggaacaacttcagcaactgccggctctgatcgcagatctggaatccatgactgccaacctgacccacctggaagcgagtttcgaggaggtcgagaataatctgctgcatttggaggacctatgtggccaatgtgaactggagcggtgcaaacatatgcagagccagcagctggagaactacaagaagaataagcgcaaagaattggaaaccttcaaggcagagttggatgccgaacatgcccagaaggtcctggagatggagcacacgcagcagatgaagcttaaggagcgtcagaagtttttcgaggaagccttccagcaggacatggagcagtacctgtcaaccggctatctccaaatcgcggagcgccgggagcctatcggctcaatgtcatcaatggaggtgaatgtcgatatgctcgaacagatggatctgatggacatctccgaccaggaggccctggacgtctttctcaatagtggcggagaagagaatactgtcctcagcccagctctggggcgggtagataagctggcattggcagagcctgggcaatacagatgccattccccacccaaggtcaggagggaaaaccatctgcccgtaacatatgcatag

SEQ ID NO: 186124 - DNA, 1056 bp, synthetic construct
  misc_feature 1..1056: note = Description of Artificial Sequence: Synthetic coding sequence
  source 1..1056: mol_type = other DNA
atgctggagaccctgcgggagcggctgctgagcgtgcagcaggactttacctccggactcaaaacacttagtgataagtccagagaggctaaggtaaaatcaaagccccgcacagtgcctttcttaccaaagtattctgccggcctggagctcctgtcgaggtacgaagatacctgggctgccctgcaccgccgtgctaaagattgcgcatcagcaggggaactagtggacagcgaagttgtgatgttaagcgcccactgggaaaaaaagaagacgagcctggtcgagcttcaggaacagctccagcagttacctgccctcatcgcagatctcgagtctatgacagcaaatcttacccacttggaagcttccttcgaggaggtggagaacaatttattgcatctcgaggacctatgtgggcagtgcgagcttgaacggtgcaagcacatgcagtcgcagcagctcgagaactacaagaaaaacaagaggaaagagttagagacctttaaagcagagctggacgctgagcacgctcagaaggtactggagatggagcatacacagcagatgaagctgaaggaacggcagaaattctttgaggaggccttccaacaggatatggagcagtaccttagtacaggttacctgcagattgccgaacgtagagagcctatcggcagcatgtcaagcatggaggtcaatgtggacatgctggaacaaatggatctcatggacatcagcgaccaggaagctttggacgtgtttctcaatagtggaggggaggaaaataccgtgctgagtcccgccctaggacccgaatcctccacctgccagaatgagattaccctacaggttcccaatcccagcgaactgagggccaaaccaccatcatcctcgagcacgtgtactgactccgctactcgcgatatttcagagggaggcgagtcccctgtagtgcaatctgatgaagaggaagtccaggttgacacagccctggcaacgtcacacacagaccgcgaggccacccctgatggcggagaagactccgactcctag

SEQ ID NO: 186125 - DNA, 1059 bp, synthetic construct
  misc_feature 1..1059: note = Description of Artificial Sequence: Synthetic coding sequence
  source 1..1059: mol_type = other DNA
atgctggagaccctgcgggagcggctgctgagcgtgcagcaggacttcaccagcggcctgaaaaccctctcggacaaaagccgggaggctaaagttaagagcaagccgcgcacggtccctttcctgccgaagtattcagccgggctcgagctgctcagcaggtacgaggacacatgggcagcacttcacaggcgagctaaggattgtgcatcagcaggtgaacttgtggactccgaggtcgtgatgctatctgctcattgggaaaaaaagaaaacatccctggttgaactgcaggaacagctacagcagctgccagcgctcatcgccgacctggagagcatgacggccaatctgacgcaccttgaagcgagttttgaggaagtcgagaataatttgctgcacctggaggacctctgtggccagtgtgagctcgagcgatgtaagcatatgcagtctcagcaattagaaaattacaagaagaacaaaagaaaagagctcgaggtcacatttcggagtgaactagatgccgagcatgctcaaaaggtgctcgaaatggagcacactcagcagatgaaactgaaggagcggcagaagttctttgaggaagcgtttcaacaggacatggaacagtatttatcaaccgggtatctccagattgcagagcggcgcgaacctatcggctctatgtcgtcaatggaggtcaacgtagacatgcttgagcagatggacctgatggacatttcggaccaggaggccttagatgtgtttctgaatagcggcggggaggaaaatacagtcctgagccctgcactgggccctgaatcttccacgtgtcagaatgaaatcacccttcaagtgccgaatccttcagagctgcgggctaagcccccctcatcttcctccacttgtaccgacagcgccactcgggacatctctgaaggtggagagtctcccgtcgttcagtccgatgaggaggaggtgcaagtcgacaccgctttggctacttcccacaccgacagagaagccacacctgacgggggcgaagacagcgactcatag

SEQ ID NO: 186126 - DNA, 813 bp, synthetic construct
  misc_feature 1..813: note = Description of Artificial Sequence: Synthetic coding sequence
  source 1..813: mol_type = other DNA
atgctgagcgcccactgggagaagaagaagaccagcctggtggagctgcaggagcagctgcagcagctgcctgctttaattgcagatctggagtctatgaccgctaatctaactcatctcgaagcttccttcgaggaagtggagaacaacctgctgcacctggaggacttgtgtggacagtgcgagctggaaaggtgcaaacacatgcagtctcagcagctcgagaattataagaaaaacaaaagacgacgcctgaggacctttaagacagagctagatgccgagcacgcacagaaggtgctggagatggaacatacccaacagatgaagctgaaagaacgccaaaagttttttgaagaagcattccagcaggacatggaacagtatttgtccactggctacctgcagatcgctgaacggagggagccgattggatccatgtcctccatggaggttaatgtggacatgctggaacagatggaccttatggatatctccgaccaagaggctctagatgtttttctcaactccggtggcgaagaaaacactgttctcagccctgccctgggacccgagagttctacgtgtcagaacgaaatcacactgcaggtgcccaatccttctgagctgcgagctaagcctccgtcgtcctcatctacatgtaccgatagcgccacacgcgatatctctgagggcggcgaaagcccagtagtgcaatctgacgaggaagaagtccaggttgataccgcacttgccacctctcatactgatagagaggccacaccggacggaggcgaagattcagatagttag

SEQ ID NO: 186127 - DNA, 912 bp, synthetic construct
  misc_feature 1..912: note = Description of Artificial Sequence: Synthetic coding sequence
  source 1..912: mol_type = other DNA
atgctggagaccctgcgggagcggctgctgagcgtgcagcaggactttacatctggccttaagacactctcagataagagtcgggaagccaaagtgaaaagcaaaccaagaactgttcccttcctgcccaagtattcagctggacttgaacttttgtcccgatacgaagacacttgggcagctttgcacaggagagcaaaggattgtgctagcgccggcgaattggtcgattccgaggtcgtgatgctgtccgcacactgggaaaaaaagaaaacatcacttgtcgagctgcaggaacagcttcagcaactcccagctctgatcgctgatttggaatctatgacagccaacctcactcatctcgaagctagctttgaagaggtcgagaataacctgcttcacctagaagatctctgtgggcaatgcgagctcgaacgttgcaagcacatgcaatcacagcagctcgagaactacaagaaaaataaaagtaaagaactcggaacaggcaaagcggagttggatgctgagcacgctcagaaagtcctggaaatggaacatacacagcagatgaaactgaaggaaaggcaaaagtttttcgaggaggcgtttcagcaggacatggagcaatacctctccaccggataccttcaaattgccgaacgtagggaaccaatcgggagcatgtccagcatggaggttaacgtagatatgctggaacagatggacctgatggacatctcagaccaagaggcccttgacgtgttcctgaactccgggggagaagaaaacactgtgctctccccagcactcggccgggtcgacaagctggcattggcagagcccggacagtacagatgccactcgcctccgaaagtccggcgcgaaaatcatctacctgtcacctatgcgtag

SEQ ID NO: 186128 - DNA, 135 bp, synthetic construct
  misc_feature 1..135: note = Description of Artificial Sequence: Synthetic coding sequence
  source 1..135: mol_type = other DNA
atgctggagaccctgcgggagcggctgctgagcgtgcagcaggactttacatccggcttgaaaacactgtcggacaagtcacgcgaggcgaaggtaaagagtaaacctagctggctaaaccaggaacagttttag

SEQ ID NO: 186129 - DNA, 627 bp, synthetic construct
  misc_feature 1..627: note = Description of Artificial Sequence: Synthetic coding sequence
  source 1..627: mol_type = other DNA
atgctggagaccctgcgggagcggctgctgagcgtgcagcaggacttcacatccggcctgaaaactctctctgacaaatctagagaggcaaaggtgaagagtaaaccacgctacgaagatacttgggcggcactgcaccggcgcgcgaaggattgcgcaagcgctggggaactagtagacagtgaagttgtcatgctttccgcacactgggagaaaaaaaaaaccagcttggtggaactgcaggagcagctccagcagctgcccgcactgattgccgacttagagtccatgacagccaacctcactcatctggaggcttcattcgaggaagtagagaacaacctgcttcatctggaggacctgtgcgggcagtgtgagctcgagcggtgcaagcacatgcagtcacagcagctggagaattataagaaaaataagaggaaggaattagagactttcaaggcagaactcgatgctgaacatgcacagaaagtactggagatggagcatactcaacagatgaaactcaaggagcggcagaagttttttgaagaggcctttcagcaggatatggagcagtacctctcaactggttatctgcaaattgctgaaaggagaggggatccctag

SEQ ID NO: 186130 - DNA, 2235 bp, synthetic construct
  misc_feature 1..2235: note = Description of Artificial Sequence: Synthetic coding sequence
  source 1..2235: mol_type = other DNA
atgatcgaggacagcggcaagcggggcaacaccatggccgagcggcgccaactgtttgccgagatgagggcccaagatttggatcgcattagactgtctacctacaggactgcttgtaaactgagattcgtgcagaagaagtgtaatctgcatctggtggacatatggaacgtgatcgaggccctgagagagaacgcccttaataatttagaccccaacaccgagctgaatgttagccgactagaagctgtgctcagcacgatcttctatcagctgaacaagcgaatgcctacaacccaccagattcacgtagaacagtctatctccctgttgctgaactttctcctggcagcctttgatcctgaaggccatgggaaaatctccgtcttcgcggtaaagatggctctggcaacactgtgcgggggcaaaattatggacaaactaaggtacattttcagcatgatctccgactcctccggggtaatggtttacgggaggtatgatcagtttctccgggaggtactgaagctccctaccgcagtgttcgaaggaccgtcatttggctatacagagcagagtgctcgtagttgcttcagccagcaaaaaaaggtaacactaaacggcttcctagacactctgatgtccgaccctcctcctcagtgcctggtttggttgccccttctgcatagactggccaacgtcgaaaatgtatttcacccagtcgaatgtagttattgtcacagtgaatccatgatggggtttcgctatcgttgccaacagtgccacaactaccagctatgtcaggattgcttttggaggggccatgctggcggtagccacagcaaccagcaccagatgaaggagtatacaagttggaaatcccccgcaaaaaaactgactaacgccctgtcaaaatcattgtcctgtgcatccagcagggaacctcttcaccccatgttccccgatcagcccgagaagccactgaaccttgcccacatagtactggacaatatgcctcctcgacccgtcacctcgatgaacgatactctgttcagccattcagtcccgagcagcgggtctccattcattacaagatcctccccccctaaagactccgaagtggaacagaataagctgctggctagggccgctccagcatttttgaaaggcaaagggattcagtactctctgaacgtggctgatcggctggcagatgaacatgtgctaattgggctgtatgtcaacatgctccggaacaatcctagctgcatgcttgagagttctaacaggctcgatgaggagcaccggctgatcgcacggtacgctgcaagactagctgcagagtcttcttcttcccaaccccctcaacaaaggtctgctcccgacatttcgttcacgatcgacgctaacaaacagcagagacagttgatcgcagagctcgagaataaaaatagggaaatcttacaagagattcagcgtctgcgacttgaacatgagcaggcttcgcagcctacacctgagaaagcccagcagaatccgacccttctcgctgaactaaggctgctgcgccagcggaaggacgagctggaacagcggatgtccgctctgcaagaaagtcgccgcgagttaatggtgcagctcgagggactcatgaagctgctgaaaacccagggagccggctcaccaagatcgtcccctagccacacaatcagtcggcctatcccaatgcccattaggtccgcctcggcgtgctctaccccaactcatacacctcaagactctctgactggcgtcggcggcgacgtgcaggaggcattcgcccaaagcagtcgccggaatttgaggaacgacctcctggtggcggctgattccatcacaaacaccatgagtagcttagtgaaagaacttaacagcgaggtaggctccgaaacagagtctaacgtggactcggaattcgcgcggacccaatttgaggatctggtgccatctccgactagcgagaaagcattcctggctcagattcatgctagaaaaccaggatacattcacagtggcgccaccacctcgacaatgcgtggcgatatggtcaccgaagatgctgatccctatgtgcagcccgaggacgagaactacgagaacgacagcgtacgtcagcttgagaatgaactgcagatggaggaatatctgaagcagaaactgcaagatgaggcttatcaggtctccctccaggggtag

SEQ ID NO: 186131 - DNA, 1713 bp, synthetic construct
  misc_feature 1..1713: note = Description of Artificial Sequence: Synthetic coding sequence
  source 1..1713: mol_type = other DNA
atgatcgaggacagcggcaagcggggcaacaccatggccgagcggcgtcagctttttgccgaaatgagagctcaggatctggatcggattcgcctgtcaacttatagaactgcatgtaagctgcggtttgtccagaaaaagtgtaatttgcatttagtcgatatttggaatgtcattgaggccctccgggaaaacgcgcttaataacctggatcctaacaccgaacttaacgtgagccgcctggaggccgtattgagcacgatattttaccagctgaataagcgcatgcccacaactcaccaaatccacgtagagcagtcaattagccttctgctaaatttcttgctggcagcgtttgatccagaaggccacgggaaaatttcagtgtttgctgttaagatggcgttggctactttgtgcggaggcaagatcatggataagctgcgttacatttttagcatgatctccgatagctccggtgtgatggtttacgggagatatgatcagtttcttagggaagtactgaagcttcctactgcagtgttcgaaggtccttctttcgggtacacagagcagtcggctcgttcatgcttctctcagcagaaaaaagtcaccctcaacggctttttagatacactgatgtcagatccccccccacaatgcctggtgtggcttcctcttttgcacaggctggccaacgtggaaaatgtattccacccagtcgagtgtagttactgtcactcagagagtatgatgggttttcggtacaggtgccagcagtgccacaattaccagctttgccaggactgtttttggcgtgggcacgctggaggcagccacagcaatcagcaccagatgaaagagtatacctcatggaagtcccctgcaaaaaaattgacgaacgctctgagcaagtccctgagctgtgccagcagtcgcgaaccacttcatccaatgttccccgatcagcccgagaagcctctgaatctggcccacatcgtcgatacttggccgcccagaccagtaacctcaatgaatgacaccctgttctcgcactcagtccctagtagcggatccccctttatcacccggtcaagccctcctaaagacagcgaggtcgagcaaaacaaactgctcgctcgggctgcacccgcctttctgaagggtaaggggatccagtattctctgaacgtcgccgataggttagcagatgagcatgtcctgatcggactgtacgtgaacatgctgcggaacaaccctagctgcatgctcgaaagcagtaatcgcctggacgaggaacaccgcctcatcgcacgctacgctgctaggctcgcagcagagagtagctcctcgcagccgccccaacagcgcagcgccccggacattagcttcacaatagacgcaaataaacagcagagacagctcatagccgagctcgagaataaaaaccgcgaaatcctccaggaaatacagaggctgcgattggaacacgaacaggcttcacagccaaccccagagaaagcacaacagaaccctacattgttagcagaactgagattacttcgccaaaggaaggatgagctggagcagcgaatgagcgccctgcaggagagccggcgggagctcatggtccagcttgagggtcttatgaagctattaaaagaggaagagctcaaacaaggcgtgagctatgtaccatactgtagatcttag

SEQ ID NO: 186132 - DNA, 2061 bp, synthetic construct
  misc_feature 1..2061: note = Description of Artificial Sequence: Synthetic coding sequence
  source 1..2061: mol_type = other DNA
atgatcgaggacagcggcaagcggggcaacaccatggccgagcggcgtcaacttttcgccgaaatgcgcgcacaggatctggatagaatccggctgtccacttaccggactgcttgtaagcttcgatttgtgcagaagaaatgcaacctgcacctggttgatatttggaatgtcattgaggccttgcgtgagaacgcgcttaacaatcttgacccgaatacagagctgaatgtgtctagactggaagcggtcctgtccacaattttttaccaactaaacaaaagaatgccgacaacacaccaaattcatgtggagcagagtatctccttgctgttgaactttctcttagctgctttcgacccagagggtcacggcaagatctccgtatttgctgtgaagatggcccttgcaacattgtgtgggggcaagatcatggacaaactaaggtatatcttctcaatgatcagcgacagctccggagtcatggtgtacggcagatatgatcagttcctgagagaggtgctgaaactgcccaccgccgtgtttgaaggcccttcattcggttacacagagcagtctgcccgatcgtgctttagtcagcagaagaaggtgacgctgaacggctttttggacactcttatgtccgacccaccccctcagtgcctggtgtggctacccctgctgcacaggttagcgaacgtggagaacgtgttccatcccgtcgagtgcagttactgtcacagcgagagcatgatgggatttcgctaccggtgccagcagtgtcataattatcaactgtgccaggactgcttctggaggggacacgccgggggaagtcactcaaaccagcatcaaatgaaggagtatacctcttggaagtcccctgccaagaaactaacaaacgccctttccaagagcctgtcttgcgcgtcctcaagggaacctctgcatcctatgttcccggatcagccagaaaaaccccttaacctcgcccacatcgtcgacacctggccacctagaccagtcacatccatgaacgatacccttttctcccatagcgttcctagctcggggtccccttttatcacccggagcatgctcgaaagtagcaacaggttggatgaggaacaccgtctaattgctcgctacgcagctaggttggcagctgagtcttcctcaagccagccaccccaacaaaggagcgcccccgacataagcttcacaatagacgcgaataaacaacagcggcagctcatcgccgagcttgaaaacaaaaatcgtgagatattgcaggagattcagcggctaaggctggaacacgagcaggccagccaacccactccagagaaagcacaacagaatcctacactgttggcagagctgcggcttctacgccagaggaaggacgagcttgagcaacgcatgtctgcactacaagagtcgcggcgagaactgatggtgcaacttgaggggctgatgaagctgctgaaaacacagggcgcaggctcgccacgaagcagtccatcccacactattagtaggcctattcctatgcccatccgctctgcttcagcatgtagcaccccaacacatactccccaggactcccttacgggagtgggcggggatgtccaagaggccttcgcccagagctctagaagaaatcttcgcaacgaccttctcgtggcagctgattctattaccaacacaatgtcctctctggtaaaagagctcaatagtgaagttgggtctgagacagaatccaacgtggactccgaattcgccagaacccagttcgaggaccttgtcccatcccccactagtgagaaggcgttcctagctcagattcatgcccgaaagccagggtatatccatagcggcgctactacctctacaatgagaggcgacatggttactgaagacgccgatccctacgtgcaacctgaagacgagaattacgagaatgattccgtgcggcagcttgagaacgaactgcagatggaagaatatttaaagcagaaactgcaggacgaagcctaccaggtatccctgcagggatag

SEQ ID NO: 186133 - DNA, 1125 bp, synthetic construct
  misc_feature 1..1125: note = Description of Artificial Sequence: Synthetic coding sequence
  source 1..1125: mol_type = other DNA
atgatcgaggacagcggcaagcggggcaacaccatggccgagcggaggcagctgttcgcagaaatgagggctcaagacctggatagaatacgcttgtcaacctatcggaccgcctgcaagctgagatttgttcagaagaagtgcaatctgcacctcgttgatatatggaacgtgattgaggcactgcgggaaaatgcgctcaacaacctcgatcccaacaccgagttgaacgtgtccagactggaggccgttctatcaacaattttctaccaactgaataagagaatgcctacaacacaccagatacacgtagaacaatcaatctcgcttctgctcaattttctgctggccgcgtttgacccagaagggcatggtaagatcagtgttttcgctgttaaaatggccctcgccacattatgtggcgggaagattatggataaactgaggtacatttttagcatgataagtgatagctccggagtgatggtctacggccgctatgaccagttcctgcgcgaggttctgaagctccctactgctgtctttgagggtccaagcttcggatatactgagcagtcagctcgctcatgtttcagccagcagaagaaagttactctgaacggatttctcgataccctcatgtcagatccgccccctcaatgcctggtgtggctgcccctgctccacagactagcgaatgtcgagaatgtcttccatcctgtcgagtgcagctactgtcacagcgaatcaatgatggggttccgctaccggtgccagcagtgccataattaccagctttgccaagactgcttctggcggggccacgccggcggtagtcactcaaaccagcatcaaatgaaagaatacaccagctggaagtcgcccgccaaaaagctgacaaacgctctgtctaagagccttagctgtgcctcctcccgggagccactacaccccatgttccctgaccaaccagagaaaccgttgaacctggcccacatcgttgacacatggccgcctcgacccgtgacctccatgaatgatactcttttctcccactccgtgcccagttccggaagccctttcatcaccaggtcatcagacggtgcgttcggcggatgcgtttag

SEQ ID NO: 186134 - DNA, 1704 bp, synthetic construct
  misc_feature 1..1704: note = Description of Artificial Sequence: Synthetic coding sequence
  source 1..1704: mol_type = other DNA
atgatcgaggacagcggcaagcggggcaacaccatggccgagcggagacagctttttgccgagatgcgagcccaggatctcgaccgcattagactgtcgacctatcggactgcctgtaaactacgttttgtgcagaagaagtgtaacctccacctagtggatatctggaatgtgatagaggccttgagggaaaacgcactgaataatctcgacccgaatactgagctcaatgtcagccgactggaggcggtactgtccaccatcttttatcaactcaacaagcggatgcccacaacccaccaaatacacgtcgaacagtctattagccttcttctgaacttcctgcttgctgcctttgaccccgagggccatgggaagatcagcgtttttgccgtgaagatggctctagctactctctgtggtggcaaaattatggataagcttagatatattttttcaatgatatccgactcctccggagttatggtctacggacgttacgatcagtttctgagggaggtgctcaaactgcccactgctgtctttgagggaccatccttcgggtacactgagcagagcgcgaggagttgtttctctcagcagaaaaaggtaaccctgaacggcttcctcgacactctcatgtcagatccacctccccagtgcctggtctggctacctctgctgcaccgtctggctaatgttgagaatgttttccatccagtggagtgctcttattgccacagcgagtccatgatgggctttcgttaccggtgtcagcagtgccataattatcagctttgtcaggattgcttttggaggggccatgcagggggatcccattctaatcagcaccagatgaaagaatacacctcatggaagagtcccgccaagaagctgacaaacgctctcagcaaaagcctgtcttgtgcgtcatccagagagcctctgcaccctatgtttccggatcagccagaaaagccactgaaccttgcacacattgtcccaccccgtccagtaacctcgatgaatgacacactgttctcccacagtgtgcctagctcgggtagcccgtttataacacggtcctctccgccgaaggatagcgaggtagaacagaacaaactgctggcccgcgcagcccctgccttcctgaaagggaagggcattcaatacagcctaaacgtggcagaccggttggccgacgaacacgtcctcatcggcctatacgttaacatgctacggaataatccctcttgcatgttggagtctagtaatagactcgacgaggagcaccgtttgatcgctaggtacgccgcgaggctggcagcggagtctagcagtagccaacccccgcagcagagaagcgcccctgatatatccttcacgattgacgcgaacaagcagcagcgccagctgattgccgagctggagaacaagaaccgagaaatcttgcaagagattcagcgtcttcgactcgagcacgaacaagcaagccaacccacaccagagaaggctcagcagaatcccactctgctggcggaactgcgtctgcttagacagcgaaaggacgagctcgaacaaaggatgtctgcgttacaggagagcaggagagaacttatggtccagctggagggactgatgaagttgctgaaagaagaggaactcaagcagggcgttagctacgttccttactgccggtcctag

SEQ ID NO: 186135 - DNA, 1176 bp, synthetic construct
  misc_feature 1..1176: note = Description of Artificial Sequence: Synthetic coding sequence
  source 1..1176: mol_type = other DNA
atgttccccgaccagcccgagaagcccctgaacctggcccacatcgtcccaccccgacctgtgacaagcatgaacgacacactattttcacactccgtgcccagctctgggagccctttcatcactcgctcatcaccacctaaagactctgaagtcgaacagaacaagctcctcgctagagccgccccagcatttctgaaaggaaaggggatgctggagtcttcgaatagacttgacgaagaacatcgtcttattgcacgctacgcggctcgcctggccgcagagagctcatcttcccagcccccacaacagagatccgctcccgacattagttttactatagatgctaataagcagcaaagacagctaatcgctgagttggaaaataagaatagagagatccttcaggagatccaaagactgaggctcgagcacgaacaggcctcacagcctacacccgaaaaggcccagcagaatcctacgctcttggccgaactgagacttctgcgtcaacgtaaagacgagctggagcagaggatgagcgcactgcaggagtcgcgacgggagctgatggttcagttggaggggctgatgaagttactcaaaacacaaggcgccggctcaccaagatcctctccaagtcacactattagtcgacctatccctatgccaattagatccgcttcagcctgctccacacccacacatactccacaagattctctgactggcgtgggaggtgatgttcaagaggcctttgcccagtcctctcgccggaacctgcgaaatgatctgctggtggctgctgactctatcaccaacacaatgtcctcactcgtcaaagagctgaattccgaggtgggaagcgagaccgagtccaacgtagactctgaattcgcgcgcacccaattcgaggacctggtgccaagcccaaccagcgaaaaagctttcctggctcaaatccatgcgcggaaacccgggtatatccactcaggagccactacttccacaatgagaggcgacatggttacagaagacgccgatccatacgtgcagccagaagacgagaattacgaaaacgactctgttcgacagctggagaacgaactccagatggaagagtatcttaaacagaagttacaagatgaggcctaccaggtgtcgcttcagggctag

SEQ ID NO: 186136 - DNA, 2232 bp, synthetic construct
  misc_feature 1..2232: note = Description of Artificial Sequence: Synthetic coding sequence
  source 1..2232: mol_type = other DNA
atgatcgaggacagcggcaagcggggcaacaccatggccgagcggcggcagctgttcgcagaaatgagagcacaggatctagacagaataaggttgtccacatacagaaccgcctgtaaactgcgctttgtgcaaaaaaagtgtaatctccacttagtggacatatggaacgtgattgaggctctgagggagaatgctctgaacaatctggacccgaacaccgaacttaacgtgagccggctggaggcagttctgagcactattttttaccagctgaacaaacgaatgcccactacccaccagattcatgttgaacagagcatcagtctgctgctgaacttcttgctcgcagcatttgacccagaaggccatgggaagatatctgtttttgcggtcaagatggccctggcaactctgtgtgggggaaaaatcatggacaagctcaggtacatctttagcatgattagcgactcatctggagtgatggtttacggtaggtacgaccagtttttgcgcgaggtccttaagctgcccactgctgtgttcgaaggcccatcattcggttatactgaacagtccgccagatcttgtttctctcagcagaaaaaagtcactttgaacggcttcttagacactctgatgtctgatccccccccacagtgtctggtgtggttgccattgctccacagattggcgaatgtcgaaaatgtgttccatccggtggagtgcagctattgtcattccgagagtatgatgggctttagataccgatgtcagcagtgccataattatcagctgtgccaggattgcttctggcgcgggcacgcaggtgggtcccacagcaatcagcaccagatgaaggagtacacaagttggaagtccccagctaaaaagcttacaaacgccctcagcaagtctctctcgtgtgccagcagccgcgaaccactccatcctatgtttcctgatcaacccgagaaaccacttaacctggcccatattgtcgacacttggcctccaaggcccgtgactagcatgaacgatacacttttcagccatagcgttccatcctcggggtctccattcatcacacgtagttctccccctaaagattctgaggttgagcaaaataagctcctggcacgcgcggctcccgcattcctgaagggaaaggggatccaatacagcctgaatgtcgctgacaggctggctgatgagcacgtcctgatcgggctgtatgtcaacatgcttcggaataatccaagctgtatgctcgagagtagcaatcggttggacgaagaacataggctaattgcccggtatgctgcaaggcttgctgccgagtctagcagctcacaaccacctcagcagaggtctgctccagatatttcttttacaatagacgcaaacaagcagcagcgacagctgatcgccgagctcgagaataagaatcgggagattctgcaggagattcaacggctgcgtctcgaacatgaacaagcttcgcaaccgactccggagaaagcacaacagaaccctacattgttggcggagctaaggctgctgcggcagcgcaaggatgaactggagcagagaatgagcgccctgcaagagtctaggcgagagctcatggtccaactggagggtttgatgaaactgctgaagactcaaggggccgggtccccacgaagcagccctagccatacgatttcccggccgattcccatgccgatacgttccgcttcagcttgtagcacaccaacgcatacaccacaggactccctgacaggagttggcggcgatgtgcaggaagcattcgctcaaagctcaagacgcaacctacggaacgacctgctggtggccgccgattctatcacaaatacgatgagcagtttggtaaaagaactcaatagtgaggtcggatctgaaactgaaagtaacgtcgacagcgaattcgcccggacccagttcgaggatctcgttccgagtccaacttccgaaaaggcttttctcgctcaaatccacgctcggaagccaggatatattcacagtggagccaccacttccaccatgcgcggggatatggtgactgaggacgccgatccatacgtccaaccagaggacgaaaactatgaaaatgactctgttaggcagttggagaacgagctgcagatggaagagtatcttaaacagaagctgcaggatgaggcataccaggtgagcctgcagggttag

SEQ ID NO: 186137 - DNA, 2073 bp, synthetic construct
  misc_feature 1..2073: note = Description of Artificial Sequence: Synthetic coding sequence
  source 1..2073: mol_type = other DNA
atgatcgaggacagcggcaagcggggcaacaccatggccgagcggaggcagctgttcgccgagatgcgggcacaggacctggaccggatccggctgtcgacatatcgaaccgcatgtaaactgaggtttgttcagaagaagtgtaatttacacctggtggacatctggaatgtgattgaagcattgcgcgaaaacgccttaaataacctagatccgaatactgagttgaatgtcagcagattggaggctgttctgagtaccatattctaccaactgaacaaacgcatgcctactacacatcagatccacgtagagcaatcaatctctcttttacttaacttcctgctcgcggcttttgatcccgagggtcatggtaagatttcagtgtttgcagtgaaaatggctctggccaccctgtgtggcgggaagattatggacaaacttcggtacatattctcaatgataagcgatagttccggtgttatggtttacggaaggtacgatcaatttttgagggaagtccttaaactgcccacggccgtttttgagggcccctcattcggctacacggagcagagtgctaggtcttgtttttcccaacagaaaaaggttacactcaatgggttcctggatactttaatgtcggatcctcccccccagtgcttggtatggctgccattgctgcacaggctggctaatgtggagaacgtgttccatccggtcgaatgctcttactgccattcggaaagcatgatgggcttccgctacaggtgtcagcagtgccataactatcagctgtgtcaggattgcttctggagggggcacgccggcggatcgcactcaaatcagcatcagatgaaggaatacacaagttggaagagtccggcaaaaaagcttactaacgccctgtccaagtctctaagttgcgcatcatcacgcgagccattgcaccccatgtttccagatcagcctgagaaacctctgaacctggcccacatcgtcccacccaggcctgtcacttcgatgaacgatacgctcttttctcactcagtgccctcgtctgggtccccatttatcactaggtccatgctggaatcctccaatcgattggatgaagagcaccgtctaatcgcccgttacgcagcccggttggccgccgaaagcagttcctcccagccacctcagcaaagaagcgccccagatatttcttttacgatagacgctaacaaacagcagagacaacttattgcggagctggagaacaaaaatagggagatacttcaggagatccagagactgaggctggaacacgaacaggcgtcccagccaactcctgaaaaggcgcagcagaaccctaccctcctggccgagctgaggttgcttaggcaacggaaggacgaattagaacagcggatgtcagcactgcaggagagcaggagagaattgatggtgcagttagagggtttaatgaaactgttgaaagaggaggagctgaaacaggggacccagggcgccgggagtcctcgctctagcccaagtcatactatctcaagacccattcccatgccaatcaggtccgccagcgcttgttcgactccaacccatacaccacaggattcactgaccggggttggcggtgatgttcaagaagcctttgcgcagtctagtcggcggaatctgcggaacgatctgctggtagccgctgattctattaccaacacgatgagcagcctggtcaaggagcttaattctgaagtaggaagtgagactgagagcaacgtcgattccgagtttgccagaactcagttcgaggatctagtgccatccccaacctcagagaaagcatttctggctcagatccatgcgcgcaagccaggctatatccacagtggcgcaactaccagtactatgcgcggtgatatggtgaccgaggatgcagacccgtacgtccagcccgaggacgagaactatgagaatgactccgtgcggcagttggaaaacgagctgcagatggaggaatatctaaaacagaagcttcaggacgaagcttaccaggtgagtctccagggatag

SEQ ID NO: 186138 - DNA, 2061 bp, synthetic construct
  misc_feature 1..2061: note = Description of Artificial Sequence: Synthetic coding sequence
  source 1..2061: mol_type = other DNA
atgatcgaggacagcggcaagcggggcaacaccatggccgagcggcgtcagctatttgccgagatgcgcgcccaggatctggacaggatcaggcttagcacctaccggaccgcctgtaaacttcgatttgtccaaaaaaaatgcaatctccacttggtagacatctggaacgtgatagaggcgctccgtgaaaatgcattaaacaacctcgacccgaataccgaactaaatgtgagtagactcgaggcggtgctctctactattttctatcagcttaacaagcgtatgccaaccacccaccagatccatgttgagcagtccattagcttgctgctgaacttcctgctagccgccttcgatcccgaaggccacgggaaaatttctgtgtttgcggtgaaaatggccctggccacactgtgcggtggcaaaatcatggacaaactccgctacattttttcgatgatctctgacagttctggggtgatggtatacggtaggtatgatcaattccttcgagaagttctgaagctgccgaccgctgtgttcgagggcccaagttttgggtatacagagcagagcgctcgttcttgctttagccaacagaagaaggtgactcttaacggctttttggacactctgatgtcagaccctccacctcaatgtctagtgtggcttccactgcttcacagactagccaatgtggaaaacgtctttcatccggtggagtgctcttactgtcattccgagagcatgatgggcttcaggtatcgatgccagcaatgccacaactaccagctgtgccaggattgcttctggaggggccacgccgggggctctcacagcaaccagcaccaaatgaaagagtacactagctggaagtcccccgctaaaaaactgactaacgctctgagcaaaagcctctcctgcgcttcttctcgggaaccgctacatcctatgttccctgaccagcctgagaaaccgcttaacctggctcatatcgtttgcttcaggccccctcgcccagtgacaagtatgaatgacacactgttttcacactccgtgccgtcctctggctccccttttatcactagatctatgctcgaatcttccaatcggctcgacgaggaacataggctgattgctaggtacgccgcacgccttgccgccgagtcgtcctcatcccagcctccccagcagcgttcagctccagacatctcatttaccatcgacgctaacaaacaacagcggcagctgattgctgagttagaaaataaaaatagggaaatccttcaggagattcagcgcctgagactggaacacgaacaggcctcccagcctactcctgagaaagcacagcagaaccctacgttgctcgccgaactgcgcctcctacgccagagaaaggacgaactcgagcagaggatgtccgctctgcaggagtctaggagagagctgatggtgcagctggaggggctgatgaagttgctgaaaacccagggtgctggatccccaaggtcctcgccttcccataccatctcacggcctatccccatgcctatccgatccgcaagtgcatgcagcacccccactcacacgccccaggatagtctaacgggcgtggggggcgacgtgcaggaagcctttgctcaaagctcccgcaggaatctaaggaatgatctactggttgccgcggattctattaccaataccatgagttcactagttaaggaactaaatagcgaggttggatctgaaacagagtccaatgtcgacagtgagttcgctcggacccagtttgaagatttagtcccctccccaacatcggagaaagcctttctagcgcagatccacgcacgcaaacctggatatattcatagcggcgccactacttctaccatgcgaggtgacatggtgaccgaggacgccgatccttacgtccagccagaagacgagaactacgagaacgattctgtgaggcaacttgaaaacgaactccagatggaagagtacctgaaacagaagctccaggatgaagcataccaggttagcctgcagggatag

SEQ ID NO: 186139 - DNA, 2232 bp, synthetic construct
  misc_feature 1..2232: note = Description of Artificial Sequence: Synthetic coding sequence
  source 1..2232: mol_type = other DNA
atgatcgaggacagcggcaagcggggcaacaccatggccgagcggcgacagctgtttgcggagatgcgtgcccaggacttggacagaatccggctctccacttacaggaccgcctgcaaattgaggttcgtgcaaaaaaagtgtaacctgcacctggtcgacatctggaacgtcatagaagctctcagagagaacgcactgaataatcttgatccaaataccgaactgaacgtgagtcggttagaggccgtgctctccactatcttttaccagcttaataagcgaatgccaactacccatcaaatccacgtggagcagagcatcagcttgcttcttaactttttgctggctgcatttgaccccgaagggcacggcaagatttccgtgtttgcggttaagatggcgcttgctacgctgtgcggcggtaagattatggataagctcaggtacattttttccatgatttctgatagttcgggggttatggtgtacggccgatatgaccagtttctgcgagaggtgttgaaattgccaactgccgtgttcgagggcccaagctttggttacacggaacagtccgctcgctcgtgtttcagtcagcaaaagaaggtcacattaaacgggttcctggatacccttatgagcgatccacctccgcagtgcctagtatggctccccctcctacacagactggccaacgttgaaaatgtgttccatccagtcgagtgctcctactgtcacagcgagtctatgatgggatttcgatataggtgtcagcagtgccacaattaccaattatgccaggactgtttctggcgggggcacgctgggggatctcactctaaccagcatcagatgaaggaatatacctcatggaaatcccctgctaaaaagctgacaaacgccttgtctaaaagcctctcttgtgcaagttccagagaacctttacaccctatgtttccggatcagcccgaaaaacccctgaatcttgcgcacatcgtctgcttccgtccacccaggccggtgacctccatgaatgacacacttttttcccactcggtgcccagctccggttccccatttataacgaggagtagccctccaaaggactcggaggtggaacagaacaagctgttggcccgagcggctccagccttcttgaaggggaagggcatccaatactctctcaatgtggctgaccgcttggctgatgaacatgtgctaataggactttacgtaaatatgttgaggaataacccctcttgtatgttggagtcctctaatcgcctggacgaggaacacaggttgatcgcccggtatgccgctagactggccgctgaatctagcagttctcagcctccacagcagcggagcgctcccgatatctcgttcacaatcgacgctaataaacaacagcgacaattgattgcggagttagaaaacaaaaatagggaaatcctgcaggaaatccaacgactcaggcttgaacacgagcaggcctcccagcctacgcctgaaaaagcacagcagaaccccacgttgcttgctgagctcagactgctgcgacaacgaaaggatgaacttgagcagcggatgagcgcattgcaagaatcccggcgagagttaatggttcagttagaaggtctcatgaaactgctaaagacacagggcgcagggagcccccgaagctccccttcacatacaattagcagaccaattcccatgcctatccgtagtgcaagcgcctgctccacacccactcacaccccccaggatagcttaaccggcgtgggcggtgacgtgcaggaagcctttgcccagtcttccaggcggaacttgaggaacgaccttctggtcgccgctgatagcattactaacactatgtcaagtttggttaaggagcttaactcagaggtcggttccgaaactgaatctaacgtggacagtgaatttgctcgcacccaattcgaggacctggttccttcccccacttctgagaaggcttttctggcccaaatacatgcccgcaagcccggttacattcacagcggtgcaaccaccagtactatgcgcggggacatggtgacagaggatgctgatccctatgttcaacccgaggatgagaattatgagaatgactccgtgcggcaactggagaatgagctccagatggaggagtacttaaaacagaagttacaggatgaggcataccaggtgagtctccagggctag

SEQ ID NO: 186140 - DNA, 2232 bp, synthetic construct
  misc_feature 1..2232: note = Description of Artificial Sequence: Synthetic coding sequence
  source 1..2232: mol_type = other DNA
atgatcgaggacagcggcaagcggggcaacaccatggccgagcggaggcagctgttcgcagaaatgagagcccaagatttagatcggatcagactctcaacgtatcgcaccgcatgcaaactccgtttcgtacaaaagaagtgtaacctgcacctggttgacatatggaatgtgatcgaagccctgagggagaatgctttaaataatcttgatcctaatactgaactgaacgtgagtaggttggaggccgtgctttcaaccatcttttaccaactcaataaacgtatgcccaccactcaccagatccacgttgaacagagtatctctctcttactcaatttccttttggccgcgtttgaccccgaaggacacggtaagatcagcgtgtttgctgtaaaaatggctcttgccacactctgtgggggaaagattatggacaaactgcgctacatattttccatgatcagtgacagttccggtgttatggtctatggcagatatgaccagtttctgagggaggtccttaagttgcccacagccgtgttcgagggaccttctttcggctacacagaacagtcagctcggtcctgcttttctcaacagaaaaaggtcacactcaatggatttctggatacacttatgagcgaccctccgccccaatgtctagtgtggctgccactgcttcataggctggcgaacgtcgagaacgtgtttcatccagttgagtgcagttactgtcactccgagagcatgatgggattccgctaccggtgccagcagtgccacaattatcagctgtgtcaagactgcttttggaggggtcatgccggaggttcccattcaaaccagcatcaaatgaaagagtatacctcctggaaatcacccgcaaaaaaactcacaaacgctttgtctaaatcattatcttgtgctagcagtcgggagccactccaccccatgttcccagatcaaccggagaagccactcaatctggctcacatagtagatacatggccccctcgcccagtgactagtatgaacgacaccctgttttcccactccgtgccgtctagcggctccccatttatcacccggtccagcccaccaaaagattctgaggtagaacagaacaagctgttggcccgggcagcccctgcttttctgaagggaaagggcatccagtattctttgaacgtggcagatcgtctcgcggacgaacacgtcttgatcggtctctatgtgaatatgttgcggaacaacccctcctgtatgctggaatcttcaaatcgactggacgaggagcatcggctgattgcgcgatacgctgcgcgccttgccgccgagtcatcatcttcccaacctccacagcagcggtcagctcccgatatcagcttcacaattgatgcaaacaaacagcaacgtcaattaatcgccgagctcgagaacaagaaccgggagattttgcaagaaatccagcgactccggctggagcatgagcaggcaagtcagcccacccccgagaaagctcagcagaatccgactctactggctgaattaagactgctgaggcagaggaaggacgaactggagcagaggatgtctgcccttcaggagagccgccgcgagctgatggtccagctcgagggcctcatgaagctgctgaaaacacaaggagcgggctcaccaagatccagcccaagccatacaatcagtcgacccattcccatgcctatccgctccgccagtgcctgttcaactcccacacacaccccgcaggattctctgacaggcgtggggggtgacgtacaggaagccttcgcccagtcttcacgccggaatctccgaaacgatctcctcgtcgccgcagacagcattacaaacacaatgagctctctggtcaaggaactgaattcggaggtaggttccgaaaccgaatctaatgtggattctgagtttgcccgtacccagttcgaggatctagtaccgagcccgacttcagaaaaagcttttctggcccagatccatgctcgtaaacctggttacattcattcaggagctaccacatctaccatgaggggcgacatggtaactgaggatgctgatccctacgtccaacccgaagacgaaaattatgaaaatgacagcgtgcgtcagctggagaatgaacttcagatggaggagtacctgaagcaaaagttgcaggacgaggcttaccaggtgagcttgcagggttag

SEQ ID NO: 186141 - DNA, 1176 bp, synthetic construct
  misc_feature 1..1176: note = Description of Artificial Sequence: Synthetic coding sequence
  source 1..1176: mol_type = other DNA
atgttccccgaccagcccgagaagcccctgaacctggcccacatcgtacctccccgccccgtaacttccatgaacgatacactgttttcccactcagtgccaagcagcgggtcccccttcattactcggtcttccccaccaaaggactcagaagtggagcagaataagttgctcgccagagcggccccagcatttctgaaagggaaagggatgctggagtcctctaatcgtctggacgaagaacataggttgatcgctagatacgccgctagactggccgcagaatcgtcatcaagccagcctccacagcagcggtcagctcctgatatctcattcactatcgatgcgaacaagcagcagagacagctgattgccgaactagaaaacaagaaccgggaaatcctgcaggagattcagagactgcgcctggagcatgagcaggcctcccagcctacacctgaaaaggcccagcaaaacccgaccctcctggctgaactgcgtttgctgagacagaggaaggatgagctcgagcagaggatgagcgcattacaggagtccagacgcgagttgatggtacagctggagggactcatgaagctcctaaagacacagggggctgggtctccacgctcttcaccatcccacacaatatcgcgccccattcccatgcccatccgttcagccagcgcctgctcaaccccgacacatactccccaggactctctgaccggggtcggaggtgatgtccaggaggccttcgcccagagcagtagacggaacttgagaaacgacttactggtggctgcggattctatcaccaacaccatgtcctccctcgtgaaagaactcaattccgaagttgggagcgaaaccgagagcaacgtggactcggaatttgcgcgcacccagttcgaggacctcgtaccgtctccgacatcagaaaaagctttcctggcccaaatccacgctcggaaacctggctacatacatagtggagctacaacgtccaccatgcgcggggatatggttacggaagacgccgacccatacgtgcagcctgaggacgaaaactacgagaacgacagtgttcgccaactagagaacgagctccagatggaggaatacctcaaacagaagttgcaggacgaagcttatcaggtaagcctgcaagggtag

SEQ ID NO: 186142 - DNA, 1116 bp, synthetic construct
  misc_feature 1..1116: note = Description of Artificial Sequence: Synthetic coding sequence
  source 1..1116: mol_type = other DNA
atgatcgaggacagcggcaagcggggcaacaccatggccgagcggaggcagttgtttgccgagatgcgtgctcaggatctcgaccgtataaggctgagtacatacaggaccgcgtgcaaattacggtttgtgcagaagaagtgcaatttgcacctggtcgatatctggaacgtgatcgaggccctccgcgagaatgctcttaacaatttggatccaaacactgaacttaacgtatcgaggctagaagccgtcctttccaccattttctaccaactcaataaaagaatgcccacaacccaccaaatccacgtggaacaatccatatccctcctcctgaactttttactggcagcctttgatcctgagggccatggaaagatatccgtgtttgccgttaagatggccctggctactctgtgcgggggcaagattatggataaactcagatacattttctcaatgatatccgactcttcgggggtgatggtctacggaagatatgatcaattcctgcgggaggtcctcaagctccctaccgcagtatttgaagggccttcctttggctacactgaacagagtgcacgaagctgtttctcccaacagaagaaggtgaccttgaacggctttttggatacactgatgtcagatcccccacctcagtgcctggtgtggcttcccctcctccacaggctggccaacgtggaaaatgtgttccaccccgtagagtgttcttattgccatagcgaaagcatgatgggttttcggtaccgctgtcagcagtgccataactaccagttgtgccaggactgcttctggcggggacacgcgggagggtctcactccaatcagcatcagatgaaagagtacacctcttggaaatcacctgccaaaaaactcacgaatgctctctcgaagagcctcagctgcgcttctagccgtgagcctctgcatcccatgttcccggaccagcccgagaaaccattgaatctggcccacattgtccctcccaggcctgtgacatccatgaatgatacgctcttcagccactccgtgccatcttcgggctcaccgttcattactcgcagctctgacggggccttcgggggatgcgtctag

SEQ ID NO: 186143 - DNA, 1794 bp, synthetic construct
  misc_feature 1..1794: note = Description of Artificial Sequence: Synthetic coding sequence
  source 1..1794: mol_type = other DNA
atgatcgaggagagcggcaacaagcggaagaccatggccgagaagaggcagctgttcattgaaatgagagctcagaatttcgacgtgatcagactgtccacataccgcacagcgtgtaaactaaggttcgtccagaagcgctgtaacctgcatttggttgacatttggaacatgattgaggctttccgggacaatggtttgaacacactggaccatacaactgagatctctgtgtcccgtctcgagacagtgatctcatctatatattaccagttgaacaagaggctgccctccacccaccaaatatccgtggaacagtccatcagtcttttgctcaattttatgattgccgcttacgattccgaaggtaggggtaagctgaccgtctttagcgttaaggccatgcttgccaccatgtgcggaggaaagatgctggacaaactgcgatacgttttctctcagatgagcgatagcaacggactgatgattttctctaagtttgaccagttcttgaaggaggtgctgaaactgccgaccgcagtgttcgaaggccccagtttcggctacaccgaacacagcgttagaacctgttttccacagcagcgcaagataatgctgaacatgtttttggacactatgatggccgatcctccccctcagtgccttgtgtggttgccgctgatgcaccgcctcgcacacgttgagaacgtgttccatcctgtagaatgcagctactgccggtgtgaaagcatgatgggcttcagatatagatgccagcagtgccacaactatcagctctgccagaattgtttttggcggggtcatgctggaggcccgcacagtaaccagcatcagatgaaggaacactcgagctggaaaagcccagccaaaaagctctcacatgcaatatcaaagtcactgggttgtgtgccaacaagggagccacctcacccagtctttcccgagcagcctgagaagccactagacctcgcccacatagtcccaccaagaccgctaaccaatatgaatgataccatggtgtcacacatgtcatctggggtgccgacacccacaaagagactgcaatactctcaagacatcccatctcatctggcggatgaacatgcgttgatcgccagttacgtagcccgcctgcagcactgtgcaagggttctcgattctccaagcaggctcgacgaggaacacagacttatcgcgaggtacgcggcacgcctggctgctgaggcaggaaatgtcacgcgcccccccaccgacctgtctttcaatttcgacgcgaataaacaacagcgacagctcattgcagaactggaaaacaagaatcgtgagatcttacaggagatacagagacttcgcctcgagcacgagcaggcctcacagcccactcctgaaaaggcccagcaaaaccccacactcctcgccgaactgaggctgctgcggcaacggaaggacgagcttgaacagcggatgtccgcactgcaggaaagccgtcgcgagctgatggtgcagctggaggaattgatgaaacttttgaaagaagcggaggcaagagagagtgcccaggcaaccggatcaccccatacttctccgacacatggcggaggcaggcctatgcctatgcccgtgcgatctacatcggcagggagtacaccaacccactgccctcaggattcactcagtggggtgggtggggacgtacaggaagctttcgcccaggccgaggagggggccgaagaggaagaagaaaagatgcagaacggaaaggaccggggctag

SEQ ID NO: 186144 - DNA, 567 bp, synthetic construct
  misc_feature 1..567: note = Description of Artificial Sequence: Synthetic coding sequence
  source 1..567: mol_type = other DNA
atgatcgaggagagcggcaacaagcggaagaccatggccgagaagcgccagctgtttatcgagatgagggcccagaacttcgacgtcattcgtctgagcacgtatcgcactgcatgcaagctgaggtttgtgcaaaagagatgtaatctgcatttggttgacatctggaacatgatcgaggctttccgagacaatggtctcaatactctagaccacaccacagagatttccgtgtctcgactcgagactgtcattagctcaatctattaccagctcaacaaacgcctgccctctacacaccagattagcgtagaacagtcaatatctctcctgttgaatttcatgatcgctgcgtatgacagcgagggacgcgggaagcttacagtgtttagcgtgaaagcaatgctggcgacaatgtgcgggggaaaaatgctagataagctcaggtatgtgttctcccagatgtctgatagtaatggcctgatgattttcagtaagttcgaccagttcctcaaggaggttctgaagttacccaccgctgtgtttgagggtccttctttcggttag

SEQ ID NO: 186145 - DNA, 399 bp, synthetic construct
  misc_feature 1..399: note = Description of Artificial Sequence: Synthetic coding sequence
  source 1..399: mol_type = other DNA
atgatcgaggagagcggcaacaagcggaagaccatggccgagaagcgccagctcttcattgaaatgcgtgcccagaactttgatgtcattagactgtcaacctacagaactgcatgcaaactgaggtttgttcagaagagatgtaaccttcaccttgttgatatatggaatatgatagaagcctttagggataatggtctgaacacgctcgaccacacaaccgagataagcgtgtccagactggagactgtgatatcgtcaatttactaccaattaaacaagaggctaccctccacccatcagattagcgtagagcagtccatctccttgttgctgaactttatgatcgccgcatatgactctgagggtcggggcaagctgaccgtgttcagcgtgtag

SEQ ID NO: 186146 - DNA, 450 bp, synthetic construct
  misc_feature 1..450: note = Description of Artificial Sequence: Synthetic coding sequence
  source 1..450: mol_type = other DNA
atgatcgaggagagcggcaacaagcggaagaccatggccgagaagcgccagctgttcatcgagatgagagcccaaaactttgacgtgatccgtctctcaacataccgaaccgcttgcaaactaagatttgtgcagaaacgttgtaatcttcatctcgtggatatttggaatatgatcgaggccttcagagacaatggattgaatactcttgaccacacaacagagatcagcgtgtccagattggaaaccgtgatttcttccatctactatcagctaaataaacggctcccatcgacccaccaaatttcagtggaacagtccatttctttgctgttgaatttcatgatcgctgcttacgactcagagggcaggggcaagctgacagtgttctctgtcaaggcgatgcttgctaccatgtgtggtggcaaaatgctcgataaactgcggtag

SEQ ID NO: 186147 - DNA, 1794 bp, synthetic construct
  misc_feature 1..1794: note = Description of Artificial Sequence: Synthetic coding sequence
  source 1..1794: mol_type = other DNA
atgatcgaggagagcggcaacaagcggaagaccatggccgagaagaggcagctgtttattgagatgagggcccagaacttcgatgttattcgattgagcacctaccgtaccgcctgcaagctgcgctttgtgcagaaacgttgcaacctccacttggtggatatttggaatatgattgaagcttttcgagataacggactgaataccctggaccataccaccgaaatctcggtcagccggctggagaccgtcataagctccatctactatcagcttaacaaacggctaccttctacccatcagatttctgtggaacagtctatttccctcctgctgaacttcatgattgctgcatacgattctgagggcagaggtaaactcaccgtgtttagcgtgaaagctatgcttgctaccatgtgcggtgggaagatgctggacaaactcaggtacgtgttttcccagatgtccgactctaacggactgatgatcttttcaaagtttgatcagtttctgaaggaggtcttaaagctgcccaccgctgttttcgaagggccgtcgttcggctatactgagcactcggtgcggacatgcttcccacagcagaggaaaattatgcttaatatgttcctcgatacaatgatggcagacccccctccccagtgcttggtttggttgcctctgatgcaccgcctcgcccatgtcgagaatgtgtttcatccagttgagtgtagttattgtcgatgcgaaagcatgatgggtttccggtacagatgtcagcaatgccataattaccagctgtgccagaattgcttttggagaggacacgccggcggcccccattctaatcagcaccagatgaaggagcatagctcctggaaatcccccgcaaagaaactctctcatgctatctccaagtctttaggttgcgttcccacgcgggaaccgccgcatcccgtgtttccggaacagcccgagaagcccttggacctcgctcacatcgtgccacctaggcccctgacaaatatgaacgacaccatggtctcccacatgagctcaggggtaccaacccctaccaaaaggctgcagtattctcaagatataccgagtcaccttgccgacgagcacgcccttattgcgtcctacgttgcacgcctacaacattgcgcccgagtgttggatagccctagcaggctggacgaagagcacagactcatcgctaggtacgctgcaaggctggctgcagaagccgggaatgtcacacgtcccccgactgacctaagcttcaacttcgacgccaataagcaacagaggcaactcatcgctgagctggagaacaaaaacagggagatcctccaggaaatccagaggcttagactggaacatgagcaggccagccaacctacccctgaaaaggcccagcagaatcccactttgctggccgagttgcggctcctcaggcagcgcaaggatgaactagaacagagaatgtctgccctgcaagagtcccggcgagaactaatggtgcagcttgaagagctcatgaaactgttgaaggaggaggagcaaaaacaggccgcgcaggcaacaggctctccacacaccagccctacacatggcgggggacggccaatgccgatgcccgtgaggtccaccagcgctggatccacacctactcactgcccacaggacagcctgagcggcgtcgggggcgatgttcaggaggcattcgctcaagctgaggagggtgctgaggaggaggaagaaaaaatgcagaatggcaaggatagggggtag

SEQ ID NO: 186148 - DNA, 1683 bp, synthetic construct
  misc_feature 1..1683: note = Description of Artificial Sequence: Synthetic coding sequence
  source 1..1683: mol_type = other DNA
atgatcgaggagagcggcaacaagcggaagaccatggccgagaagcggcagctttttatcgagatgcgggctcagaattttgacgttatcagactcagtacttacaggaccgcctgcaagttgcgattcgtccagaaacgatgcaacctgcatctggttgacatctggaatatgatcgaagcctttagagacaatggcctcaacactctcgatcataccaccgagatatcagtatcgcggctggaaactgtgatctcttccatctactatcaactgaacaagcgcctaccatctacacaccaaatatccgtggagcaaagcatctccctgctccttaatttcatgattgccgcctacgactccgagggcagggggaaattgaccgtgttttcagtgaaggctatgctggctactatgtgcggtggtaaaatgttagataaattgcgatacgtgttcagccagatgtccgacagtaatggcctgatgatcttttctaagttcgatcaattccttaaagaggtgctcaagctgccgaccgctgtgttcgagggcccttctttcggctacacagagcactccgtgagaacatgctttccccagcaaagaaagataatgctgaacatgtttttagacacaatgatggcggacccccccccccagtgcctggtttggctccctttaatgcaccggctcgcccatgtggagaacgtattccatcccgtcgagtgctcttattgtcgatgcgagtccatgatgggattccggtatcgctgccaacagtgccacaactatcagctgtgtcaaaactgcttttggcgtggccacgcagggggtcctcactcaaatcaacaccagatgaaagagcacagttcatggaaaagtcccgccaagaagctatcccacgccatctcaaagtcactggggtgcgtgcctaccagagaacccccccaccccgtctttccagagcagcccgaaaagccattggacttggcccacatagtaccaccccgcccgttgactaacatgaacgacaccatggtgtcacacatgtcatctggggtgccgaccccaacgaagtctgtgctggactcacctagtcggctggatgaggagcatcgtctgatcgcaagatatgcagccaggttggccgccgaagcggggaacgtcactcgacctcccaccgatctgtcattcaacttcgacgccaacaaacagcagagacagctgatcgcggaactcgaaaacaagaatagagagatactgcaggagatccagaggctgagactggagcacgagcaggcttctcagcctacccctgagaaggcccagcagaatcccaccctgctagcagagctacgacttctgagacagaggaaggacgaactcgagcaacgaatgtcggcacttcaggagtccaggcgcgagctcatggtccagctcgaggaattgatgaagctcttaaaggcccaggccaccgggtcacctcacacctctcctacccacggcggcggcaggcccatgcccatgcctgtgagatccacatcagccggctcaactcccacgcactgcccccaggactcactgtcaggggtcggcggggacgtccaggaggcctttgcgcaggctgaggagggcgctgaggaagaagaggaaaaaatgcagaacgggaaggatcgggggtag

SEQ ID NO: 186149 - DNA, 1884 bp, synthetic construct
  misc_feature 1..1884: note = Description of Artificial Sequence: Synthetic coding sequence
  source 1..1884: mol_type = other DNA
atgatcgaggagagcggcaacaagcggaagaccatggccgagaagcgccagctcttcattgaaatgcgcgctcagaactttgatgtcattcgcctttccacttacagaacagcctgtaaactgaggttcgtgcagaagaggtgcaatctccatctggtggacatctggaacatgatcgaggcgtttcgcgataacggactcaatacacttgaccatactacggaaatatctgtcagccgtctggaaactgtgataagttctatctattatcagctcaataaaagactaccgagcacccaccaaatttcggtcgaacaatcaatctccctgttgttgaacttcatgatcgccgcctacgacagtgagggtcgtggcaagctgacggtgttcagcgtgaaggctatgcttgccaccatgtgtggaggcaagatgctggataagctccggtacgtattctcacaaatgtctgacagcaatgggctaatgattttctcaaagtttgatcagttcctgaaggaggttctgaagctgcctactgcggtttttgaagggccaagctttggatataccgagcatagcgttcgtacctgttttcctcagcagagaaagattatgctaaatatgtttctcgatacaatgatggccgaccctcccccccagtgtttagtgtggcttcctctgatgcaccggctcgcacatgtggagaatgtgttccatcctgtcgagtgcagctattgtcgctgcgagagcatgatgggcttccgatataggtgccagcagtgtcacaactatcagctctgtcaaaattgtttctggaggggacatgcaggagggccacatagcaaccagcatcagatgaaggagcactcttcatggaagtctccagctaagaagctctcccatgcaattagcaagtctctggggtgcgttcccactcgagagcctccccaccccgttttccccgaacagccggaaaagcccctcgatctagcccacattgtccccccccgacctttgaccaacatgaatgacacaatggtttcccacatgtcatctggagtccccaccccgacaaagaggttgcagtacagtcaggacatcccaagtcatcttgccgacgagcacgctctgattgccagctacgtcgcccgcctacagcactgcgcgagggtcctcgattcccccagtcggcttgacgaggaacaccgactgattgcacgctatgccgcgcggctcgctgcggaggccggtaacgttactcgcccgccaacagaccttagctttaattttgatgcgaataagcagcagcgtcagcttatagcagagctggaaaataaaaatcgtgaaattctgcaggagatccagcgcctgcggctggagcacgaacaagccagtcagccaacacctgagaaagcccaacagaacccaacccttctggcggaattgcggctgctgaggcagaggaaggacgaactggagcagagaatgagcgccctccaggaatcccgacgcgagttaatggtacagcttgaagaactcatgaagctgctgaaggaggaggagcaaaagcaggcggctcaggccaccggctccccccatacctcgcccacccacggcggaggacgccccatgcccatgcccgtcagatccacttcggccgggagtactccgacccattgtccacaggactctctgtccggagttggcggagatgttcaggaagccttcgcccaggggacccgccgaaatctccgaaacgacttgctggtagccgccgacagcataacaaacaccatgtcttctcttgttaaggagttgcacagcgcagaggagggcgcagaagaggaagaggaaaagatgcagaatggtaaggataggggttag

SEQ ID NO: 186150 - DNA, 1704 bp, synthetic construct
  misc_feature 1..1704: note = Description of Artificial Sequence: Synthetic coding sequence
  source 1..1704: mol_type = other DNA
atgatcgaggagagcggcaacaagcggaagaccatggccgagaagcggcagctgtttatcgaaatgagagctcagaactttgacgtaatccggttatccacataccgcaccgcatgtaaattgcgatttgtgcagaagcgatgcaatctgcatttggtggatatctggaatatgatcgaggctttcagggacaacgggctcaataccttagaccacactactgagatctctgtgtcaagactggagaccgtgatctcaagcatttattatcagctgaacaaaagactgccctctactcatcagatctccgtggagcaaagcatcagcctgctcctgaattttatgattgccgcatacgatagcgaaggtcgcggcaagcttaccgtcttctccgtaaaagctatgttggcaaccatgtgcgggggtaagatgctggacaagctgcggtacgtctttagccaaatgtccgactccaatggcctgatgattttcagcaaatttgaccagttcttaaaggaggtcctcaaactgcctacagctgtgttcgaaggcccaagctttggatacacggaacactctgtgagaacttgtttcccacagcagaggaaaattatgttgaatatgttcctggacactatgatggccgatccacctccgcagtgtttagtctggttgcccttaatgcatcggctcgcgcatgtggaaaacgtatttcatcccgtcgaatgcagctactgtcggtgcgagtctatgatggggtttcgttacaggtgccagcagtgccataactaccagctctgccaaaattgtttctggcggggccatgccggcgggccccattccaatcagcaccagatgaaagagcacagtagctggaaaagccccgctaaaaagctgtctcatgcgatatcaaaatcactgggctgcgtcccaacccgagagcctcctcatcccgtgtttccggagcagcccgagaagcccctggatttggcacacattgtacctccacgtcccctgacaaatatgaacgacacaatggtatctcatatgagctccggcgtccccaccccgacaaagagcgtgctggactcaccatctagactggacgaggagcaccggcttattgcacgttatgccgccagactggctgctgaggcaggtaatgtgaccagaccccctacggacttatcgtttaacttcgacgctaataagcaacagcgtcagttgatcgctgaactggaaaataagaatcgcgagattctgcaagaaatccagagattgcggttggaacacgagcaggccagtcagccgacacctgagaaggcccagcagaatcccacactgctggccgaattgcggcttctccgccagcgcaaggatgagctggaacaaagaatgagcgctctgcaggagtcccggagagaattgatggttcaactggaagaactcatgaagcttcttaaagaagaggaacagaaacaggccgcacaggcaactggatcaccacacacatccccaacccacggggggggcaggccaatgccgatgcccgtccggagcaccagcgccggctcgacccctacccactgtcctcaggattccctttccggcgtcggcggcgacgtgcaagaagcttttgctcaggcggaggagggcgccgaagaggaagaggaaaaaatgcagaatggcaaggacagaggatag

SEQ ID NO: 186151 - DNA, 1773 bp, synthetic construct
  misc_feature 1..1773: note = Description of Artificial Sequence: Synthetic coding sequence
  source 1..1773: mol_type = other DNA
atgatcgaggagagcggcaacaagcggaagaccatggccgagaagcgccagttgtttatagaaatgcgcgcacaaaattttgatgtgattagactgtccacatatagaacggcctgcaagctcagattcgtgcagaaacgctgtaatctccacctggtagacatatggaatatgatagaggctttccgagacaacggattgaatacgttggaccacacgacggagatctccgtctcacgattggaaacagtaatatcaagcatatattaccaattgaacaagagactgccaagcacccatcaaatttccgtcgagcagagtatcagtttgcttctaaatttcatgatcgcagcctacgactcggaaggccggggaaagctcactgttttctcagttaaagcaatgctggctactatgtgtggcggtaagatgctagacaagctgaggtatgtgttctctcagatgtccgactcgaatgggctcatgatctttagcaaatttgatcagtttctgaaggaggtgctgaaactgccaaccgccgtattcgaaggcccaagtttcggctacactgaacactcggtgcggacgtgcttcccacagcagaggaagatcatgctgaacatgtttctcgataccatgatggccgaccccccaccccagtgcctggtctggctgccgcttatgcataggctggcccatgtggagaacgtcttccaccccgttgagtgttcctactgtcgctgcgaatcgatgatggggttccggtaccgttgccaacagtgtcacaactaccagctctgtcaaaattgtttctggcggggacacgccggggggcctcactccaaccagcaccagatgaaggagcacagctcctggaaatctcccgctaaaaagctgagccacgcaatctctaaatcactgggctgcgtcccaaccagggaacctccacatccggtgttcccagagcaacccgagaagcctctcgacctggctcatattgtcccaccacggccactcaccaatatgaacgatacaatggtgagccacatgtcttctggcgtgcccacccctacgaagagcgtactggactctcccagtcggctggatgaagaacacagactgattgcacgctacgccgctcgactcgccgctgaggctggaaacgtaaccaggccaccaaccgacctcagctttaatttcgacgctaataaacagcaacggcagttgattgcagaactggaaaataagaatagagaaatcctccaggagatccagcgcctgagattggagcacgagcaggcgtcccagccaacacctgaaaaagcccagcagaaccccactctcctggccgagctaagactattgcgccagcgaaaggatgagctggaacagaggatgagcgccctccaggaatcacgaagagaactgatggtccaactcgaggaactgatgaaactgctcaaggctcaggccaccgggtcacctcatacatccccaacacacggaggaggtcgccctatgcctatgcctgtgcgttctacaagcgccggatcgaccccaacacactgccctcaggacagtctgtccggcgtcggaggggatgtgcaggaggcttttgcacagggaacccgacggaatttgaggaacgatctcctggttgcagcagatagcattaccaacaccatgtcttccctcgtaaaggagttgcattcagccgaggagggagctgaggaggaggaggaaaaaatgcagaacgggaaggatcggggctag

SEQ ID NO: 186152 - DNA, 1830 bp, synthetic construct
  misc_feature 1..1830: note = Description of Artificial Sequence: Synthetic coding sequence
  source 1..1830: mol_type = other DNA
atgatcgaggagagcggcaacaagcggaagaccatggccgagaagcggcagttgttcatcgagatgcgagcccagaatttcgatgtgatccgcttgtcaacttaccgcactgcctgtaagctgaggttcgtgcaaaagcggtgcaatttgcatcttgtcgatatctggaacatgatcgaggccttccgggataacggtctgaacacactagaccacactacggagataagcgtttcaagactggagaccgtaatcagttccatttactaccagctgaacaagcggctgccgtcaacccatcagatttctgtcgaacagtcaatatcactgcttctcaatttcatgatagccgcttatgactcagagggccgcgggaaactcaccgtcttctctgtgaaagctatgttagccaccatgtgtgggggtaaaatgcttgataagctgcgctacgtattcagccaaatgtctgacagtaacgggctgatgattttttctaagttcgatcaattcctgaaggaggttctgaaactgccaacggccgtgtttgagggcccttctttcggttatacagaacatagcgtgcggacttgtttcccacaacagcggaagataatgctcaatatgttcttggataccatgatggcagatcccccaccacagtgtcttgtgtggctccccctcatgcatcgcctggcccacgtggagaacgtcttccatcctgtggaatgtagttactgtcggtgcgagtcaatgatggggttccgctataggtgccagcagtgtcacaattaccagctctgtcagaactgtttctggaggggccatgcaggagggcctcatagcaatcagcatcagatgaaggagcacagctcttggaagtcaccagccaagaaactcagtcatgccattagcaaatccctaggttgtgtgccaacgagagaaccacctcatccagtgttcccagagcaacctgaaaaaccactggatctggcccacattgtcccccctaggccactcactaatatgaacgataccatggtgtctcacatgtcttccggcgtgcccactccgactaaacgcctccaatacagccaagacattcccagccacctggcggacgagcatgccctcattgcgtcttacgtagcaagactacagcattgtgcccgagtgttggactcacctagtcgactggatgaggaacatcgcctgatcgcaaggtatgcagctcggttggcggccgaggcaggaaacgttactagaccgccgaccgacctgtcttttaacttcgatgcgaataagcagcagaggcaactcattgcggaactggaaaataagaatcgcgaaatcttacaggaaatccaacgccttagattagagcacgagcaagcctctcagcctacaccagaaaaggcccaacagaatcccaccctcttagctgagctcagactgctccgccagcgtaaggacgaacttgaacagaggatgagcgcacttcaagagagccgacgtgagctcatggtgcagttggaggagctgatgaaactgcttaaggaggaggagcagaagcaggcggcccaggcgacaggcagtccacacacgagccccacgcatggcgggggacgacctatgcctatgccagtgcgcagtacctcggcgggatccacccccacccactgcccccaggactcactcagcggcgtgggaggtgacgtgcaggaggcgttcgcccagggcacacgtcggaatctgcggaatgacctgctagtggctgctgatagcataacgaatacgatgagttcccttgtaaaggagctccactcgggatag

SEQ ID NO: 186153 - DNA, 1638 bp, synthetic construct
  misc_feature 1..1638: note = Description of Artificial Sequence: Synthetic coding sequence
  source 1..1638: mol_type = other DNA
atgatcgaggccttccgggacaacggcctgaacaccctggaccacacgaccgagatcagcgttagccggttggagactgtgattagttcgatttactaccaactgaataagaggctccctagtactcatcagatctcagtggagcagagtatctctctgctgctgaattttatgatcgcagcctacgacagcgaaggccggggaaaactgacagtcttcagcgtaaaggccatgctcgctacaatgtgtggcggcaagatgctcgataaactgcgttatgtgttttcacaaatgtccgactctaacggtctgatgattttctcaaagttcgaccaattcttaaaagaggtcctcaagctcccaactgctgtgtttgaaggtcccagtttcgggtacaccgagcattcagtccgtacctgttttccccagcagagaaaaattatgctcaatatgtttttggacacaatgatggccgatcctcctcctcagtgcctggtctggctgcccctcatgcaccggctggcccacgtagaaaacgttttccacccagtggagtgttcatactgccgatgtgaaagcatgatgggctttagatataggtgccagcagtgccacaactatcaactctgtcagaactgtttctggcgtggtcacgcggggggcccccacagcaatcagcaccaaatgaaggaacactccagctggaagtcccccgccaagaagctttctcatgctatttctaaaagtctcgggtgcgtccctaccagagagcccccacacccggtgtttccggagcagccagagaaaccgcttgacttggcgcacattgtcccacctcgccctctcaccaacatgaacgatacgatggtttcacacatgtccagcggcgttcctacgccgactaaacgactacagtactctcaggatatcccttcacatttggctgatgaacacgcgttgattgctagctacgtggctcggctccaacactgcgctcgtgtcctagacagtccatctaggctggacgaggaacaccggttgatcgcccgttacgctgcccgcctggctgctgaggctggaaatgtgactcgtcctcccaccgatctgagtttcaacttcgacgccaacaagcaacagagacaactgatagcagaactcgagaataagaatagggaaatcctccaggaaatacaacgtctccgcctggagcacgaacaggcatctcagcccaccccagaaaaagctcagcagaatcctactctgctggcagagttgcgtttgctgcgacaaaggaaagacgaactggaacaacgcatgtctgctctgcaggagtcccggcgggagttaatggtccagctggaagaactaatgaaattacttaaggcccaggctacaggatcaccacatacctctcccacccacgggggcggcagacctatgcccatgccagtgcgaagtacttctgcgggctcaaccccaactcactgccctcaggacagcctgtcaggcgttggcggggacgtccaagaagcttttgcacagggcactaggcggaatttacgcaacgatttgctcgtcgcagctgattccatcacaaatactatgtcaagccttgttaaggagctgcattctgggtag

SEQ ID NO: 186154 - DNA, 960 bp, synthetic construct
  misc_feature 1..960: note = Description of Artificial Sequence: Synthetic coding sequence
  source 1..960: mol_type = other DNA
atgaccgacgtgttcagccagatgagcgacagcaacggcctgatgatcttttcaaagttcgatcagttcctgaaagaggtgctgaaactgccgaccgctgtgttcgaagggcccagtttcgggtatacagagcacagcgtgcgtacatgctttccgcagcagagaaagatcatgctcaacatgttcctggatactatgatggctgacccacctccacaatgtctcgtctggctgcccctgatgcatagactggcgcatgtggaaaacgtcttccatcctgttgaatgctcgtactgccggtgtgaaagcatgatgggcttccgatatcgatgccagcagtgccacaactaccagttgtgccagaattgtttctggcgggggcacgctggaggcccgcattctaaccagcatcagatgaaagagcactcctcttggaagagtcccgcgaagaaactgtctcacgccatcagtaagtccctgggctgcgtgcccacccgcgagccgccccatcccgtgtttcccgagcagccagaaaagccactggacctcgcgcatattgtgcctcctcggcccctgaccaacatgaacgacacaatggtctcccatatgagctcaggcgtacctactcctacgaagagactgcagtatagccaagatatccccagtcatctggccgacgagcacgccttaatagcaagctacgtcgcgaggctccaacactgtgcgcgagtccttgatagtccgtcacggctggacgaagaacacagactcatagcccggtacgcggcacgccttgccgccgaggcaggtaatgtgacacgccctccaaccgatttgtccttcaactttgacgccaataaacagcagaggcagttaatcgcagagctcgaaaataagaatagggagattttgcaggagatccagaggctgaggctggagcacgagcaagcctcacaatag

SEQ ID NO: 186155 - DNA, 1251 bp, synthetic construct
  misc_feature 1..1251: note = Description of Artificial Sequence: Synthetic coding sequence
  source 1..1251: mol_type = other DNA
atgctgaacatgttcctggacaccatgatggccgacccccccccccaatgcctggtctggctgcctctcatgcataggctggcccatgtggagaatgttttccatccggtggaatgtagctactgccgttgcgagtcaatgatgggtttccgttacaggtgccagcaatgccacaactatcagctatgtcagaactgcttttggagaggacacgctggaggtccacactctaatcaacaccagatgaaggaacattcgagttggaagagtccggcaaagaagctatcacatgccatcagcaaaagcctggggtgcgtccctactagagagcccccccatcccgtcttccctgaacagccggagaaacccctcgacctcgctcatatcgttccaccaaggcccttgacaaatatgaatgacacaatggtgagccacatgtcttcaggggtgccgacccctactaagaggttacagtactctcaggatatccccagccacctggcagatgaacatgctctgatcgctagctatgtggcaaggctccagcactgtgcccgcgtgttggacagtccatctagactcgacgaggagcatcggctgattgcacggtatgccgctaggctggccgcagaggcaggcaatgtaacaagaccaccaactgacctgagctttaacttcgatgccaataagcaacagcggcaactgattgctgaactggagaataagaatagggaaatcctgcaagagatccagcggctgaggctggaacacgagcaggcatctcagcccacccctgaaaaagcgcagcaaaacccaaccttattagcagagctgaggctgctgcgtcagcggaaagatgaactggaacagaggatgagcgccctgcaagaatcacgcagggagttaatggtgcagctcgaggaactgatgaaattgctgaaggcacaggccaccggaagtccacatacaagccccacgcacgggggaggacggccaatgcctatgcccgttcgatcaacatccgctggatccaccccaacccactgccctcaagattccctgtctggggtgggaggggatgttcaggaagcgtttgcacagggtactcggcgaaacctgcgtaatgacttgttagtggctgcggatagcattacaaataccatgagctcattggtgaaagagttgcattcagccgaagaaggtgctgaggaagaggaagagaagatgcagaacggaaaggacagggggtag

SEQ ID NO: 186156 - DNA, 2688 bp, synthetic construct
  misc_feature 1..2688: note = Description of Artificial Sequence: Synthetic coding sequence
  source 1..2688: mol_type = other DNA
atgcggatgagcgtgggcctgagcctgctgctgcccctgagcggcagaaccttcctgctcctgctctccgttgttatggcgcagtcacattggcccagtgaaccctcggaggctgttcgagattgggaaaatcaactcgaagcctcaatgcatagtgttctgtctgacttgcacgaggcagtgcccaccgtggtgggaatccccgatgggaccgccgtcgttggccggagttttcgagtgacaattccaacagacctgatcgcgtcgagcggtgacatcataaaagtgtctgctgccggtaaggaagccttaccttcttggctccactgggactctcaatctcataccctggaggggttaccccttgacaccgacaagggagtccattatatctctgtctccgctaccaggctgggcgccaacggctctcatattcctcagacctcctccgtgttcagcatcgaggtatatccagaggatcacagtgagctgcaatcagtcaggacagcaagccctgatcccggtgaagttgtaagtagcgcctgtgcggcagatgagcctgtgaccgtgctcacagttattttggatgctgacctgacaaaaatgacccctaaacaaaggatagacctgctgcacagaatgaggagtttttccgaagtcgagctgcacaacatgaaacttgtgcccgtggtgaacaatcgactttttgacatgtccgcctttatggccggccctgggaacgccaagaaggtggttgagaacggcgccttgctgtcctggaagttgggctgcagtctgaaccagaattccgtgcccgatatccacggggtcgaggccccagcgcgtgagggagccatgtctgcccagcttggttaccccgtcgtcggatggcatatcgcaaataaaaagccgccgctgcctaagagagtccgcagacagattcacgcgactcccactcctgtcactgcaattgggccgcccactactgccatccaagagccaccatctaggatcgtcccaactccaacgtcaccggcaatcgccccgcccactgagacgatggcccccccggttagagatcctgttcctggcaagcctaccgttactatccgtacccgcggcgccattatccagactccaacattgggtcctattcagccaactagggtgtcagaggccggaacaaccgtgcccggacagatccggccgactatgacaattccaggttatgttgagccaacagcggtggcaacaccccccaccacaaccactaagaaaccccgcgttagcacccctaaacctgccactccatccacagacagcacgaccacaactacacgtaggcccacaaaaaagccccggactccccgccctgtacctagggtaacaacgaaggtttccatcacccgcctggagacagcctctccgcctactcggatcagaaccaccacatccggagtacccagaggcggggaaccgaaccagaggcccgagttaaagaaccacatcgaccgtgttgatgcatgggtgggcacatatttcgaggttaaaattccctctgacactttctacgatcacgaggatactacaaccgacaagctcaaactcaccctcaagctcagagagcagcagctagttggtgagaagagctgggttcagtttaactcaaactcccagctgatgtatggccttccggactcgagccacgtcggcaagcacgagtactttatgcacgctacagacaagggtggcctctccgctgtggacgcctttgaaattcacgtgcacagacgcccacaaggcgatcgcgccccagctcgctttaaagccaagttcgtgggtgaccctgcattggtgttgaacgacatccacaagaaaatcgctctggtaaaaaaattagccttcgcattcggcgacaggaattgtagcacgataacattacagaatattacgagggggtccatcgtagtcgagtggacaaacaacacactgccactagaaccttgtccgaaggaacagattgctggactgtccaggcggattgccgaggatgatggaaagcctcggccagcattcagcaacgccctggaacctgactttaaggccacaagcatcacagtaactgggtccggttcctgccgacatctgcagtttattcccgtggttcctcccagaagggtgcctagtgaagccccccccaccgaagtccccgaccgtgatcctgaaaagagctcggaagatgatgtttatctccacaccgtgatccctgcagtcgtcgtggccgcaatcctactgattgccggaatcatcgcgatgatctgctatcgcaaaaagcgaaagggaaaactcacactagaggaccaggccacctttattaagaagggcgtccccatcatttttgctgacgaactggatgatagtaagccccccccgtcaagcagtatgcctctgattctgcaggaggagaaagccccactgccacctcctgagtatccaaatcagtctgtccccgaaacgacacctctgaaccaggatacaatgggggagtacacccctctccgcgacgaggacccaaacgctccaccataccagccaccgcccccctttactgccccaatggaaggaaaaggcagccgcccaaaaaacatgacgccctaccggagtccacctccctacgtgcccccctag

SEQ ID NO: 186157 - DNA, 432 bp, synthetic construct
  misc_feature 1..432: note = Description of Artificial Sequence: Synthetic coding sequence
  source 1..432: mol_type = other DNA
atgacccccaagcagcggatcgacctgctgcaccggatgcggagcttcagcgaggtagaactccataacatgaagctcgtgcctgttgtgaacaacagactcttcgatatgagtgctttcatggctggccctgggaacgcaaaaaaagtcgtggaaaacggagcgcttctcagctggaagcttggctgtagcctgaatcaaaactcagttcccgacatacatggcgttgaggctcctgctcgcgagggtgcaatgtcagctcaacttggctaccctgtggtgggatggcatattgccaacaaaaagccaccagcgctgtctggccccccaaaaccccagtctagctggagagacttcggagattttttcatatttatcttttgtttgaccgcctttggcctgtttatcgaaaactcgtctttacacttttag

SEQ ID NO: 186158 - DNA, 267 bp, synthetic construct
  misc_feature 1..267: note = Description of Artificial Sequence: Synthetic coding sequence
  source 1..267: mol_type = other DNA
atgcggatgagcgtgggcctgagcctgctgctgcccctgagcggcagaacttttctccttctgctgtccgtcgtgatggcgcagtcccattggccaagcgagccatccgaagcagtaagagactgggagaaccaactggaggcctccatgcactccgtgctaagcgaccttcacgaggctgtgccaacggtcgtgggcatcccggacggtacagcagtcgtggggcggagctttcgggtcacaatcccgaccgatttgattgcttag

SEQ ID NO: 186159 - DNA, 48 bp, synthetic construct
  misc_feature 1..48: note = Description of Artificial Sequence: Synthetic coding sequence
  source 1..48: mol_type = other DNA
atgcggatgagcgtgggcctgagcctgctgctgcccctgagcggctag

SEQ ID NO: 186160 - DNA, 321 bp, synthetic construct
  misc_feature 1..321: note = Description of Artificial Sequence: Synthetic coding sequence
  source 1..321: mol_type = other DNA
atgcggatgagcgtgggcctgagcctgctgctgcccctgagcggccgcacattcctcctgctgctcagtgtggtcatggcgcaatcccactggccgtctgagccatctgaagccgtcagagattgggagaaccagctggaggcatcaatgcactccgtgctgtctgatcttcacgaagcagtgcccaccgtcgttgggatccctgatgggactgccgtggtcgggaggtctttcagggttactattcctaccgatctgattgcttccagcggggatatcattaaggttagtgcggctggcaaggaagccctacccagctag

SEQ ID NO: 186161 - DNA, 291 bp, synthetic construct
  misc_feature 1..291: note = Description of Artificial Sequence: Synthetic coding sequence
  source 1..291: mol_type = other DNA
atgcggatgagcgtgggcctgagcctgctgctgcccctgagcggccgcacttttctgctgttgttgtccgtcgtcatggcccagagtcactggcctagtgaaccttccgaggccgtccgagattgggagaatcagctagaggcatcaatgcactccgtattgagcgatttacacgaggcagtccccactgtcgtgggaatcccagacgggaccgctgtggtcggccgctccttccgcgtgaccattccgactgacttgatcgcgagtagcggagatattatcaaggtgtag

SEQ ID NO: 186162 - DNA, 30 bp, synthetic construct
  misc_feature 1..30: note = Description of Artificial Sequence: Synthetic coding sequence
  source 1..30: mol_type = other DNA
atgcggatgagcgtgggcctgagcctgtag

SEQ ID NO: 186163 - DNA, 354 bp, synthetic construct
  misc_feature 1..354: note = Description of Artificial Sequence: Synthetic coding sequence
  source 1..354: mol_type = other DNA
atgcggatgagcgtgggcctgagcctgctgctgcccctgagcggcagaacattcctgctgcttctctcagtagtcatggcccagagccattggccatctgagccatcggaggcagtgagagattgggaaaatcagctggaggcttccatgcatagtgttctgtcagaccttcatgaggcagtccccacagtcgtcgggatccccgacggtaccgcggtggtgggacggagcttccgcgtgacaatccctacggatctcattgcgagttccggcgacataattaaggtctctgccgcaggaaaggaggctctcccttcctggttacactgggacagccagtcccacaccctgtag

SEQ ID NO: 186164 - DNA, 159 bp, synthetic construct
  misc_feature 1..159: note = Description of Artificial Sequence: Synthetic coding sequence
  source 1..159: mol_type = other DNA
atgcggatgagcgtgggcctgagcctgctgctgcccctgagcggccggacgttcctgctgcttctgtctgtagtgatggcgcaatcccactggccatctgagccttctgaggcggtccgtgactgggaaaaccagctagaggccagcatgcatagctag

SEQ ID NO: 186165 - DNA, 261 bp, synthetic construct
  misc_feature 1..261: note = Description of Artificial Sequence: Synthetic coding sequence
  source 1..261: mol_type = other DNA
atgcggatgagcgtgggcctgagcctgctgctgcccctgagcggccggacgttcctgctgttactttctgtggtgatggcacaatcacattggccatccgaaccaagcgaagccgtgcgggattgggaaaaccaacttgaagcctccatgcacagcgttctctccgatctgcatgaagccgtgcccacggtggtagggatccctgacgggaccgcggttgttggtcggagcttccgagtgaccatccccaccgatttatag

SEQ ID NO: 186166 - DNA, 126 bp, synthetic construct
  misc_feature 1..126: note = Description of Artificial Sequence: Synthetic coding sequence
  source 1..126: mol_type = other DNA
atgcggatgagcgtgggcctgagcctgctgctgcccctgagcggccgaacttttctcctgctcctgagtgtcgtcatggcccaatctcattggccatctgagccgtcagaggcagtgagggattag

SEQ ID NO: 186167 - DNA, 2688 bp, synthetic construct
  misc_feature 1..2688: note = Description of Artificial Sequence: Synthetic coding sequence
  source 1..2688: mol_type = other DNA
atgcggatgagcgtgggcctgagcctgctgctgcccctgagcggcagaacttttctactgctgctgagtgtggtgatggcacaaagtcactggcccagtgagccctcagaagccgttcgcgactgggagaaccaactggaagccagtatgcacagcgttctgtcagacctgcacgaggcagtcccgaccgtggtcggcattcctgatggcacagccgtagtggggcgatcatttagagtgaccataccgactgacctaatagcttcttccggggatatcatcaaagtgtccgcagcaggaaaagaggccctgccgtcttggctgcattgggacagccagtctcacactttggagggcctgcctttggatacagacaagggggtgcactacatttctgtgtccgccacccgcttaggagcaaatggttcacatataccacaaacctcttcagtgttttctattgaagtgtacccggaagatcactcagaactacagtccgtaaggacagcatcccccgatccaggcgaagttgtgagtagtgcctgcgccgccgacgaacccgtaactgtcctgaccgtgatcctggacgcagacttgactaaaatgactcccaaacagcggatcgacctgctccacaggatgcgctccttcagcgaagtcgagctgcacaacatgaagctggtcccagtcgtaaataatcgattgttcgacatgtccgcctttatggccggtcccggaaatgcaaagaaagtcgtggagaacggcgccctgctgtcgtggaagctggggtgctcgctcaaccaaaacagtgtcccagacatacacggcgtcgaggcccctgcacgagaaggcgctatgagcgcacagttggggtaccctgtggtggggtggcacatagctaataagaagcctcctctgcccaaacgcgtgagaaggcagatccacgctaccccgacgccagtcacagctatcgggcctcccaccacagctatccaagagccaccctcaagaatcgttcccacccctacgtcccccgccattgcccccccaaccgaaacaatggcaccgcctgtgcgcgatcccgtgcctggcaaacctaccgtgaccatcaggacacggggcgctattattcagaccccaactctcggccccattcagcctacccgcgtgtctgaggccgggacaactgtccctggccagatccgcccaaccatgaccattcccgggtatgttgagcccactgcagttgcaactcctcctactactaccactaaaaagccgcgcgtgtccacgccaaaacccgcgacgccctctacagactccactaccaccacaacccgaaggcccacgaaaaagcccaggaccccgcgacctgtcccgagggttacaacgaaagtttcaataacgaggctcgaaaccgcgtcacctccaacccggattcggacaactacctccggcgtaccgagagggggtgagccaaaccagcgaccggagctgaaaaaccacatcgatagggtcgacgcctgggtgggcacttacttcgaagtgaaaatacctagcgataccttttacgaccatgaggacactactaccgacaagttgaagctcacccttaaactgagggaacagcaactagttggggagaagtcttgggtgcaatttaactcaaactctcagctcatgtatggtctccctgattcctcccacgttggaaagcacgaatattttatgcatgctacagacaagggaggcctttccgcggtggatgctttcgagatccacgttcaccgacgaccccaaggagaccgggcccctgcccgtttcaaggccaaatttgtgggagacccagccttggtcctcaacgacattcacaaaaagatcgccctggtcaaaaaactggccttcgcatttggagatcgcaactgctcaacaattactcttcagaatatcactcgaggtagcatcgtggtggaatggacaaacaacaccctgcccttagagccctgccctaaagagcagatcgccggcctctcacgtaggatcgccgaggacgatggcaaacctaggcctgcattttccaatgccttagagccagatttcaaggccacctccatcacggtgaccggatcagggtcctgccgacacctccagtttatccccgtcgtgccaccccgccgtgttcctagtgaggccccgccaacagaagtgcctgacagggatcccgaaaagagcagcgaagacgatgtgtatctccatacagtgatacctgccgtggtggtcgccgccatcttacttatcgccggcatcatcgctatgatatgttacaggaaaaagagaaagggaaagttgaccttggaggaccaagctaccttcattaaaaagggagttccaatcatctttgccgacgagctggatgacagcaagccccccccaagctcaagcatgcctctcattttgcaggaggaaaaggcacctctgcctcccccagaatacccaaaccagtccgttcccgaaacaaccccactgaaccaagacacgatgggcgagtacacccccctgcgcgacgaagacccaaatgccccaccatatcaaccacctcccccattcacagcgcctatggagggtaaaggatcccgtcccaagaatatgaccccttaccggagtcccccaccttatgtccccccctag

SEQ ID NO: 186168 - DNA, 2688 bp, synthetic construct
  misc_feature 1..2688: note = Description of Artificial Sequence: Synthetic coding sequence
  source 1..2688: mol_type = other DNA
atgcggatgagcgtgggcctgagcctgctgctgcccctgagcggccgcacattcctcctgctcctgtccgttgtcatggcacagtctcattggcccagcgagccaagcgaggcagtcagagactgggaaaatcaattggaggcgtccatgcattctgttctgagcgatctgcatgaggccgtgcctactgtggtcgggatcccagacggcacagctgtggtaggacgctctttccgggtcaccatccccacggacctcattgcctctagtggtgacattatcaaggtatccgccgcgggaaaggaggcacttccttcctggctccactgggatagccagtcacataccttagagggactgcctttggacaccgacaagggagttcattatatcagtgtatcggccactagactgggagccaacggctctcacattccacagacaagttctgtgttctcaatcgaggtgtatcctgaggatcacagtgagttgcaatccgtccgtacagcctccccagatcccggcgaagtcgtgtctagtgcctgtgcagccgacgaacccgtcacagtactgactgttattcttgatgcagacttgaccaagatgacacccaaacagagaatagacctactgcatagaatgagaagtttcagcgaagtcgagctccataatatgaaactggtgccggtggtgaataaccgactgttcgatatgtctgccttcatggccggcccgggaaacgcaaagaaagtggttgagaatggcgccctgctgtcctggaagttgggatgcagtcttaaccagaatagcgtccctgatatacacggagttgaagccccagcccgggagggagccatgtcagctcaactgggctacccagtcgtgggatggcatatcgccaataagaagccccccctgcccaagagagtcaggcggcagattcatgccacaccgacacctgtcacggcaataggtccccccacgacagccatccaggagccgcctagtcgaattgtccccacaccaacatctcctgccattgctccgccgactgaaacaatggccccgccagttcgggatcccgtcccaggcaagccaacagtgacaatcaggacccggggcgctatcatccagactcccactttgggaccaatccagcccactcgtgtcagcgaagccggcacaacagtccctggtcagattaggccaactatgaccatacctgggtacgtagagccaactgccgtagcaactcctccaacaacaacaacaaaaaagccacgggtttccacccccaaacctgcaaccccatctacagactcgacaaccactaccacccggaggcccacaaagaaaccccgaaccccacgccctgtccctcgggtgaccactaaagtcagcataaccagattggaaacggcctcacctcccacacgtatcagaaccacgaccagcggagtcccacgcggcggcgaaccaaatcaacgccccgaactcaaaaatcacatcgatagagtggacgcatgggtcggtacatacttcgaggtgaagattccatctgatactttttacgatcatgaggacacgaccactgacaagttgaagcttacactgaaactgcgagagcaacagttggtgggggagaaatcatgggtccagttcaactctaactcccagctcatgtatggtctgcccgacagctcacacgtgggcaagcacgaatatttcatgcatgccacagacaagggaggtctgtccgcagtggatgctttcgagatccatgttcacaggaggccccaaggcgaccgggctcccgcccgctttaaggctaagttcgtgggggatccggcccttgtgctgaacgatatccacaaaaagatagcacttgtgaagaaattggccttcgcattcggggacagaaattgcagtaccatcaccctgcagaacattactcggggctctattgtggtggagtggaccaacaacaccttgcctctcgagccttgccccaaggagcaaattgcaggtcttagtcgccgcattgccgaagacgacgggaaacctagacctgccttttccaatgcgctcgagcccgattttaaagctacaagtattacagtaacgggctctgggtcctgcaggcatctgcagtttatacccgtggttcctcccagaagggttcctagcgaggcaccccccactgaggttccagatagagaccccgagaagagtagtgaggacgacgtctacctgcacactgtcatacctgcagtcgtggtggccgctatactgctgatcgccggaatcattgcaatgatctgttaccgcaagaagagaaaaggaaaactaacgctggaggatcaggctacattcatcaagaaaggagtgcccataatctttgcagacgaactggacgactccaaaccccccccctcctcctcaatgcccctcattctgcaggaggaaaaggcacctctgcctcctcctgagtaccccaatcagtctgtgccagaaacaacccctctgaatcaggacaccatgggagagtatactccactcagggacgaagaccctaatgcccccccataccagccaccccctcccttcaccgcgcctatggagggcaagggatcgaggcctaagaatatgaccccatatagaagtccaccgccttacgtgcccccctag

SEQ ID NO: 186169 - DNA, 2688 bp, synthetic construct
  misc_feature 1..2688: note = Description of Artificial Sequence: Synthetic coding sequence
  source 1..2688: mol_type = other DNA
atgcggatgagcgtgggcctgagcctgctgctgcccctgagcggccgtacatttctgctgctgctctccgtggtcatggcacagtctcattggccatccgagccctccgaagcagtacgtgactgggagaatcagctggaggcatccatgcattctgtcttgagtgatctccacgaagcggtgcctaccgtggttggcatcccggacggcaccgccgtggtcggtcggagctttcgggtcaccataccaaccgatcttattgccagctctggggacattattaaggtctcagcagccggcaaagaggccctcccttcttggctgcactgggactctcaatctcacactctggagggcctgccgttggacacagacaaaggggtacattatattagcgtcagcgctacaagactcggggccaatggttctcacatcccccagacatcttctgtgttctctatagaggtgtatcctgaagaccacagcgaactccagagcgtaaggactgcatctcctgatcctggcgaggttgtgagtagcgcatgcgccgcggacgagcccgttacagtgctcacggtgattttagatgcagacttgaccaagatgacgcctaagcagagaattgacctgctccacagaatgcgtagtttcagcgaagtggaactacataatatgaagctggtgccagtggtgaacaacaggctgttcgacatgtccgccttcatggcaggaccagggaatgccaaaaaagtcgtggagaacggggccctgctctcttggaagcttggctgttctttgaaccaaaattctgtcccagacatccacggcgtcgaggcaccggcaagggagggtgccatgtctgcgcaattgggataccccgtcgtgggttggcatatcgccaacaagaaacctcctttgccaaagagggtgcgccggcagattcatgccacgccaaccccagtcacagccatcggacctcccaccaccgccattcaggaaccaccgtctagaattgtacccaccccaacatcacccgccatcgcccctccaaccgagacaatggctcctcctgtcagagatcccgttccaggcaaaccaacggtaacaattcgaacccgcggagccatcattcagacacccactctcggcccgattcaacccacacgcgtgtcagaggccggcaccacggtcccagggcagatccgtccaaccatgacgatcccaggctatgtggaacccacagcggtagctacacctcccacaactacgacaaaaaagccacgggtatctacgcctaaaccagctactcctagcacagattccaccaccacaactactcggagacccaccaaaaagccccggacaccaagacctgttccgagggtgacaaccaaggttagtatcactcggctggagaccgccagcccccccacaaggattcggactaccactagcggtgttccaagaggaggcgagccaaatcagcgtccggaacttaagaatcacatcgacagggtcgatgcatgggtgggaacttacttcgaggtgaaaattccgagtgacactttctatgaccatgaagacacgacaacggacaaattgaaactcactctaaagctgagagaacagcaactggtgggagagaaaagctgggtgcagttcaatagcaacagccagttgatgtacggtctcccggatagttctcatgtgggtaaacatgaatactttatgcatgctaccgataagggagggctgagcgccgtggatgcattcgagatccacgtgcacagacggcctcagggagaccgcgctccagcacgatttaaggctaagtttgtaggtgatcccgcactggtgctgaatgacatccacaagaaaatagccttagttaagaagctggcatttgcttttggagatcggaattgctccacaattacactccaaaatatcacgcggggaagtatcgtggtcgagtggaccaataatacgctccccctggagccgtgcccgaaggagcaaattgccggattgtcacggcgcatcgccgaggatgacggtaagccacgacctgccttttctaacgccttagagccagactttaaggctactagtattacagtcacaggatctgggtcatgtcggcaccttcagttcatccccgttgtccccccccggagggttccgtccgaagctccacctactgaggtccctgaccgcgacccagagaaaagctccgaagacgacgtttacttgcataccgtaattcccgccgtagtcgtagcagccatcctgctcattgccggcatcattgctatgatctgttaccgtaagaaacggaaggggaagctaaccttggaggaccaggcgaccttcattaagaaaggggtaccaataatcttcgccgacgagctggacgacagcaaaccaccaccatccagctccatgcccctgatcctacaggaagagaaggccccgctgccccctcccgaatatcccaaccagtctgtcccggaaactacaccattgaaccaggataccatgggggaatatacccctctgcgggatgaagatccaaacgctccaccttaccagcccccaccgccgttcaccgctcccatggagggcaaaggcagccgtcctaaaaacatgaccccctaccgaagcccaccgccctacgtaccaccatag

SEQ ID NO: 186170 - DNA, 2688 bp, synthetic construct
  misc_feature 1..2688: note = Description of Artificial Sequence: Synthetic coding sequence
  source 1..2688: mol_type = other DNA
atgcggatgagcgtgggcctgagcctgctgctgcccctgagcggccgcacatttttgctgctccttagtgtggttatggcccagtctcactggccctctgagccgagtgaagccgtccgcgactgggaaaaccagctggaggcatccatgcattcggtgctctcagacttacacgaggcagtgccaactgtggtgggcattcctgatggcacagccgtggtgggccgctctttccgcgttacaattcccacagacttgatcgcttcttctggagacattattaaagtgagcgctgcaggcaaagaagcgctgccttcctggttgcactgggactcacagtcgcacaccctggagggtttacctcttgacaccgacaaaggagtccactacatctccgtttccgcaaccaggctcggagcgaatgggagccatatcccacagacgagtagcgtgtttagcatcgaagtatatccggaggaccattcagagcttcagagtgtgcgcactgcctctccggatcccggggaagtagtcagctccgcatgtgccgccgatgaaccagttacggttcttacagtcatcttagatgctgacctaactaagatgaccccaaagcagagaatcgacttattgcatcggatgcgaagctttagcgaagttgagctccacaatatgaagttggtgccagtggttaacaatagactgttcgacatgtccgctttcatggccgggccaggcaacgccaagaaagttgttgagaacggcgcattgctgtcatggaagctggggtgttccctgaatcagaattctgtgcctgatattcatggtgtagaggcaccagctcgtgaaggagctatgagtgctcaattgggctatcctgtcgtgggctggcacatcgcaaacaaaaaaccccctctgcctaagcgtgtgagaaggcagattcatgccactcccactcccgtgactgctattggcccgcctaccacagcgatccaggagcctccatctcgcatcgtgccaactccaacgtcacccgccattgctcccccaaccgagacaatggcccctcctgtgagagacccggtgcctgggaaaccaactgtgactattaggaccaggggcgctatcatccagacccctacactgggacctattcaacccaccagggtttctgaggcgggcaccacggtgcctgggcaaattaggccgaccatgactattcccggatacgtggagccgacggccgtggctacacctccgaccacaactactaaaaaaccacgagtaagtactccaaaacccgctacccctagcactgattccaccacgactaccacaaggcgccctacaaagaagccccggacacccaggccagtgccacgggttacaaccaaagttagcattacaagactcgagactgcctcgcctccgacgcgcatccggacaacgaccagcggggttcccagaggtggggagccaaatcagagaccggaattgaagaaccatattgaccgcgtggatgcatgggtgggaacgtattttgaggtgaagataccttctgataccttctacgaccacgaggatactacaactgacaagctaaaactgaccctgaagttacgcgagcagcaacttgttggggagaagtcttgggtacaattcaattcaaattctcagctgatgtatggcctgcccgatagttcgcacgtgggcaaacacgagtactttatgcatgctactgacaaggggggcctcagcgccgtcgacgcattcgagatccacgtccatcggcgaccgcagggtgatcgcgcgcctgctaggttcaaagccaaattcgtcggtgacccagcccttgtattgaacgatatccacaagaagatcgcattagtgaaaaaactggcctttgcattcggggatcggaattgcagcacaataaccctgcaaaatatcacccggggctctatcgttgtggagtggacaaataatacccttccacttgaaccatgcccgaaagaacagatcgccggtcttagtcgcaggatagcagaggatgatggtaaaccccgccccgcttttagcaacgccttggaacctgacttcaaggccacgagcatcactgtgaccggatcagggtcatgtaggcatcttcagttcatccctgtggtgcccccacggcgcgtacctagtgaggctcccccaactgaagtgccagatcgggaccctgaaaagtcatctgaggatgacgtatatttgcacaccgttatcccagcagtagtggtggccgctatattgcttatagctggcattatcgctatgatctgctacaggaaaaagcgcaagggtaaactgactttggaagatcaggcgacatttattaagaaaggagtgcccatcatatttgcagatgagctcgacgattcaaagccaccccctagctcaagcatgccactaatcctccaggaggagaaggccccactgcctccccctgaatatccaaaccagtcagtccctgaaactacacctctgaatcaggacacaatgggtgaatacaccccactgcgagacgaggatccgaatgcccccccatatcagcccccccctccattcactgctccaatggagggcaagggcagccggcccaagaatatgacaccctatagatcaccacctccttacgtgccgccatag

SEQ ID NO: 186171 - DNA, 2688 bp, synthetic construct
  misc_feature 1..2688: note = Description of Artificial Sequence: Synthetic coding sequence
  source 1..2688: mol_type = other DNA
atgcggatgagcgtgggcctgagcctgctgctgcccctgagcggcaggactttcttgctgttgctatcagtggtgatggcacaatcccattggccatctgaacccagcgaggctgttcgcgactgggagaatcaactggaggcctccatgcatagcgtactcagtgatcttcacgaggctgtaccgacagtggtgggcattcctgatgggacggcagttgtgggaagatccttcagagtgactatccccacagacctgattgcctcaagcggcgacatcataaaagtctcagcagcaggtaaggaagccctgccgtcttggctgcattgggattcacagagccacaccctggaaggacttccactggatactgataaaggtgtacactacattagcgtgtccgccacgagacttggcgcgaacggctcccacataccacagacctcttccgtgttctccattgaagtgtaccccgaagaccatagtgaactccagagcgtccggacagcatctccagatcccggggaagtcgtgtcatctgcatgcgccgccgatgaacccgtgaccgtgcttacagtgattcttgacgctgacctcacgaaaatgacacccaagcagcggatagacctgcttcataggatgcgctccttttctgaggtggagttgcataacatgaaactagttccggtagtcaacaatcggctgttcgatatgtcagcttttatggctggacctggaaacgccaaaaaagtggtcgagaatggggccctcttgagctggaagttaggctgcagccttaatcagaactcggtaccagacattcacggggtcgaggccccagcccgcgagggagctatgtctgcccagctaggttatcctgtcgtgggatggcacattgcgaataaaaaaccacccttaccaaagcgggttcggcgacagattcatgccacacccacacccgtgaccgctataggccctccgactactgctatccaggagcccccgtcaaggatcgtgccaaccccgacttctccagcgatcgcacctcctacggaaactatggcacctcctgtgcgtgatccagtccccgggaaacccaccgtgaccatcaggactcggggggctatcatccagacccctactttgggacctatccagcctacaagagtgtcagaagccggaacaacggttccaggtcagatacgtccaaccatgacaatccctggttatgtcgagcctacagctgtggcaacaccgcccacaactacaactaagaaacccagagtgtcaactcctaaacccgccacacccagcactgattccacaaccacaactactaggaggccaaccaaaaaaccacggacaccacggccggttcccagagtgacaaccaaggtgtccataaccagactggagactgcaagccctcccactaggatccggacaacgacaagtggagtgcctcgaggaggcgagcccaatcaacgacctgagttaaagaaccatattgatagagtggacgcttgggtcggtacatatttcgaggttaagatccctagcgacactttttacgaccacgaagacacgacaactgacaagcttaaacttacactcaaactgcgagagcagcagttagtgggagagaaaagttgggtacagtttaactcaaatagccagttaatgtatggactccccgactcaagccacgtaggcaagcatgagtactttatgcatgcgacagataaagggggactttccgcggtggatgccttcgagatccacgtccataggcgccctcaaggcgaccgggctcccgctaggtttaaagctaagttcgttggggatccagcactggttcttaacgacatccacaaaaagatcgcactggtcaaaaagctcgcatttgcttttggcgaccggaattgcagcacaatcaccttgcagaacattacacgcggatctatagtggtcgaatggaccaacaacacattaccgctggaaccatgtccaaaggaacagatcgcaggactctcccgtagaatagcagaggatgatggaaaacctcgcccagcattctcaaatgctttggagccagatttcaaggcaacgagcattactgtgaccgggagcggctcctgtcgtcatcttcagtttattccagtggtgccaccacgtagagtgccatctgaggctccacccacggaagtgcccgatcgagatccagagaagagctcggaggatgacgtgtacctgcatacggtgatccctgcggtggtggtggccgccatcctactcattgctggcataatcgccatgatatgttatcgcaagaagcgaaagggtaagctgacactggaggaccaggccacttttatcaaaaagggcgtcccaataatttttgccgacgagctcgacgatagcaagccacccccctcctctagcatgccactgatacttcaggaggagaaagcacccttgccccctcccgagtaccccaatcagagtgtgcctgagaccacccccttaaatcaggataccatgggtgagtatacaccactgcgggatgaggatcctaacgctcctccgtatcagcctcccccgccattcaccgccccgatggaagggaaagggtccaggccaaaaaacatgactccctaccgcagtccacctccctatgtgcctccatag

SEQ ID NO: 186172 - DNA, 2025 bp, synthetic construct
  misc_feature 1..2025: note = Description of Artificial Sequence: Synthetic coding sequence
  source 1..2025: mol_type = other DNA
atggccgccggcggcgccgagggcggcagcggccccggcgccgccatgggcgattgtgccgagatcaaaagccaatttcggactcgggagggcttctacaaactgctccctggggacggagccgcaagaaggtctgggcctgcctccgctcagaccccagtcccaccacagcccccgcagcctccccctggcccagcgtctgcttccgggccaggcgctgctggacccgcctcttcgcctcccccggcggggccaggcccaggacctgcacttccagctgtcagactgtccctggttcggcttggcgagcctgactctgccggagccggggagccgcccgctacccccgcaggcctcggctcagggggcgaccgggtctgctttaacctgggccgcgagctctatttttatccgggctgctgccgaagaggctcccagaggtctatcgacctgaacaaaccaatcgataaaagaatctacaaaggaacgcagccgacctgtcatgacttcaaccaatttacagcagctacagaaacaatcagcctactggtcggattttcagccggacaagtgcagtatctagatctgataaaaaaggacacatcaaagctcttcaatgaggagcgcttgatagacaaaactaaagtgacctacctgaaatggctccccgagagcgaaagcctgttcctggcgtcacatgcctctggtcacctgtacctctacaatgttagccacccttgtgcgtccgcgcccccgcaatactctctcttaaagcagggggaaggattctcagtttacgcagccaaatcgaaggcaccgcgcaaccccctggccaagtgggcagtgggggaaggaccactgaatgaatttgccttttctccggacggccggcacctggcttgcgtcagtcaggacggctgccttagggtctttcactttgattccatgcttctgagagggttaatgaagtcttacttcggtggactcctgtgcgtgtgttggagccctgatggcaggtacgttgtgaccggcggggaggacgacctggtgactgtgtggagttttaccgagggcagggtggttgcacgggggcacgggcataagtcctgggtgaatgccgtggccttcgatccttacaccactagggcggaagaggccgcaaccgccgccggagcggatggcgagcggagcggcgaggaggaagaggaagagccagaagctgctggcaccggcagtgctggtggtgcgccactgagccctctccctaaagcggggagcatcacatataggttcgggtccgccggccaggatacccagttctgtctgtgggatcttacagaggatgtgctgtaccctcatccccccctcgcgcgcacacgaaccttacccggaaccccaggcaccacccctcccgcggcatcttcctcccggggaggggagccagggcctggaccactccctaggtccctctctcgctcaaacagtctgccgcaccccgctggcgggggcaaggccggaggccctggagtggcagctgaacccggaacccctttcagcattggacgattcgcaacgctcaccctccaagaacgacgcgacagaggagcggagaaggaacacaagaggtaccactccctgggaaatatatcccgcgggggaagcggagggtccggctctggcggggagaaaccctcaggacctgtaccacgatcacgcctcgaccccgcaaaggtgctcggaaccgccttatgtccacgaatacacgaggtgccactgctggaaccactagtttgcaagaagatcgcacaggagagactgaccgtgctgttatttctggaggattgtatcatcacagcctgccaggaggggttgatctgcacctgggcaagaccgggtaaggcattcactgatgaggagaccgaggcgcagacaggcgagggatcttggccaaggtcaccatccaaaagtgttgttgagggcatatcctcacagccaggcaattcaccttcaggtaccgtggtttag

SEQ ID NO: 186173 - DNA, 1890 bp, synthetic construct
  misc_feature 1..1890: note = Description of Artificial Sequence: Synthetic coding sequence
  source 1..1890: mol_type = other DNA
atgagcgccgaggtgcggctgcggcggctgcagcagctggtgctggaccctgggttcctgggtttagaaccactgttggacttattgctgggcgtccaccaagagcttggagccagcgagctggcgcaggataagtatgtggccgactttctgcaatgggcagaacctatcgtcgtgcgattaaaggaagtgcgactgcagagagatgactttgagatcctgaaggtgattggaaggggcgccttctccgaggtggctgtcgtgaaaatgaaacagactggccaggtgtacgctatgaagattatgaacaaatgggatatgttgaagagaggtgaagtcagctgcttcagggaggagagggatgtgttagtgaatggggacagaaggtggattacacaactgcacttcgctttccaggacgagaattacctgtatctggtgatggaatactatgtgggtggcgacttgctcactttactgtctaagttcggagagcgaattcctgccgaaatggcacgcttctaccttgccgaaatagttatggcaatcgattctgtacaccgactgggttacgtgcatcgggacatcaaaccagacaatatcctactggatagatgtggccatataagactcgcggacttcgggagctgcttaaagctccgggctgatggcacagtgaggtctctcgtcgccgtgggtacacccgactatctgagtccagagattcttcaggctgtcggaggggggcccggcactggctcttacggccccgaatgcgattggtgggctctgggtgtgttcgcgtatgagatgttttatggccaaactcctttttacgctgactcaaccgccgagacgtacggtaagattgtgcattacaaggagcacctatcattgcctttagttgatgagggggtcccggaggaagccagagattttatccaacgactgctgtgtcccccagagacccgactggggcggggaggagcaggcgatttccggacacaccctttcttctttggacttgactgggacggcctgagagacagtgttccaccctttacccccgacttcgaaggcgccaccgatacatgtaacttcgatctggtggaggatggactgactgctatggtgtccggcggaggagagaccctgtcagatatccgcgagggcgcacctcttggcgtgcatctcccttttgtggggtactcgtactcttgtatggctctcagagattctgaggtacccggacctactcctatggagctcgaggcagagcaactccttgaaccacacgtgcaggcaccctctctggaaccttcagtgagcccacaggatgaaacagcagaagttgctgtcccggccgccgtcccagccgccgaggcagaggctgaagttacccttcgggagctgcaggaggctctggaagaagaggtcctcacccggcaatccctctctcgggaaatggaagccatcaggactgataatcaaaattttgcttctcaactgcgggaggccgaagctcgtaaccgtgatctggaggcccatgtgcgccagctacaagagcggatggagttattgcaggcggagggagcaaccgctgtaaccggcgtgccgtcaccccgagcaaccgacccacctagtcatttggacggccccccagctgtggctgtgggtcagtgccccctggtaggtcccggcccgatgcaccgccgccatctgcttctgccagccagagttccacgacctggactgtctgaggccctgtctcttctccttttcgccgtggttcttagcagagccgcagctctaggctgtatcggacttgttgcccacgcagggcagctgactgccgtgtggcgtaggcccggagctgctcgagcgccatag

SEQ ID NO: 186174 - DNA, 1968 bp, synthetic construct
  misc_feature 1..1968: note = Description of Artificial Sequence: Synthetic coding sequence
  source 1..1968: mol_type = other DNA
atggtgctgcccgtgcagcacgtgagccggggcgccgccgaggccgcccctgcggccggtgttggtcctggactgcctggagctggtgcccctgcccgaccctcccctggacgccctcctggagccggtcgccttagaacaggtccggggcaggtgcgcggtcggcttctcgcagtcggccccaaatcaagagtgtttcaaagtgtggtacaagagccacctgccagcgaatcaagagccgagcccatcgtagtccggctgaaggaagtcaggctgcagcgggacgatttcgagattttgaaagtgatcggaagaggtgcatttagcgaggtggccgtggtaaaaatgaaacagacagggcaagtatacgctatgaaaatcatgaataagtgggatatgttgaaacgcggcgaagtgtcatgttttcgcgaagaaagggacgtccttgttaatggagataggcggtggatcacccaactccactttgcctttcaggacgagaattacctgtatctggtcatggagtactatgtgggcggtgacctcctcaccctgctaagcaaattcggcgagagaatacccgcggaaatggcccgcttctatctcgccgagattgtcatggccatcgattccgtgcataggttggggtacgttcaccgggatattaaaccagacaatattctgctcgaccgctgtgggcatattcggctggcagacttcggctcttgtctgaagttgagagccgacggcaccgtgcgttcactggtggccgtgggaacgccagattatttgtctccagagatattacaggccgtcggcggcggcccaggcactggctcctacggccctgagtgcgactggtgggcattgggggtgttcgcctatgaaatgttttatggccagacgccattttacgctgattccaccgccgaaacctacgggaaaatcgtgcactataaagaacatcttagcttaccactggtggacgagggagtccccgaagaggctcgcgatttcatccagcgcctcctgtgcccccctgaaactcgtctcggacgtggaggcgccggtgactttcgaacacacccctttttttttgggttagattgggacgggttacgggattctgtgccaccattcactccagatttcgaaggagctaccgacacttgcaatttcgatctggtggaggacgggctcaccgcaatggtgagcggcgggggtgagaccctatcagatatccgggagggtgcccctctgggagtccaccttccctttgttggctatagctacagttgcatggccctgcgcgactctgaggttccgggtcctactcccatggaactggaggcagaacagctgctggagccgcatgtgcaggcaccttccctggagccctccgtttcaccgcaggatgaaacagccgaggtggcagtccccgcggctgtgccggcagcagaggctgaggcagaggtaacactgcgtgagctccaagaagccctcgaagaggaggtcctgacgaggcagagcttaagtagagaaatggaggctatacggacggataatcaaaattttgcatcgcaactgcgcgaggcggaggcaagaaatagggatctggaggcacatgtgaggcagttacaggagcgaatggaactgctgcaggctgagggcgcaacggcagtgacgggggtccctagtccccgggcaactgaccccccgtcacaccttgatggtccccccgccgtcgctgtggggcagtgtcccctggtcggtcctgggcctatgcaccgccgacatctattactacccgctagagtccctaggcccggactgtccgaagcactgagcctgcttttattcgcggtagtcctgtctcgcgctgccgctctgggctgtataggtctggtggcccacgcagggcagctcaccgcagtgtggcggcgaccaggggccgcccgagccccttag

SEQ ID NO: 186175 - DNA, 1920 bp, synthetic construct
  misc_feature 1..1920: note = Description of Artificial Sequence: Synthetic coding sequence
  source 1..1920: mol_type = other DNA
atgggcggccacttctggccccccgagccctacaccgtgttcatgtgggggagcccgtgggaagccgattctcctcgcgttaagttgagaggacgggagaaggggagacagacagagggcggtgcctttcctttggtgtcctctgctctgtccggggacccaaggtttttcagcccaaccaccccccccgccgaaccgatcgtggttaggctcaaagaggtgcgacttcagagggacgattttgaaatcctcaaggtaatcggccggggagccttcagcgaggtggcggttgtgaaaatgaagcaaacgggacaggtctacgccatgaaaattatgaataaatgggacatgctgaaaagaggggaggtcagctgcttcagagaagagcgcgatgtcctagttaatggagacaggaggtggattactcaactgcacttcgcttttcaggacgaaaactatctttatctggtgatggaatattacgttggaggggatctgctgacactgcttagcaaattcggggagagaatcccggccgaaatggctaggttttacctggctgaaatcgtcatggccatcgactcggttcatcgcctcgggtatgtgcatagagatatcaagccagacaacatcctgctcgaccgctgcggacatattcgtctcgccgatttcggttcatgtctcaagttgcgcgccgatggaactgttcggagtctagtggctgtgggcaccccagattacctttctccggagattcttcaggctgtggggggaggaccaggaacaggctcctatggccctgagtgtgactggtgggccctgggggtatttgcgtacgagatgttctacggccaaacccctttttatgcggacagcacggcagagacctacgggaagatagtgcattacaaggaacacctcagtcttccacttgtagacgaaggcgtgcccgaggaggcccgcgacttcatacagagactcctgtgtccgcccgaaactcgcctcgggaggggtggcgcgggcgatttccgcacccatccatttttcttcgggctggattgggacggcctgagagactcagtccctcctttcacccctgattttgaaggtgcaactgatacttgcaactttgatctggttgaggatggacttaccgctatggtgagtggcggaggtgagacactcagtgatattcgcgagggtgcaccattgggagtacatctacctttcgtgggatattcctacagttgcatggccctgagagacagtgaagtgcccggacccacacccatggaactggaagctgagcagctgctcgagccacacgtgcaggctccatcactcgagccttcggtgtcaccccaggacgaaacagccgaagtggcggtccccgctgccgttccagctgcagaggctgaggccgaggtcacattgcgagagctgcaagaggcactcgaagaggaggtgctgacaagacaatccctgagtcgagagatggaggcaataaggaccgataatcagaactttgcctcacaattacgcgaggctgaggcacggaaccgcgatctggaagctcatgttaggcagttacaggagagaatggaattgttacaggccgaaggcgccacagccgttactggcgtgccatccccgagggccaccgaccctccctctcacctggacggtccccccgctgttgctgtgggccaatgtccacttgtgggccccgggcctatgcataggagacacctcttactgcctgcccgggttccaagacctgggttgagtgaagccctctccttgctgcttttcgccgtcgtcctatccagggcggccgccctgggctgcatcgggctggtggcccatgcaggccagctcaccgcagtgtggaggaggccaggggcggctagagctccttag

SEQ ID NO: 186176 - DNA, 1830 bp, synthetic construct
  misc_feature 1..1830: note = Description of Artificial Sequence: Synthetic coding sequence
  source 1..1830: mol_type = other DNA
atgggcggccacttctggccccccgagccctacaccgtgttcatgtggggctcaccttgggaggcagactcgcccagagtcaagctgagaggtagagagaagggccggcagactgaggggggagcttttcctctcgtcagctcagctcttagcggggatccaaggtttttttcgccaactacccctcctgccgaacccatcgtcgtaaggctgaaagaggttaggctgcagagagacgatttcgagattctgaaggtgattggtagaggggcttttagcgaggtcgctgttgtcaagatgaaacagacaggccaggtgtacgcaatgaaaataatgaataaatgggatatgctgaagcgcggagaggtgagctgttttagagaggagcgggacgtcttggttaacggggaccgccggtggatcacacagttgcacttcgcttttcaggatgaaaactacctgtacctggtgatggagtattacgtgggcggcgatctgctgacactgctgtctaaattcggtgaacgtatccctgccgagatggctaggttttacctggctgagatcgtcatggctattgatagtgttcacaggctaggctatgtgcatcgggacatcaagccagacaacatcctgcttgatcggtgcgggcatataagactggccgattttgggtcctgcctaaagctgcgagccgacgggacagtcagatcactggtggccgtcgggactccagactacctgtcgcctgagattctgcaagccgtgggagggggcccaggaaccggatcttacgggccagagtgtgattggtgggccttgggcgtcttcgcctacgagatgttctacggtcaaacacctttctacgcagattctactgccgaaacctatggtaaaattgttcactataaggagcatctaagtctgcctttagtcgatgaaggagttccagaggaggccagagacttcatccagaggctgctgtgcccacccgaaacccgcctcgggaggggaggggctggggacttccgtacacacccctttttctttgggctcgactgggacggtctgcgcgatagtgtaccacccttcactccggacttcgaaggcgcgacagacacctgtaactttgaccttgtggaagatgggctgactgcgatggtcagtggcgggggggagacactgtctgacatcagagaaggcgctccactcggcgtgcacctgccatttgtgggctatagctactcatgtatggctttgcgcgatagcgaggtccccggaccaacaccaatggaacttgaggcagaacagctcctggaaccgcacgtgcaggcccccagcttggagccctccgtaagcccccaggacgagaccgcagaggttgcagttccagcggcagtgcccgctgcggaggctgaggccgaggtcaccctaagggaattacaggaggctcttgaagaagaagtacttacacgccagtcattgagccgggaaatggaagccatcaggactgacaaccagaactttgcctcccagctgcgagaagccgaagccagaaatcgcgaccttgaggcccacgtcaggcagctgcaggaaagaatggaacttctccaggccgaaggtgccaccgcagtaacgggagtaccaagccccagggccaccgatcctccttcacacgtgccgcgaccagggctcagcgaagctctgtcactcctgctgttcgctgtagttctgagcagggccgcagcattaggctgcattggcctcgtagcccatgcaggacagctcacggccgtgtggagacgccccggggccgcccgggccccttag

SEQ ID NO: 186177 - DNA, 1593 bp, synthetic construct
  misc_feature 1..1593: note = Description of Artificial Sequence: Synthetic coding sequence
  source 1..1593: mol_type = other DNA
atgagcgccgaggtgcggctgcggcggctgcagcagctggtgctggacccaggcttccttgggttggaacccctcctggacctcttgctcggggtgcaccaggagttgggggctagtgaactcgcacaagataagtacgttgctgatttcctgcagtgggcagagcctatcgtggtcagactcaaggaggtgcggctgcaaagagatgatttcgagatcctgaaggtgatcggacgtggggcttttagtgaggtggccgtggtaaaaatgaagcaaaccgggcaagtctacgccatgaagattatgaataaatgggacatgctgaagcggggggaggtgagttgctttcgggaagagcgagacgtcttggtgaacggggacaggcggtggatcacccagctgcactttgcctttcaggacgaaaattatctgtacttggtgatggagtactacgtggggggagacctgttgaccctactgtcaaaattcggggagaggatcccggccgaaatggcccgcttctatttggcggaaatcgtgatggccatcgattctgtccatcgcttaggctacgtgcaccgagacatcaagcccgacaacatcttgctggataggtgcggacacatccggcttgcagactttgggagttgtctgaaacttcgagcggacggcaccgtgcgatccctggtggcagttggcacccctgactatctctccccggagattttacaagctgtcggcggtgggcctggaacaggcagttatggtcctgagtgtgactggtgggcactgggcgtgtttgcatatgaaatgttttatggccagacccccttttacgccgatagtacggcggagacctacggcaagattgtgcactacaaagaacacctgtctcttcccttagttgacgagggggtcccagaagaagctcgcgactttattcagaggttactctgccccccagaaacacggttgggcaggggaggagccggcgacttcaggacccatccattcttctttgggttggactgggacggtcttagggattccgtcccaccttttactcccgactttgagggtgctaccgatacatgcaattttgatctcgtggaggatggactgaccgcaatggagaccctgagtgacatcagggaaggggcgccactgggcgtgcatttaccattcgttggatacagttattcttgtatggcgctgagagattcggaggtccctgggccgactcctatggagctggaagctgagcagttgctggagccccatgtccaggctccctcccttgaaccaagcgtgtccccacaggacgaaacagcagaagtggccgtgccagcagcagtgcccgcagccgaggcggaagcggaggtcacactaagggaactgcaggaggctttggaagaagaagttctaaccagacagtccctatctagagaaatggaagcgattagaaccgataaccagaatttcgcatctcagctacgagaggcggaagccagaaaccgggatctggaagcccatgttcgccagttacaagaacgcatggaattactgcaggcggaaggggcaacaggcccttag

SEQ ID NO: 186178 - DNA, 1866 bp, synthetic construct
  misc_feature 1..1866: note = Description of Artificial Sequence: Synthetic coding sequence
  source 1..1866: mol_type = other DNA
atgagcgccgaggtgcggctgcggcggctgcagcagctggtgctggacccaggctttctgggactggagccgctcctggatttgcttctcggcgtacatcaggaactaggtgcttctgaattggcccaggataagtatgtggcagacttcctccagtgggccgagccgatagtagtgcgcctgaaagaggttcgcctgcagcgggatgacttcgaaattctcaaggtgataggtcgtggggcattttccgaggtggcagtagttaaaatgaagcagactggacaggtgtatgccatgaaaattatgaataagtgggatatgctgaagcgtggcgaagtgtcttgtttccgcgaggagcgcgatgtgcttgtgaatggggaccgacggtggattactcagctgcactttgctttccaggatgagaattatctgtatctcgtgatggagtactacgtggggggggatcttctgaccctgcttagtaaatttggggaacgtatacccgccgagatggctagattctatctagcagaaatagtaatggcaatagactctgtccatcgcctcggctatgtgcaccgagacattaagccggacaatattctgttggacaggtgtgggcatattcgcttggcagactttggcagttgcctcaaactgagagcagacggtacagtgaggtcattagttgccgtcggaacccctgattatctttctcccgagatcctgcaggcagttggcggtggtccgggaacagggtcctatggccctgagtgcgactggtgggctttgggcgtattcgcatatgaaatgttctacgggcagaccccattctatgctgacagtactgccgaaacatatggcaaaatagtgcattacaaagagcatctttccctgccattggtagacgagggcgtgcccgaagaggcccgagacttcatccagcggctgttgtgcccccccgaaaccaggctcggtagagggggggctggagatttcagaactcatccgttcttcttcggcctggactgggacgggctgcgcgactctgtgccaccattcaccccagattttgaaggcgctactgatacgtgtaacttcgatcttgtggaagatgggctaacagccatggagacattatcggacatcagggaaggcgctcctttgggtgtgcacctgccttttgttgggtattcctacagctgtatggccctgcgcgactctgaggtccccgggcccacccccatggagctagaggccgaacaattgctggagccgcacgtccaggccccaagtctggaaccgtccgtttctccacaagatgagacagccgaggtagccgtgcctgccgccgtgccagctgctgaggcggaggctgaagtcactctccgtgaattgcaagaggcgttggaggaggaagttttgaccaggcagtcactgagtcgcgagatggaggccattaggacggacaaccaaaacttcgcctctcagctgagagaagccgaagctcggaatcgagatctggaggcccacgtgagacagttacaggaaagaatggagctgctccaggctgagggggcaactgcagtgacaggcgtgccctcccctcgcgctacggacccccccagccatttggatggacccccgtggctgtgggccagtgcacggtggtggggtcaaatgcacagaagacatctgctgctccctgcccgggtgcccagacctggtctgtccgaagccttgtcactgctcctatttgccgtggttctaagtagagcagccgctctgggctgtattgggctcgtggcccatgcaggacagctcacagctgtgtggaggagacctggagccgcgagggccccctag

SEQ ID NO: 186179 - DNA, 1875 bp, synthetic construct
  misc_feature 1..1875: note = Description of Artificial Sequence: Synthetic coding sequence
  source 1..1875: mol_type = other DNA
atgagcgccgaggtgcggctgcggcggctgcagcagctggtgctggatcccggcttcctcggcttagaacccctgctcgatcttcttctgggcgtacaccaggagcttggagcgagtgagttggcccaggataagtacgttgccgactttttacaatgggccgagccaatcgtggttcgcttaaaggaagtcaggctccagcgggacgactttgaaattttgaaggtcattggcagaggtgctttctccgaagtggcggtggtgaagatgaaacagaccgggcaagtgtatgccatgaagatcatgaataaatgggatatgctgaaaagaggagaggtatcttgcttccgagaggagagagacgtgcttgtgaacggggacaggcggtggatcacccaactccattttgcattccaagatgagaattacctctacctggtgatggagtactatgtcggcggcgacttgcttacactgttgagcaagtttggtgagcgaatccccgccgaaatggcaagattctatctggccgagattgttatggcgatcgatagcgtgcacaggctaggttacgtgcatagggatatcaaacctgataacatcttgcttgatcggtgcggccacatcagactggcggatttcggctcttgcctcaagctgagggccgacggtaccgttcgctctctcgtggccgtcggcacccctgattacctgtcccctgagattcttcaggcagtgggcggaggccctgggactggatcttatgggccagagtgcgactggtgggcattgggcgtctttgcttatgaaatgttctatggccagacccctttctatgcagacagtaccgcagagacctacggcaagattgtgcactataaggagcatctctccttgcctcttgttgacgagggcgtaccagaggaagcccgggactttattcagcgcctgctgtgcccacctgagacaagactgggtcgtggtggagccggcgattttcgaacacatccattcttcttcgggcttgactgggacgggcttcgggactcggtccctccgttcacccctgattttgaaggggcaaccgatacctgcaactttgacctggtagaggacggtttgactgctatggagacactatcagacattagagaaggcgccccactgggggttcatttacccttcgtgggttattcttacagctgcatggctctgcgtgatagtgaagtccctggccctactcccatggagctcgaggcggaacagctgttggagcctcatgtgcaggcacctagcctcgaaccatcagtctcgccgcaggatgagaccgcagaagtggctgttccagccgcagtgcctgctgccgaggcggaggccgaggtaactctgcgggagttacaagaggcgcttgaagaggaggtcttgactagacagtccctgtcacgtgagatggaagcgatccggactgacaatcagaactttgcctctcaattgagagaggccgaggctcgcaatcgcgatctggaagcgcacgttagacagctgcaagagcgcatggagctgttacaggccgagggtgcaacggccgtcacgggtgtgccgagccctagggctaccgatccgccatctcacttggacggccctccagctgtggccgtcggtcagtgcccactcgtcggaccgggtcccatgcacaggagacacctgttactccccgcccgtgtgcccaggccaggattatcagaggctctatcccttctattatttgccgtcgtgctctcccgcgccgccgccttaggctgcataggactcgtggcacacgccggccagttgacagctgtttggcgccgacctggcgcagcccgcgccccgtag

SEQ ID NO: 186180 - DNA, 1878 bp, synthetic construct
  misc_feature 1..1878: note = Description of Artificial Sequence: Synthetic coding sequence
  source 1..1878: mol_type = other DNA
atgagcgccgaggtgcggctgcggcggctgcagcagctggtgctggaccccggatttcttggccttgaacccctactagatttgcttctaggcgttcatcaggaattgggcgcatccgaactggcacaggacaagtacgtagccgatttcctccagtgggcagagcccatcgtcgtccgcctgaaagaggtgcgcctgcagagagacgatttcgaaatcctgaaagtgattggcagaggtgccttttctgaagtggctgtggtcaagatgaagcagaccgggcaggtctatgccatgaaaatcatgaataagtgggatatgcttaagagaggagaagtctcgtgtttcagggaagagcgcgatgtgctggtcaacggcgacaggagatggatcacgcagctgcacttcgccttccaagacgagaattacttatacctcgtgatggaatattacgtcggcggggacctcctcacattattaagcaagtttggtgagcgcatcccagctgaaatggcacgattctatcttgctgaaatcgtcatggccatcgatagcgtccaccgccttggttacgtacaccgggacattaagcccgataatattttgttggaccggtgtggacacataaggcttgccgatttcggctcctgtttgaagctgcgtgcggacggcacagtgaggtcactcgtggctgtgggcactcccgactatctgtctcccgagattctgcaggccgttggcggaggacccgggaccggctcatacggaccggagtgcgactggtgggcccttggcgtgtttgcttatgagatgttctacggacaaacaccattttatgcagattccacagcagagacttacggcaagatcgtccactataaggaacacctcagtctgccgctggtggacgagggggtccctgaagaggcccgggatttcattcaaaggctgctttgtcctcctgagacccgactgggccgtggcggggccggagactttcggacacatccattcttttttgggctcgactgggatggactgcgtgactccgtgccaccatttacgcctgatttcgaaggtgccaccgacacctgcaattttgatttggtggaagatggccttaccgcaatggaaacgctgtcagacatcagggagggagcccccctgggagtgcatcttccctttgtgggctattcctacagctgtatggctctgcgtgactctgaggtcccagggcctacacctatggagcttgaggcagagcagcttttagagcctcacgttcaggctcccagcttagagccatccgtttcgcctcaagatgagaccgccgaagtggccgtgcccgccgcagtgcccgctgcagaggccgaggcagaggtgactctaagagaattacaggaagcactggaagaagaggtgttgactagacagtcactttccagggagatggaggcaatccgtactgataatcagaatttcgcctctcagctgagggaggccgaagcccgcaatagggatcttgaggcacacgtacggcagctgcaggagagaatggagctgctgcaggctgaaggggcaactgctgtgaccggcgtgccaagtccgcgtgctactgaccctccctcacacatggctccacgcccatggctctgggccagtgcacgttggtggggccaagcaccttgcactgctgccacctgctgctcgttgcccggctctctggggcttgcctataggaggaggttcccctgctcatgttcacccttgttttgtctcgtccctcctccctgggcggccctgggatggtggccgactcctgctaacagccctcagagcggtgccgctcaggaaccacctgcattgcccgaaccatag

SEQ ID NO: 186181 - DNA, 129 bp, synthetic construct
  misc_feature 1..129: note = Description of Artificial Sequence: Synthetic coding sequence
  source 1..129: mol_type = other DNA
atggagctgctgcaggccgagggcgccaccgcccggtggccccccggccggggctgcggtccagtacccgctggaggagcccgaccccacgctccccctccgcccgcagccccttgtcagggtccatag

SEQ ID NO: 186182 - DNA, 3402 bp, synthetic construct
  misc_feature 1..3402: note = Description of Artificial Sequence: Synthetic coding sequence
  source 1..3402: mol_type = other DNA
atgcccagcagcctgatgctggaggtgcccgccctggccgacttcaacagggcatggactgaattaacggactggctgagcctcctcgatcaggtcatcaagtcccaacgagtaatggtgggagacttggaagatatcaatgagatgattataaagcagaaggctactatgcaggacctcgaacagcgccggcctcaactcgaagaactgataaccgcggcgcaaaatctcaagaacaagactagtaatcaggaagcaagaactattattaccgaccgtatagaacgaatccagaatcagtgggacgaggtgcaagagcacctgcaaaaccgcaggcaacagctcaacgagatgttgaaggactcgactcaatggctggaagcaaaggaggaggcggaacaagtactcggccaggcacgggcgaaactggagtcctggaaggagggtccctacacggtggacgcaatccagaaaaagatcaccgaaacaaagcaacttgctaaggatcttcgccagtggcagactaatgtagacgtggcgaatgacctcgctctaaagctgctgcgagattattcagccgacgatactcgcaaagtccatatgattaccgaaaacattaatgcctcttggaggtcaatacataaacgcgttagcgagagggaggctgccctcgaggaaactcatcgattgctgcagcagtttcctttggacctggagaagttcctggcttggctgaccgaagctgaaaccaccgcaaacgtgctccaggatgccaccagaaaggaacgtctgcttgaagacagcaagggtgtgaaggagctcatgaagcaatggcaggatctccagggagagattgaagctcacactgacgtataccataatttggatgagaactcccagaagatactccgctcccttgaaggctcagacgatgccgttcttctgcaaaggcgcctggacaatatgaactttaagtggtcagaactcagaaaaaagtctttgaacatccggagccacctggaagccagttcagaccagtggaaacggctgcatctctcattgcaagagctgttggtttggcttcagctgaaggatgatgaactgtcacggcaggcccctatcggcggagattttccggccgtgcagaagcagaacgacgtgcacagagccttcaaacgagagctaaagacaaaggagccagtgattatgtccacgctggagacggttagaatctttctgacagagcagcctttggagggcctcgagaagctgtatcaggagcctagagaacttcctcccgaagagagagcgcaaaatgtaactcggcttctgcggaaacaggcggaggaggtaaataccgagtgggaaaagctgaatctgcatagcgcggattggcagcgaaaaatcgacgaaaccttggagcgattaagagaactacaggaggccaccgacgaactggatttgaaactcaggcaggccgaagtcatcaagggatcctggcagcccgtaggagatctgctcatagattcgctacaagatcacctggagaaggttaaagctctgcgaggagagattgcgccacttaaagagaacgtgtctcatgttaacgacttggcacgacagctgacgaccttgggaatccaactatccccctacaatctgtctacactggaagatctcaacaccaggtggaaactgctccaggttgctgtggaagaccgggtgcggcagctgcatgaggcccatagagactttgggcctgcaagtcagcacttcctgtcaacttcggtccagggcccgtgggagagggctattagccccaataaagttccttactatatcaatcatgagacccagacaacttgctgggaccatcctaagatgaccgagctataccagagcctggccgaccttaacaatgtgagattttcagcttaccggacagcgatgaagctgagaagactccagaaagcgctttgtcttgatcttctcagcttgagcgccgcatgcgacgcacttgaccagcacaatttgaagcagaacgatcaaccaatggacatactgcagattattaactgcttaactaccatttacgatcgcttggaacaggaacataataacctggtcaatgtgccactctgtgtcgacatgtgccttaactggctgctgaatgtgtacgacacggggcgcaccggccggatccgcgtgctgagcttcaaaacaggaatcatttcactgtgtaaggctcacctggaggacaaatacaggtacttgtttaaacaggtagcgtcatctaccggattctgcgaccagcgacggctgggtttgctactccatgacagcattcaaatcccccggcagctgggcgaagtggctagttttggaggaagcaacattgagccctccgtgcggtcgtgtttccagttcgcgaataacaaacccgaaatcgaggccgccttgtttctcgactggatgaggttggagccacagagtatggtgtggctacccgtgctgcaccgcgtcgctgcggcagagacagccaaacatcaagctaagtgcaacatctgtaaagagtgccctattatcggatttcggtatcgaagtctcaagcattttaactatgatatttgccagtcctgtttcttcagtgggagagtggctaagggacacaagatgcactatccgatggtggaatactgcacgcctacgaccagcggggaggacgtgcgcgactttgcgaaggtgcttaaaaacaagttcagaaccaagcggtattttgccaaacacccgagaatgggatacttacccgtccagacggttctggagggggacaatatggagaccaacctccaggcggagtacgacagattaaaacaacagcatgaacataagggtctgtctcccttaccttcaccaccggaaatgatgccgaccagtcctcagagtccccgggacgctgaactcatagccgaagcaaaattgctcaggcagcacaaaggccggctggaggcgcggatgcaaattttagaagaccataacaagcaactggaaagtcagttgcatagactcagacaactcctcgaacagccgcaagcagaagcaaaagtgaatggtaccactgtatcgagtccatcaacaagcctgcaacgaagcgacagcagccaaccgatgctgctgcgcgtggtcggcagccaaacttcagactctatgggagaggaggatctcctgagcccccctcaagatactagtacgggacttgaggaagttatggagcagctgaacaattcattcccaagctcccgcggccacaacgtgggcagcctgtttcatatggctgatgatctcggcagggctatggagtcacttgtctcggttatgactgacgaggaaggagccgaatag

SEQ ID NO: 186183 - DNA, 11058 bp, synthetic construct
  misc_feature 1..11058: note = Description of Artificial Sequence: Synthetic coding sequence
  source 1..11058: mol_type = other DNA
atgctgtggtgggaggaggtggaggactgctacgagcgggaggacgtgcaaaaaaagacatttactaaatgggttaacgcacagttttctaagttcgggaagcagcatatagagaatctcttctcagatctacaagatggccgccggctgctagacttgctcgaggggttaaccggacagaagctcccgaaggagaaggggtcaacaagagtgcatgccctgaataacgtgaataaagccctcagggtcctccagaacaataacgtcgacctggttaacatcggttcaacggacattgtggacggtaatcacaagctgacactgggtcttatttggaatatcattctccactggcaggtcaagaatgtgatgaagaatatcatggcagggctgcagcagacgaatagcgagaaaattctgctgtcttgggtgaggcagtcgacaaggaactatccccaggttaacgtgatcaattttaccacaagctggtccgatggcctggccctcaacgctctgatccacagtcaccggcccgacctcttcgattggaactccgtggtgtgtcagcagagcgccactcaacgtctagaacacgctttcaacatcgccagatatcaattaggaattgaaaaactgctcgatcctgaagatgtggacaccacttatcctgataagaaatcaatcctgatgtatattacctccttattccaggttctgcctcaacaggtctctatagaagcaatccaagaggtggagatgctcccccgcccccccaaggtcacgaaagaagaacactttcaattgcatcatcagatgcattactctcaacagattacggtatcactcgcccaggggtacgagaggacctcaagtcccaagcctcggtttaagagctacgcctatacacaggctgcgtacgtcaccacctccgatccgacacgctcccccttcccatcgcaacacctggaggcacccgaggataaatcctttggcagctccctgatggagtccgaggtgaacctggaccggtaccagacagcactggaggaagtgttgagttggctgctgagtgccgaagatactctgcaggctcagggagagatctccaatgatgtggaagtcgtgaaggatcagtttcacactcacgaggggtacatgatggacctaacggcgcatcaagggcgagttgggaatattctccagctggggtctaagttgatcgggactgggaaattatccgaggacgaggagaccgaggtccaggaacagatgaacctgctaaactctcgctgggaatgcttaagggttgcatccatggagaagcagtctaatttgcatagggtactgatggatctgcaaaatcaaaagctgaaagaactgaacgactggctcaccaagaccgaagaaagaacaagaaaaatggaggaggagcctctgggtcctgatctggaagatctgaaaagacaggtacaacagcataaagttctccaggaggatctggaacaggaacaggtgagggtaaactctctgacacacatggtcgtggtggtggacgagtcgtccggcgaccacgcaactgctgccctggaggagcagttgaaggtgctgggagatagatgggctaatatatgccggtggaccgaggatagatgggtgctgcttcaggatatactgttaaaatggcagcgtctcacagaggagcagtgtctgttttctgcctggctctcagagaaagaggatgctgtaaataagattcacaccactggtttcaaagatcagaatgaaatgctgtcatcacttcagaagttggcagtgctgaaagccgaccttgagaagaaaaagcagagtatggggaagctttattccttgaagcaggacctgttaagcactctcaaaaataagtccgttacacagaagaccgaggcctggttggacaacttcgcacgctgctgggataacctggtgcaaaaactggagaaatctacagcacaaataagtcaggcggtcactaccactcagccgtcactcacccagactaccgtgatggagacagtgaccacagtgaccactagggaacaaatccttgtcaaacatgctcaggaggagctgcctccgcctcctccccagaaaaagcgccagatcacagtcgattccgagattcgcaaaaggcttgatgtggacatcacagaacttcacagttggataacccgctcagaagctgtcttgcagtcccctgaattcgccatcttcaggaaggagggcaattttagcgatctcaaggagaaggtgaacgctattgagagggaaaaggctgaaaagttcaggaaattgcaggacgcttcgagaagcgcccaggccctcgtcgaacagatggtcaacgagggagtgaacgccgattccatcaaacaggctagtgaacagctgaactcaaggtggatcgagttctgtcagcttctgtctgagagacttaactggctggagtaccagaacaacataatcgcattctacaaccagctccaacagctggagcagatgactactacggctgagaattggctcaagattcagcccacaacccccagcgagcccacagccattaagtcacaactcaaaatctgtaaggacgaggtcaatcggttgtcggatctccagcctcaaatagagagacttaaaattcagtccatcgcgttgaaagaaaagggacaaggtccaatgttcctggatgcagactttgtcgcattcaccaatcactttaaacaggtattcagcgacgtacaggcccgggagaaggaactgcagaccatattcgatactctgccacccatgaggtaccaggagacaatgtccgccatccgcacctgggtgcaacaatccgagacaaagctctccataccacagttgtctgttactgactacgagattatggaacaacgactcggagagctacaggccctgcagtcctccctgcaggagcagcagtcaggtctgtactacttgtcgacgacagtaaaagagatgagcaagaaagctcccagtgaaatttctcgtaaataccaaagtgagttcgaggagatcgaaggcagatggaaaaagctttcctctcagcttgtggaacattgtcaaaagctcgaggagcagatgaacaaacttaggaagatccagaaccacattcagacgcttaagaaatggatggctgaggtcgacgtgtttctcaaagaagagtggccagcgttaggggacagcgagatcctcaagaaacaattaaaacaatgcaggctgctggtgagtgatattcagacaatccaaccaagcctcaatagtgtaaacgagggggggcaaaaaattaaaaatgaagcagagcccgaattcgcctccaggcttgagactgagctcaaggagcttaacacacagtgggaccacatgtgtcaacaggtttatgctcggaaagaagctttgaaggggggcctggagaaaactgtgtcacttcagaaggatctgtcagaaatgcatgagtggatgacacaagcggaggaggagtacctcgagagagatttcgagtacaaaacccccgatgagttacagaaggccgttgaggagatgaaacgggccaaggaagaagctcagcagaaggaggctaaggtaaaactgctcacggagtccgtgaatagcgtgatcgcacaggcacctccagttgcgcaggaggccttaaagaaggaattggagactctcacgaccaactatcagtggctttgtacccgcctgaacgggaagtgtaagacgctcgaagaggtgtgggcctgctggcatgaactactcagctatctggagaaagcgaataaatggctcaacgaggtcgagttcaaactcaaaaccacggaaaacataccaggaggcgccgaggagatctccgaggtgttagacagcctggagaacctgatgcgacacagcgaagataaccccaaccagattaggatcctagcccagacgctgacagatggaggggtcatggacgagctgatcaacgaggagctggaaaccttcaatagcaggtggcgtgagctgcatgaagaggcagtgcgacgacagaagttgctcgaacagagcatccagagcgcccaggaaactgaaaaatctctgcatctgatccaagaaagcctgacattcattgataaacaacttgccgcctacatagccgacaaagtggacgccgcccaaatgccacaagaagcacaaaaaatccagtccgatcttacctctcacgaaatctccctggaggaaatgaaaaaacataatcaggggaaggaggctgcccagcgcgttctgagccaaatcgacgtcgctcagaagaaactgcaggacgtcagcatgaaattcaggctcttccagaagccagccaactttgaacagagattgcaggagtctaagatgatcctggacgaagtaaagatgcatctgcctgccctggagacaaaaagtgtagagcaggaggtcgtgcaatctcaactgaatcactgcgtcaatctctacaaatctttatccgaggttaagagcgaggttgagatggtcataaaaaccggacggcagatcgtgcagaagaagcaaactgagaacccgaaagaactcgacgaacgcgtcacggccctgaagctgcactacaatgaacttggcgctaaagtgactgaaaggaagcagcagttggagaaatgccttaagctttcacgtaaaatgagaaaggagatgaatgtgctgaccgaatggcttgcagcgaccgacatggagctgactaagcggagtgctgtcgaaggaatgccgagtaacctcgatagcgaagtggcttggggaaaagccacccagaaggagatcgagaagcagaaggtgcatctgaagtccatcactgaggtgggcgaggctttaaagactgtgctcggtaagaaggagaccctagtcgaagacaagctctccttgctgaactccaactggattgcagtgacttccagggctgaagaatggctgaatctactgctggagtaccagaagcatatggagactttcgatcagaacgtggatcacatcacaaaatggatcattcaggctgataccctgctggacgagtctgaaaaaaagaaaccccagcaaaaagaggacgtgcttaaacggctgaaggccgaacttaatgatattcgtcctaaggtggattctacacgcgaccaggcagcaaacctgatggccaataggggagaccactgtagaaaactggtggagccacagatttcagagctaaaccataggtttgcggcgatctcccatcggatcaaaacaggtaaagcctctattccactcaaagaacttgagcagtttaatagtgacatccagaagttacttgaaccactcgaggccgaaattcagcaaggcgtgaatctgaaagaggaggattttaacaaagatatgaacgaagacaatgagggaacagtcaaggagcttcttcaacgcggagataatctccagcagaggattacagatgaaagaaagagagaggagattaaaataaagcagcagcttctacagaccaagcacaatgccttaaaagacctccgaagccaacggcgaaaaaaagcactggagatctcgcaccagtggtatcagtataagcggcaggccgatgatctgctaaaatgcctcgacgacatagaaaagaaattggctagtctcccagagcctagggatgagcgcaagattaaagaaatagatcgtgaattgcagaaaaagaaagaggaactgaacgccgtgagacgccaagcggaaggcttgtctgaagatggagcagctatggcagtagaaccaactcagattcaactgagtaagagatggagagagatcgagagcaagtttgcacagttcaggaggcttaacttcgcacagatccataccgtgagggaggaaaccatgatggtcatgacagaagatatgcctctcgagatttcctatgtgccaagcacttacctcacggagattactcacgtgagtcaagccctgctcgaggtagagcaactgctaaacgccccagacttgtgcgccaaggactttgaagatctatttaaacaagaggaatcattgaagaacatcaaggattccttacaacagtctagtggtcgcattgacatcatccattcaaagaagacagctgctcttcaatcggccactccagtagaacgcgtgaaactgcaggaagctctttcccagcttgattttcagtgggaaaaggtgaataagatgtataaagacagacaaggcaggtttgaccggtctgtggagaagtggcggagattccattacgacataaagatatttaaccagtggttgacagaggcagagcagttcttgcgaaagacccaaataccagagaattgggagcatgctaaatacaagtggtacttgaaagagttacaagatggtatcgggcagcgacagactgtggtgagaacgctgaacgcgacaggggaggagattatccaacagtcaagtaaaactgatgcatcgatcctgcaggagaaactggggagcctcaatctgcgctggcaagaagtctgtaagcaacttagtgaccgcaagaagcgccttgaggagcagaaaaatattctgtctgaattccagcgagacctgaatgagtttgtgctgtggttggaggaggctgacaatatcgcctccattccattagagcccggcaaggagcagcaacttaaagagaagctggaacaagtgaagctgctggtagaagaacttcctcttcgccagggtatcctcaaacaactgaatgagactggcggcccggtgctggtttctgctcccatttcaccagaggaacaggataagctcgagaacaagctgaagcagacaaatctgcagtggattaaggtgagtcgagcgctccctgaaaagcagggagaaattgaagcacagatcaaggacctgggtcagctcgagaagaagttggaagatttggaagagcagcttaaccacttgcttctgtggttgtctcctattcggaaccagttggaaatttacaatcaacctaatcaggaaggacccttcgacgtgaaggaaacggaaatcgctgtccaggccaaacagccagatgtggaggagatacttagcaaggggcaacacctctataaggagaagcccgccacccaacctgtcaaacgcaagctcgaggacctctcatcggagtggaaggcagtgaacagactattgcaggagttacgcgctaagcaaccagacctcgccccagggctgaccacgatcggagcctcgcccacgcaaacggtcacactggtgactcagcctgtagtgacaaaagaaactgccattagtaagttagaaatgccaagttcccttatgctggaggtcccggcactggccgatttcaaccgggcctggacagagctcaccgactggctgtctctgcttgaccaggtaatcaaatcccagagggtgatggtcggtgaccttgaagacataaatgagatgatcattaaacaaaaggccactatgcaggaccttgaacagaggcggccacagctggaggaattgattacggccgcacagaatcttaagaacaaaacttccaatcaggaggctcgcactattataactgacagaatcgaacgtattcagaaccagtgggacgaggtgcaagaacacttacagaatcggcggcagcagctgaatgagatgcttaaggactccactcagtggttggaggcaaaagaagaggccgagcaggtgctcggccaagccagagctaaacttgagtcttggaaggagggaccatataccgtggatgctatacaaaaaaaaattacggaaactaagcagctggctaaggatctcagacagtggcagacaaatgtggacgtggccaatgacttggctctcaaattactccgtgattacagcgcagacgacacccgcaaagtgcacatgataacagagaatatcaatgcctcctggaggtcgatccataaaagagtgtccgagagggaggcagcactcgaagaaacacataggctgctccagcaattcccgttagacctggagaaattcctcgcctggctaactgaagccgagacaaccgcaaatgttctgcaggacgctacacggaaggagagactgctcgaagattcaaagggtgttaaagaactcatgaagcaatggcaggacctgcagggggaaattgaagctcacaccgacgtctaccacaacttagatgagaacagccagaagatcctgcggagtctcgaaggctccgatgatgccgtgctgctccagaggagactggataacatgaatttcaagtggagtgagctgaggaagaaatccttaaacatacggtctcacctggaagccagttcggatcagtggaagaggttacacctttccctccaggagctgctggtgtggctgcagttaaaagatgacgaactgtcacgccaggcgccaattgggggcgattttcctgcagtgcaaaagcagaacgatgtccacagggcctttaaaagagagctgaaaactaaagaacccgtaattatgagcaccctcgaaaccgtgcggatcttccttacagagcaaccattagaggggctcgaaaaattatatcaggagccgagggaactccctcctgaggaaagggctcaaaacgtcacccgcttgttacgcaaacaggcagaggaggtcaatacggagtgggaaaagttgaatctgcatagcgctgattggcagagaaagatagatgaaaccctggagcgcctgcgggaactacaggaggccaccgacgaacttgatctaaagctgaggcaagcagaagtgattaaaggcagttggcagcccgttggggaccttctgattgactctttgcaggatcacctggagaaagtgaaagctctccgcggtgaaattgctcctttaaaggaaaacgtttcccatgtcaatgacctggcgcgtcagttgactaccctgggcattcagctgtcaccctacaacttaagcaccctggaggatctgaataccagatggaagctgctccaggttgccgtagaggatagggtgaggcagctgcacgaagcacatcgcgactttgggcctgcatcacagcacttcctgagcacgtccgtccaagggccttgggaacgtgccatatctcccaacaaagtgccctactatattaaccacgagacacagaccacctgctgggaccacccgaaaatgacagaactttaccagagtttggccgatctcaacaacgtgcgcttctctgcctacagaaccgcgatgaagctcaggagactgcagaaagccttgtgcctggatctactcagcctttctgccgcgtgtgacgcgctggatcagcataatctgaaacagaacgatcagccgatggacatcttacagataattaactgcttgaccacaatttacgacaggctcgaacaggaacacaacaacctcgtgaatgtgccactctgcgtagatatgtgcctgaattggctcttgaacgtgtatgatacagggcgcaccggcaggattagagtgctgtcttttaaaaccggcatcatttccctatgcaaagcacacctggaagataagtataggtacttgtttaagcaggtggcttccagtaccgggttttgcgaccagagacgacttgggctgctcctacatgatagcatacagataccccggcaactcggggaagtcgcttcttttgggggctcgaacatagagccttccgttcgatcctgcttccagtttgcaaacaacaagccggaaattgaagccgcactgtttctcgattggatgcgccttgagccgcagtccatggtttggttgcccgtattgcatcgcgtggcggccgctgagacagctaaacaccaggctaagtgtaacatctgcaaggagtgcccaataataggcttcaggtatcggtctctgaagcactttaactacgacatctgtcaatcctgtttcttcagcggcagggttgccaagggccacaagatgcactatcccatggtggaatattgcacaccgactacaagcggagaggacgtacgggattttgctaaggtgctgaagaacaaatttagaacaaagagatactttgccaagcacccccggatgggctatctgcccgtacagacagttctcgagggagataacatggaaacacctgtgacactcataaacttttggcccgttgacagcgctccagcctctagcccccaactctctcacgacgatacacacagcagaattgagcattacgccagcaggctcgcagaaatggagaactcaaacggcagctacctaaatgactctatctcccccaacgagtcaattgatgacgaacatctcctaatccagcactactgtcaatctctaaaccaggatagtcctctttcacagcctcggtccccggctcagattcttatcagtctcgagtctgaagaaaggggagagctggagcggattctcgcagatttggaggaggagaaccgcaacttacaggctgaatatgaccggctcaagcagcagcatgaacacaaaggcctgtcacccctgccgagcccaccagagatgatgccaacttctccccagtcaccaagggatgccgaactgatcgcggaggccaagttattacgacaacacaaagggagacttgaagctagaatgcagatcctggaggatcacaacaaacaattagaatctcagttgcatcggttgaggcagctccttgagcagcctcaggcagaagctaaggtgaacgggacgacagtaagctccccatcgacttcactgcagcgcagtgactcatcgcagcctatgttactgcgagtggtgggatctcagacgtccgatagcatgggcgaggaagaccttttatcgcctccacaagacacctcaaccggcctggaggaggtaatggaacaactcaacaacagcttccccagttcaagaggaaggaacactcccgggaaacccatgagagaagatactatgtag

SEQ ID NO: 186184 - DNA, 3693 bp, synthetic construct
  misc_feature 1..3693: note = Description of Artificial Sequence: Synthetic coding sequence
  source 1..3693: mol_type = other DNA
atgcccagcagcctgatgctggaggtgcccgccctggccgacttcaatcgcgcatggactgaattaacagactggctgtcactgttggaccaagtgataaagtcccagagggtgatggtgggcgacttggaggatattaacgaaatgatcatcaagcagaaagctacaatgcaggatcttgaacagaggagacctcagctggaggagctcatcacagccgctcaaaatctcaaaaataaaacctctaaccaggaggcacgcaccatcattactgataggatagaaagaattcagaaccagtgggatgaagtgcaagagcatctgcaaaatcggcggcagcagttgaacgagatgctgaaggactcaacacagtggttggaggccaaagaggaggcagagcaagtgttgggacaggcacgcgcgaaactagagagctggaaggaagggccttatactgtggatgcaattcagaagaagattaccgagactaagcagctggctaaggacctcaggcagtggcagacaaatgtcgatgtggccaatgatctcgccttgaagttgctgcgcgactattccgctgacgacacccgaaaagtccatatgattactgaaaatataaatgcttcatggaggtcaatccacaaacgcgtctcagagcgggaagctgcactggaggagactcatcgcctcctccaacaatttcccctcgatctggaaaagttcctggcatggctcacagaggccgagaccaccgctaacgttctgcaggacgcgacacggaaagaacggttactggaggatagtaagggggttaaagagctgatgaagcaatggcaggacctccagggggagatagaggcccatacggatgtataccacaatcttgacgagaactctcaaaaaattttgaggagcctcgagggttccgacgatgcagttctactgcagaggaggctggataacatgaacttcaaatggtcagagttgaggaagaaaagtctgaacatccgaagccacctggaagccagtagcgaccagtggaaaagactccaccttagcctgcaggaactactcgtctggttacagctaaaagatgacgaattgagcagacaggccccaatcggtggagacttccctgccgtgcagaaacagaacgatgtgcacagggccttcaagagggagttgaagaccaaggagcccgtaataatgtccacactcgagaccgttcgtatctttttgacggagcaaccacttgagggcctggaaaagctctatcaagagccccgggaacttccccccgaggagcgcgctcagaacgtgacacggctcttaaggaagcaggccgaagaggtcaacacagagtgggaaaagctcaatctgcactcagctgattggcagagaaagatcgatgaaactctggaaaggttgagagaactgcaagaggccactgacgagcttgatctcaagctcaggcaagctgaagtaatcaaaggatcttggcagcctgtaggcgacctcctcatcgactcactgcaggatcatctggaaaaggtgaaggcactgaggggcgaaatcgcgcctctcaaggaaaacgtgagtcacgtgaatgacttggccaggcagctcaccactcttggaattcagctttcaccatacaacctgagtacgctcgaggacctgaacaccagatggaagctgctgcaggttgccgtggaggacagggtgaggcagctgcacgaggcacaccgtgattttggcccagcctcacaacatttcctgtctacttctgtccagggaccatgggagcgcgccatctcgcctaataaggttccctactacatcaaccacgaaactcagaccacctgctgggatcatccaaagatgaccgaactctatcaatctttggctgaccttaacaacgtccggttctccgcctaccgaaccgctatgaagttaaggcgtctgcagaaagccctgtgtttggacctcctctctttaagtgccgcttgtgacgccttagatcagcacaacctcaaacagaatgaccaaccaatggatatccttcaaattatcaactgtctcacaactatctacgaccgtctggagcaggaacataacaatttggtgaacgtgcctctgtgtgtggacatgtgtctcaattggctactcaatgtgtatgacacgggcaggactgggcggatccgagtactttcatttaaaactggtattatctctctctgcaaggcacatctcgaagacaaatatagatacctgttcaaacaagttgctagtagcacaggcttctgcgaccagcggcgcctgggcctactgctacacgacagcatacaaatcccacgacaactcggcgaagtcgcatccttcggcggcagcaatatagaaccatccgtgcggtcctgttttcagtttgccaataacaagcctgaaattgaggccgccctttttcttgattggatgagactggaaccccaatccatggtctggttgccagtgctgcaccgggtagccgctgcagagaccgccaaacatcaggctaaatgtaatatctgtaaggaatgtcccatcattggatttagataccgttccctcaagcactttaattacgatatatgtcagagttgtttctttagcgggcgggtcgctaaaggccataaaatgcactacccgatggttgagtattgtactccaacaaccagcggggaagacgtaagagactttgcaaaggtgttaaagaacaaattccgaacaaagcggtattttgccaagcacccacggatgggatatctgcctgtccagacagtcctggagggggataatatggagacccccgcgtccagcccacaactatctcatgatgatactcattcgaggatcgagcattacgccagccggctggctgagatggaaaatagtaatggcagctatctgaacgacagcatctcccccaacgagtcaatcgacgatgaacacctgctcattcagcactattgccagtccctgaaccaggacagcccactgtcacagcccaggtctccggcgcagatcctgataagcctggagtccgaagaacggggagagctcgagcgcattcttgccgatttggaggaggaaaataggaacctgcaggcagagtacgacagactgaagcaacagcacgagcacaaaggcctctctcccctccccagtccccccgaaatgatgcctacgagtccacagtcacccagggacgctgagcttatcgcagaggctaaattgctgcgtcagcataaaggtcgcttggaggcacgcatgcagatactcgaggatcataataagcaacttgagagccagcttcacagattgcgccagctgctcgaacaaccacaggctgaagcaaaggttaacggaacaaccgtgtccagcccttccacctctctccagcgcagtgattcatcccaaccaatgctgctgagggtggtcggaagccagacttctgactccatgggagaggaggatcttctaagccccccccaagacacttccacaggtttggaggaggtcatggagcaactcaataactcttttcccagcagcagagggcataacgttggctccctgtttcatatggctgacgacctgggcagagccatggagtccctggtgagtgtcatgactgatgaggagggcgcggaatag

SEQ ID NO: 186185 - DNA, 1869 bp, synthetic construct
  misc_feature 1..1869: note = Description of Artificial Sequence: Synthetic coding sequence
  source 1..1869: mol_type = other DNA
atgcgggagcagctgaagggccacgagacccagaccacctgctgggaccacccaaagatgacagagctataccaatctttggcagatttaaacaacgtgagattcagtgcctacaggacagcaatgaagctgagacggctccaaaaagccctttgcttggacttgctttccttgtccgccgcctgtgacgccttggatcagcataatcttaagcagaatgatcagccaatggacatactacagattattaactgtctgactaccatttatgacaggctcgagcaggaacacaacaacttggttaatgttcctctgtgcgtggacatgtgcttgaactggctgctcaatgtctacgacacagggcggaccggccgcattcgggtcctaagcttcaagaccggcatcatcagcttgtgtaaggcccacctggaagacaaatatcgctatctgtttaagcaggtcgcctcctctacgggcttctgcgaccagcgccgcttaggtctcctactccacgattcaatacaaatcccgcgacagctgggcgaggtcgcctcctttggcggctcaaatatagaaccaagcgttcgcagttgttttcagttcgccaataataaacccgaaatagaagctgctctgttcctcgattggatgcgtctggaacctcagtctatggtttggctaccagtgctccacagagtcgcagcagccgagacggccaaacatcaggccaagtgcaatatctgcaaggaatgcccaatcattggtttcagatacaggtcactgaaacattttaactacgatatttgtcaaagttgtttctttagtgggcgcgtcgccaaagggcacaagatgcactaccctatggtggagtactgcactccaacaacttccggggaagacgtgagggattttgccaaagtcctgaagaacaaatttcggactaagaggtatttcgccaagcatccacgcatgggctatttaccggtgcaaacagtcttggagggtgataacatggagacacccgctagtagtccccagctatcgcatgacgatacccattctaggatagagcactacgcttctcgactcgcagaaatggagaacagtaatgggtcctatctaaacgattctatctccccgaacgaatccatagacgacgagcacctccttatccagcattattgccaatctttgaatcaggactctcccctgtctcagccgaggtccccagcccagatacttattagcttggagtctgaagaacggggcgaactggaaaggatccttgcggatctcgaggaagaaaacagaaacttacaagccgaatatgaccgactcaagcagcagcatgagcacaagggtttgtcaccactgccctctcccccagagatgatgcccacaagtccacagtctcctcgcgatgccgagctgatcgccgaagccaagctcctcaggcagcacaagggccgcctcgaggcaagaatgcagatactggaagaccataataaacagttggagtcacagttacatcgtctaaggcaattactggagcagccacaggccgaggccaaggttaatggaaccactgtgagcagtccttctactagcctacagcgatcagactcgagccagcccatgttgctgagagtcgtcggaagccaaactagcgacagcatgggagaggaagaccttctatctcctcctcaggacacgtcgactggccttgaggaagtgatggaacagctcaacaactcattcccctcaagccggggacacaacgtgggcagcctgttccacatggccgacgatttagggcgagccatggagtccctggtatctgtgatgactgacgaggaaggggcggaatag

SEQ ID NO: 186186 - DNA, 11046 bp, synthetic construct
  misc_feature 1..11046: note = Description of Artificial Sequence: Synthetic coding sequence
  source 1..11046: mol_type = other DNA
atgagcgaggtgagcagcgacgagcgggaggacgtgcagaagaagacttttaccaaatgggtaaacgcccagttctcaaaatttggcaaacaacatatcgagaacttgtttagcgaccttcaggatgggagacggctgctcgacctcctggaaggcctcactggtcagaaactccccaaggaaaaagggagcacaagagtccatgctctgaacaacgtgaacaaagccctgcgagtactgcaaaataacaacgtcgatctggtaaatataggctcgacagatatagtggatggcaaccataagttaacactgggcctcatctggaacattattctgcattggcaggtgaaaaacgtaatgaagaatattatggctggtctgcagcagacaaactccgaaaaaatcctattatcctgggtccggcagtcaaccaggaattatccccaggttaatgtcatcaacttcaccacgtcgtggagtgatgggttagcacttaacgcactcattcattctcacaggcccgatctctttgactggaattcagtagtctgccagcaaagtgccacacagcgcctggagcacgcatttaacatagccagataccagctggggattgaaaaactgctggaccccgaggacgtggacacaacttatcccgacaaaaaatccattttgatgtacatcactagcctgtttcaggtgctcccccagcaagtgagtatcgaggccattcaggaggtggagatgctcccccggccacctaaggtcaccaaggaggagcacttccagctccatcaccagatgcactacagtcagcagattacggtatcactggcgcagggttacgagaggacttcgtcccccaagccacgtttcaagagttacgcatacacccaggccgcctacgttacaacttccgatcctacacggtcaccattcccttcccagcacctagaagccccagaggataaatcctttggatcttctttgatggagagcgaggtcaacttggatcggtatcaaacagccctggaggaggtgctgagctggctcctgagcgcggaagacacactgcaggcgcagggagagatctctaacgatgttgaggtggtgaaagatcagtttcacacgcatgagggatacatgatggatttgacagcgcaccagggacgggtgggtaatatactgcaattaggctctaagttgattgggaccggcaagctgtccgaggacgaagaaacagaagtgcaagagcagatgaacctgctgaatagccgctgggagtgcctgcgggtggctagtatggagaagcagtctaacctgcaccgtgtgctcatggaccttcaaaaccaaaagctgaaagaattaaacgattggttaaccaagacagaggagaggacgaggaaaatggaggaagaacctctcggcccagacctcgaggacctgaaacgccaggtccaacagcacaaggtactgcaggaagacctggagcaggaacaggtaagggtcaatagtctgacccatatggttgtcgtggtcgacgaatcctctggagaccatgcaacagccgcactcgaagagcagctcaaagtcctgggcgatagatgggccaacatttgtcggtggaccgaagacagatgggttctactccaggacatcctgctcaagtggcagcgccttactgaggagcagtgtctgttcagtgcatggctctccgaaaaggaggacgcagtgaataagatccacaccaccggctttaaagaccagaacgagatgctcagtagtctgcagaagctcgctgtcttgaaggccgacctggagaaaaagaagcagtccatgggaaagctctacagtctgaagcaggatctcctaagtaccctgaagaataagtccgtgactcagaagacagaggcctggctggataattttgccagatgttgggataacttagtccagaagctggaaaaatccacggcgcaaatcagccaggctgtgaccaccacacaacccagtctgacccagaccaccgttatggaaaccgtgacaaccgtgaccacacgtgagcagatcttagttaagcacgcgcaggaggagctgccgcctcccccgccacagaaaaagcgacagattaccgtcgactctgaaatcagaaagagactggatgtagatataactgagctgcattcctggatcacacggagcgaggcagtgctacagtcccccgagtttgccattttcagaaaagagggtaatttctccgatctgaaggagaaagtcaatgccatagaaagggagaaggctgagaaatttcggaagttacaggacgcctcacggtctgcacaagccctggtcgagcagatggtcaacgagggagtaaacgccgattccatcaagcaggcctcagagcagctgaacagccggtggattgagttttgccaactcttgagtgagcgcctcaattggttagagtatcagaataatataatagcattttacaaccagttacagcagttagagcagatgaccacgaccgccgaaaactggttaaagatacaacccaccacaccttccgaaccgactgccatcaaatcacagctgaagatatgtaaggatgaggtgaaccggcttagcgatctgcagccacaaatcgagagactaaagatacagagcatcgctctgaaggagaagggccaggggccaatgttcctggatgcggatttcgtggccttcacaaatcattttaagcaggtgttctcagatgtgcaagcccgagagaaagagctccagacgatcttcgacacactgccccctatgagataccaggaaaccatgtccgccatccgtacatgggtgcagcaatccgagacaaagctcagtattccccaattgagcgtcacggattacgagatcatggagcagcggctgggggagcttcaggccctgcaaagtagtctccaggagcagcagagcggcctgtactatctgagcaccaccgtgaaggagatgtctaagaaagccccttctgaaatatcccgaaagtaccagtctgagtttgaggaaatcgagggcagatggaagaagctgtccagtcagctcgtcgaacactgccagaaattagaagagcagatgaataagctccgaaagattcaaaatcacatccaaaccctgaaaaagtggatggccgaagtggatgtatttctgaaggaggagtggccagctttgggcgactccgaaattctgaaaaaacagctgaagcagtgcagactgctggtgtctgatattcagacaatccagccaagtttgaactctgtgaacgaggggggccagaagattaaaaacgaggccgaaccagagttcgcaagcagactggagaccgaacttaaagagctcaacacccagtgggatcacatgtgccagcaagtctacgccaggaaagaagccttgaagggaggtctggaaaaaacagtgtccttgcagaaggatctgtccgaaatgcacgagtggatgacgcaggccgaggaggaatatctcgagagagacttcgagtacaagacccctgacgagctccagaaggctgtggaggagatgaagcgagcgaaagaagaggcccagcagaaggaagccaaagttaagctcctgactgaatcggtgaatagcgttattgcacaggcccccccagttgcacaagaagcgctgaagaaggaactggagactcttaccacaaactaccagtggctatgcacacgcttgaacgggaaatgtaagacgctagaagaagtgtgggcctgctggcatgagctattgtcgtacctggagaaagcgaataagtggctgaacgaggtcgagtttaagttgaagactaccgagaacatccctggaggagccgaagaaatcagcgaggtgctggattctctagagaatttgatgcgacacagtgaggataatcctaatcaaattagaattctggctcagaccctgacggacgggggggtgatggacgaactcatcaatgaggagcttgaaacgtttaattctcgctggcgagagcttcatgaggaggctgtgcggcgccagaagctgctcgagcaatcaattcaaagcgctcaggaaaccgagaagagtctgcacctgatacaggagagtttgacctttattgataaacagttggcagcttatatagcagacaaagtggacgccgctcagatgccccaggaggcacagaagattcagtccgatcttacctcccatgagatttctctcgaggaaatgaaaaagcacaaccagggcaaggaggccgcccagcgggtgctgtcacagattgatgtggcacaaaaaaagcttcaagatgtgagcatgaagttccgactcttccagaaaccggcaaactttgagcagcgcttacaggaatccaagatgattttagatgaggtcaaaatgcacctgccagccctggagaccaaaagcgtcgagcaggaagtagtgcaatcacagctgaaccattgtgtgaatttatacaagagcctgtcagaggtcaaatcagaggttgaaatggtgatcaagactggccggcagatcgttcagaaaaagcagaccgagaaccccaaggagttagacgagagagtgactgctctcaagctccactataacgagctgggtgccaaagtgactgaacgcaagcaacaattagagaagtgcctgaaactgtcacgtaagatgaggaaagagatgaatgtccttaccgagtggctggccgcaacagacatggagctcacgaagcgtagcgccgttgagggaatgccaagcaacttggattctgaggtggcctggggcaaggcaacccaaaaggagatcgagaaacagaaggttcacttgaagtcaattaccgaagtgggcgaggccctgaagacagtattggggaaaaaggaaacactggtcgaggataagttatcccttctgaactcaaactggatcgccgtgacctcccgagccgaagaatggcttaatctcttgctagaatatcaaaaacatatggagacattcgatcagaatgtggaccacatcacaaaatggattattcaagcagacaccctgcttgatgagtcagaaaagaagaaacctcagcagaaggaggatgttttgaaacgactcaaggctgagctaaatgacatccgaccaaaggtcgattctacccgtgaccaggctgccaatttgatggctaaccggggagaccactgtcgaaaactggtggagcctcaaattagtgaactgaaccatagattcgccgccatctcccacaggatcaaaaccggtaaggcatctattcctctcaaggagctggaacagtttaactccgacatccagaagctgttagagcccctggaagccgagatccagcagggagtcaacctgaaagaagaggattttaataaagatatgaacgaagacaacgagggcacagtgaaggagctcctacaaaggggtgacaatctgcagcaacgtatcacagatgaaaggaaacgggaggagattaagattaagcagcagttactgcagaccaaacataacgcactgaaggacctgagaagtcagcgcaggaagaaggctcttgaaatttcccatcagtggtaccagtataagcgccaggccgatgatctgttgaagtgtcttgatgatatcgagaaaaagttagcttccctaccggaacctcgtgatgagaggaaaattaaagaaatagacagggagttgcagaagaagaaagaggaactaaacgcagttcggcggcaggctgaagggctcagtgaagacggggccgctatggcagtggagcccacccaaatccaactgtcaaaacgatggcgcgaaatcgaaagtaaattcgcccagtttaggcgccttaattttgcccagatccacacagtacgagaagagacaatgatggtgatgactgaagatatgcctctcgaaatcagctacgtgcctagcacctatcttacggaaattacacacgtctctcaggcactccttgaggtggaacagctgctgaatgctcccgatctgtgcgcgaaggattttgaagatctatttaagcaggaagaaagcctgaaaaatatcaaggactctctgcagcagagcagtgggcgcattgacatcatccatagcaagaagaccgcggcgctccagagcgctacaccagttgaaagagtgaagctgcaggaagccctgagccagttagacttccaatgggagaaggtgaataagatgtacaaggatcggcagggtcgatttgaccgatcggtagaaaagtggcggagatttcattatgacataaagatatttaatcagtggctcacagaggccgaacagttcctaagaaagactcagatacccgagaattgggaacacgctaaatacaagtggtatttgaaggagctgcaagacgggattggacaacggcagaccgtggtccggactttgaacgcgactggagaggaaatcatacagcagagttcaaagactgatgcgtccatactgcaggagaagttgggctctttgaatctaagatggcaagaggtatgcaagcaactgtccgaccgaaagaagagactggaggagcagaagaacatcctgtcggagttccagcgtgatctaaatgaatttgtactgtggttggaagaagcagataatatcgcctccataccactggagcctggcaaagaacagcagcttaaggaaaaactggaacaggttaaacttctggtggaggagctccctctgcggcaaggcatcttgaagcagctcaatgaaaccggcggcccagtcctggtaagcgctcctatttcccctgaggaacaggacaaactcgagaacaaactgaaacagaccaacctacagtggattaaagtttcaagggctctaccagaaaaacagggggaaatagaagctcagataaaagacctaggtcaactggagaaaaaacttgaggatttggaagagcaactgaaccacctgctcctgtggctgtctccaatcaggaatcagttagagatctacaatcaaccgaaccaggagggtccttttgatgtcaaagagaccgaaattgctgtgcaggccaaacagcccgatgtcgaggagatcctgtcaaagggccagcacctttataaagagaaaccagcaacacagcctgtgaaacgaaaactggaggacctttcatcggaatggaaagcggtcaatagactgctacaggaactccgggctaaacagccggacctagcccccgggctgactacaattggcgcctctcccacccagactgtgacactggttactcagccagtcgtaacaaaagaaacagcaatttctaagctggagatgccatcatcactgatgctagaagtgcctgcccttgctgacttcaatagggcatggacagaattaacagactggctttccctgcttgatcaagtgattaaatcccagcgggtgatggtgggtgatctggaggatattaatgagatgatcatcaaacaaaaagctacgatgcaagatctggaacagagacgaccacaactagaggagctgattaccgctgcccagaatctgaagaacaagacctcaaaccaggaagcacgaaccattatcacggaccggattgagcgcatacagaaccagtgggatgaagtgcaagagcacttgcagaaccggcggcagcaactcaacgaaatgttaaaggattccacacaatggctggaggcgaaggaagaggccgaacaggtgttggggcaggctcgagccaagctggagtcctggaaagagggaccctacacagtggatgctattcagaagaaaataactgagaccaaacaattggctaaggacctcaggcagtggcagacgaatgtcgacgttgctaacgatctcgctctcaaactcttacgggactactccgccgatgatacacgcaaggtgcacatgattactgaaaacatcaatgcctcctggaggagcatccacaaacgggtatccgaacgggaagccgcattagaagaaacccaccgactgctccaacagtttccacttgatctggagaaatttctggcgtggctgacagaggcagaaacgaccgccaacgtcctccaggatgccacccgaaaagagcgcttacttgaggatagcaaaggggtcaaggagctcatgaaacagtggcaggatctccagggcgaaatcgaagcccacacagacgtctaccacaaccttgatgagaatagtcagaagatactacgcagtctggaggggagtgatgacgcagtcctgctgcaacgacgcctggacaacatgaacttcaaatggtctgaattgcgaaaaaaatcactcaatattagatcccaccttgaagctagctccgatcagtggaaaaggttgcatctcagtctgcaggaactactggtgtggctccaactaaaggatgatgaactttctcggcaggcccctataggtggcgattttcccgccgtgcagaaacagaacgacgttcacagagccttcaaaagggagctcaagaccaaggagccagtgattatgagtactttagagaccgtcagaatctttctgactgaacagcccctggaaggtctggaaaaactgtatcaggagccacgggagttgcctcctgaagagagagcccagaatgtaactcgcctccttcgaaaacaagccgaggaggttaatacagagtgggagaagctgaacctgcattctgccgactggcagaggaaaattgatgagaccctcgagcggctgcgagagctccaagaggctaccgacgaacttgaccttaagttaagacaagccgaagttattaagggatcttggcagcccgtgggcgatctcctgatcgatagccttcaggatcacctcgaaaaggtcaaagcactccggggtgaaatcgctcccctgaaggagaacgtatcccatgtgaacgatctggcacgccagctgacgactttgggcattcagctgtctccatacaatctgtcaactctggaggatctcaacactcgctggaagttgctccaggttgcggtcgaggaccgcgtgcggcaactgcacgaagctcatagggactttggaccagcatctcagcactttctctccaccagtgtccaagggccctgggagagagcaatcagccccaacaaagtcccctactacatcaaccatgaaacacagacgacttgttgggaccacccgaagatgacagaactttaccaatccctggctgacctgaataatgtgcgattcagtgcctaccgcaccgcaatgaagcttcggaggttacaaaaagcgttgtgcctggatctgttgtccctgtccgctgcatgcgacgcactggaccagcataatctgaaacagaatgatcaacccatggatatcttgcagattatcaattgcttgacaacgatttatgacaggctcgaacaagaacataacaatctggtcaacgtaccgctgtgcgttgatatgtgccttaattggttgcttaatgtatatgacaccgggagaactggccgcatccgtgtgctgtctttcaagaccggcatcatcagcctctgtaaagctcaccttgaggataaataccggtacctcttcaagcaggtggcatctagcaccggcttttgtgaccagaggcgattgggcctcctgctgcacgattcaattcaaattcccaggcagcttggagaggtggcatcatttggtgggtccaacatagaaccctccgtgagatcctgttttcagttcgcaaacaacaaacccgagattgaggccgcactgtttctggactggatgagactcgaaccacagagcatggtttggcttccagtgctgcaccgggttgctgcagctgagacggcaaaacatcaagcaaagtgcaacatttgtaaggagtgccctatcatcgggtttcggtatagaagcttgaagcacttcaactatgatatatgtcagtcctgttttttcagcggaagggtcgcaaagggacacaagatgcattaccccatggttgagtactgtactccaacaacatctggagaggatgtgcgggattttgccaaagttctaaaaaataagttccggaccaaaagatatttcgcaaagcaccctcgcatgggatacctgcccgttcaaaccgtgctggagggtgataacatggagacacccgtgactctcattaacttttggcctgtggacagtgctccagcttcatctcctcagctgtcacacgatgatacccacagccggatcgagcactacgctagtcgattggcggagatggagaatagcaatggctcttacctgaatgactccatctctccaaatgaatcaattgatgacgagcatttactaattcagcactattgtcagagcctgaatcaggattccccactgtcacaaccgcgaagccccgcgcaaatacttattagcctggagtctgaagagcgcggagagctggaacggatcctggccgacctagaggaggaaaacaggaacttacaggccgaatatgaccgcctgaagcagcagcatgagcataaaggactctcacctcttccatccccacctgaaatgatgccgacgagcccgcagagcccgagggatgcagagcttatcgcggaggctaaactgcttaggcagcataagggcaggctggaggcaagaatgcagattctggaagaccataacaagcaacttgaaagccaactgcatcgcctgaggcagcttctcgagcagcctcaggccgaagccaaggtgaacggcaccactgtgagcagcccgagcactagtcttcagagaagtgattcatcccagcccatgctactccgtgtggtcggctcacagactagcgactcaatgggtgaggaggaccttctgagccctcctcaagacacatccaccgggttggaagaggtgatggagcaactgaataatagctttcccagttcccgaggcagaaatacaccaggcaagccaatgcgtgaggacacgatgtag

SEQ ID NO: 186187 - DNA, 7035 bp, synthetic construct
  misc_feature 1..7035: note = Description of Artificial Sequence: Synthetic coding sequence
  source 1..7035: mol_type = other DNA
atgaccgagatgatcctgctgatcttcttccccgcctacttcctgaacgctgttcggcgccagaagttgctggagcaaagcatccaaagtgcccaggaaacggaaaagagcctgcatctaattcaggagtcattgacattcattgataaacagctggccgcctatatcgctgacaaagtggatgccgcccagatgccccaggaggcccaaaaaattcagagcgacctgacaagtcacgaaatatccctggaggagatgaaaaagcataatcaggggaaggaggccgcccagcgggtactttcccagatcgacgtggcccagaagaaactccaggacgttagcatgaaatttcgccttttccaaaaaccggcaaacttcgaacaacgtttacaggagtccaagatgatccttgacgaggtcaagatgcatctgcctgctttggagacaaaaagcgtagaacaggaggtcgtccaaagtcaactgaatcactgtgtaaacctctacaagtccctgagtgaggtgaagagcgaggtcgagatggtcatcaagacaggccgccagatcgtgcagaagaagcagacagagaatcccaaggagctggacgaacgcgtcaccgcactgaaactacactacaatgagctcggcgccaaagtgaccgaacggaagcagcaattagagaaatgtcttaaactctctcggaaaatgagaaaagagatgaacgtgcttactgaatggctggccgctaccgatatggagttaactaagcgttcggcagtcgagggcatgccatcaaacttggacagcgaagtggcctgggggaaggccacccaaaaggaaatcgaaaaacagaaggtgcatctcaagagcatcacagaagttggagaggccctgaaaaccgtcttaggaaaaaaagagacgctggttgaagataaactcagcctgctcaacagtaactggatcgcagtgacttccagagccgaggagtggctcaacctgctcctcgaatatcagaagcacatggaaaccttcgatcaaaatgtggatcatataaccaagtggataattcaggctgacacgctactggacgagtcagaaaaaaaaaagcctcagcaaaaggaagacgtactgaagcgcctcaaggcagaacttaatgatatcaggcccaaagtggactctacccgcgatcaagctgccaacctgatggcaaacaggggtgaccactgtcggaaactggtcgagcctcagatatccgaactaaaccatcggtttgccgcaatatcacacagaattaagactgggaaagcaagtatccccttaaaggagttggaacagttcaacagcgacattcagaagctcctcgagcctttagaggccgagatccaacaaggagtgaatctgaaagaggaggacttcaataaagacatgaacgaggacaatgaaggcaccgttaaagagcttctgcagaggggcgacaatctgcagcagaggataaccgatgaacggaagagggaggaaattaagattaaacaacaactgctccagactaagcataacgctctcaaggacctacgcagccaaaggcggaagaaagccctggagatctcacatcagtggtaccagtataagcgccaggccgatgatctgctcaagtgcctggatgacattgaaaagaaactggcttccctgccagaacctcgcgacgaacggaagatcaaggaaattgaccgcgaactccagaagaaaaaggaggaactcaatgccgtgcgccggcaggctgagggactctctgaagatggggccgcaatggccgtcgagccaacacagattcagctttctaaaaggtggagggagatagagtccaaatttgcccaattccggcggctgaattttgctcagatccatacagtcagagaggagactatgatggtgatgacagaggacatgcctcttgaaatatcttatgttccctcaacctacctcacggaaataacacatgtttcacaggcgttgctggaggtggagcagctcctaaatgctcctgatttgtgcgcaaaggatttcgaggatcttttcaagcaggaggaatcacttaagaatataaaagactcgctccagcagagctccggcagaattgacattattcacagcaaaaagacggccgccctgcagagtgccactcctgtcgaaagggtgaagcttcaggaagccctgtctcaattagatttccagtgggagaaagtgaacaagatgtataaagaccgccagggcaggtttgaccggtctgtggagaaatggcgaaggttccattacgacatcaaaatttttaatcaatggctcacggaggcagagcagtttctgcggaagacacagataccagaaaattgggaacacgccaagtataaatggtacctgaaggagctccaagacggcatcggccagcgccagaccgtggtaaggacactcaacgcaaccggcgaggagatcattcaacaatcctcaaagacggacgcgagcattctgcaggaaaaactgggctctctgaatctaagatggcaggaagtctgtaagcagctctccgaccgaaagaagaggctcgaggaacagaaaaacattctctcggagttccagcgggacttgaatgagtttgtgctttggctggaagaggccgataatatcgcctcgattcccctggaacctggaaaagaacagcagttaaaggagaagctggagcaggtgaaattgctcgttgaagagctgccattgcgacaggggatcttgaaacagctgaatgaaaccggtggccctgtccttgtgagcgcgccaatttccccagaggaacaggacaagctggagaataaactcaaacagactaatctccagtggataaaagtgtcaagggctctccctgagaagcagggcgaaatcgaggctcagatcaaggatctgggacagttagagaaaaagctggaggatttagaggaacagttgaatcatcttctgctctggctttcccccatccgtaaccagcttgagatctacaatcagcctaatcaggagggcccctttgatgtgaaagagaccgaaattgccgtgcaagccaaacagcctgatgtggaagagatactcagtaaaggacagcatttgtataaggagaagcccgctacacagccagtgaagaggaaacttgaagatctgtcatctgagtggaaggcggtcaaccggctccttcaggaactcagagctaaacagcctgatctggctccgggcttgaccaccattggagcatctccaacccagacggtcacattagtcacacagccagttgttaccaaggagactgctatctcaaagctggaaatgccgtcttctttaatgttagaagttcctgcgttagcagattttaacagagcatggacagagctgacagactggctcagtctgctcgaccaggtcatcaagagccagagagtgatggttggcgatctggaggatatcaacgaaatgattatcaagcaaaaggccacaatgcaagatctcgagcagaggaggccacagctcgaagagctgatcacagctgcccagaatttgaaaaacaagaccagcaatcaggaggctcgtactattattactgatcgaatcgagcggatccagaaccaatgggacgaggtccaagagcaccttcagaatcggaggcagcagttgaatgagatgttaaaggattctacccagtggctagaagccaaggaggaagccgagcaggtgctaggccaggccagagcgaagctagagagttggaaggaaggaccatacacagtagatgccatccagaagaagataactgagacaaagcagctcgccaaggatctgaggcagtggcagaccaacgtggatgtggccaacgatctcgccctgaagcttctgcgggactactctgcagatgataccagaaaagtccacatgattactgaaaacattaacgcctcttggcggagtattcataaaagagtctcagaacgggaagctgctctcgaggaaactcataggcttctgcaacaatttccactcgatctcgagaagttcctcgcctggctgacagaggctgaaacgactgcgaacgtccttcaggacgccactcgaaaagagagactgctggaagactccaaaggcgttaaggaactcatgaagcagtggcaggacctccaaggagagatagaagcgcacacagacgtgtaccacaatctcgacgaaaacagtcagaaaattctgcggtcattagagggctccgatgacgctgtgctgctgcaacggagattagataacatgaattttaaatggtctgagcttagaaagaaatccctgaacatccgcagtcacctcgaggcgagctctgatcaatggaaaagattgcatctctccctgcaggaactgttggtatggttgcaactgaaggatgatgaacttagcaggcaggcccccatcggtggcgacttccccgccgttcagaaacaaaatgatgtacaccgggcttttaagagagaattgaaaaccaaagagcctgtgattatgtccacgctggagaccgtacgcatcttcctcacagaacagccactggaaggtttggagaaactctatcaggagccccgggagctgccgcccgaggagcgcgcccaaaacgtgactcgactgttgcggaagcaggcagaagaggtgaatacagagtgggaaaaactgaacctccattcagcggattggcaacgcaagatcgatgagacattggaaaggctacgcgagctgcaggaggccaccgatgagctcgatctgaagctgaggcaggcagaagtgattaagggttcatggcagcccgtgggcgacctgttgattgatagcttacaggatcatctggagaaggtaaaggcacttaggggcgaaattgctccactcaaagagaacgttagtcacgtcaacgatctggcgaggcagctgacaacgctggggattcagctgtctccttacaatctgagtactctagaggatctaaacacgcgatggaagctcctccaggtggccgtggaagatagagtccgacagctgcacgaggctcatcgagatttcggtccggcctctcagcacttcctatccacctcggtgcagggaccttgggagcgcgctattagccccaataaagttccgtactatattaatcatgaaactcagactacatgctgggaccaccctaaaatgaccgaactttaccagtccctcgctgacttgaataatgtccggttcagcgcgtacagaaccgccatgaagctcagaaggcttcagaaggccctctgtctggatctgttgtccctttccgcagcctgcgatgcccttgaccagcacaatctaaaacagaatgatcagccaatggacattttgcaaatcatcaactgcctgaccaccatctatgatagactagagcaagagcataacaacctagttaatgtccccctttgtgtggacatgtgtcttaattggctcctgaatgtgtacgatactggccggaccggtcggatcagagttctctctttcaaaacgggcataatttcgctctgtaaggcccaccttgaggataagtaccgctatctgtttaagcaggtcgcaagctcgaccggtttttgtgatcaacggcggctgggcctgttattgcacgacagtattcaaatccctagacaacttggggaagtggcctcctttgggggcagtaacatcgagccatccgtaagatcatgtttccagttcgctaacaacaaaccggagatcgaagctgcactatttctcgattggatgagactggagccgcagtctatggtttggcttccggtcctccaccgcgtggccgctgctgagactgcaaagcatcaagctaagtgtaacatctgcaaggaatgtcccattatcggatttcgataccggtctttgaagcactttaattacgatatctgccaatcttgctttttttccgggagagtggctaagggacacaaaatgcactatcccatggtggagtactgtacacccacaacttcaggagaggatgtgagggacttcgctaaggtcctaaaaaacaaattccgtaccaagagatactttgcgaaacaccccaggatgggctatctgccggtgcagacagttctcgaaggcgataatatggaaaccccagtgacactcattaatttttggcccgtggactccgcgcctgcttcttcacctcaactatcgcacgatgatacacattctcggatcgagcactacgcaagtcgtttggccgaaatggaaaactccaatggcagctatctgaatgattcgataagtccaaatgagagtatcgacgatgagcatctcctgattcagcactattgtcagtctctgaaccaagactcacccctttcacagccccgctccccagctcaaatccttatatccttagaatccgaagagcgaggcgaacttgaacggattctggcggatctggaagaggaaaatagaaacttacaagcggaatatgatcgtttaaaacagcagcatgagcataaggggctgtcaccgctcccaagcccgcctgaaatgatgcctacgagccctcagtcgccccgggacgctgaactaatcgctgaagccaagctgctgcgacagcacaaaggtcggctcgaagccaggatgcagatcctggaggaccacaataaacagctggagagccagctgcacaggctccgccaactactggagcagccgcaggcggaggccaaagtcaatggtactacggtctcgagcccttccaccagtttgcaacggagcgatagctcacagcccatgcttctgagagtcgtcgggtcccagacgtccgattcgatgggtgaggaagaccttctctcgccaccccaggacacgtctactggactagaggaagtcatggagcagctaaacaacagttttccttccagcagaggcaggaatacacccgggaagcccatgagggaagacacaccctag

SEQ ID NO: 186188 - DNA, 7026 bp, synthetic construct
  misc_feature 1..7026: note = Description of Artificial Sequence: Synthetic coding sequence
  source 1..7026: mol_type = other DNA
atgagcgcccggaagctgcggaacctgagctacaagaaggccgtgcgtcgtcagaaactgctggagcagtcaattcagtccgcacaggagacagaaaaatctctacacctaatccaggagtctctgacctttatagataaacagctagcggcttacattgccgacaaagttgatgctgcacagatgccccaagaagctcagaagatccagagcgacctgacatcccatgagatctctctggaagagatgaaaaagcacaaccagggaaaggaagccgcccagcgtgtgctgtcccaaattgatgtggctcagaaaaaactgcaagacgtgtctatgaaatttcgtctcttccagaaacctgcaaacttcgaacagcgacttcaggagtccaaaatgattctagatgaagtgaagatgcacctccctgctttggagacaaaatctgtcgaacaggaagtcgttcaatcccaactgaatcactgcgtaaacttgtataagagcctaagcgaagtgaaatcagaggtagagatggtcatcaaaaccggtcggcagatcgttcaaaagaaacaaactgaaaacccaaaagaattagatgaacgagtaactgccctcaagctgcactataacgaactaggagccaaggttaccgaaagaaaacagcaactggagaagtgcctcaagttgtccagaaaaatgcggaaggaaatgaatgttctgacggagtggctggcagccacggatatggaactaacgaagcggagtgcagtggagggcatgccatctaatctggattcagaggtggcatggggcaaagcgacgcagaaggaaattgaaaagcagaaagtccacctcaagtcaataaccgaggtcggtgaggctcttaaaacagtgcttggcaagaaggaaactctggtcgaagataaactcagcttgcttaactccaattggattgcggtgacaagccgcgctgaagagtggctgaatctgctgctcgagtatcagaagcacatggagacatttgatcagaacgtcgaccatataacgaaatggatcattcaagcggacacactactggacgagagcgagaagaaaaagccccagcaaaaagaggacgtgctcaagcggctgaaggccgagttgaacgacatccgaccaaaagtggactctacgagagatcaggccgcaaacctgatggcaaatcggggggatcactgccgcaaactggtagaaccccagattagtgaactaaatcaccgttttgccgcaatcagtcacagaataaagacaggaaaggcaagtattcctttgaaggaacttgagcaatttaacagcgacatccagaaacttctcgagccacttgaggctgagatccagcagggcgtgaatctgaaagaagaagactttaacaaggatatgaatgaagataatgaggggacagtaaaagaattgctgcaacgaggcgacaatctacaacagcggattaccgacgaacgaaagagggaggaaatcaagatcaagcagcaacttctgcagacaaagcacaacgcccttaaggatttacgctctcagcggaggaagaaagccctggagatttctcaccagtggtaccaatataaacgccaagctgatgacctgctaaagtgcctcgatgatattgaaaagaaactggcaagtctgcccgagcctcgggatgaaaggaagatcaaagagatcgacagagagttgcaaaagaagaaggaggagttgaacgctgtccggcgtcaagcggaagggttgagtgaagacggcgccgctatggctgtagaaccgacacaaatccagctgagcaaaagatggagggagatcgagtccaagtttgcgcaattcagaaggctgaatttcgcacagattcacacagtccgtgaggagaccatgatggtaatgaccgaagacatgcccctggaaatctcttatgtcccttcaacctacctgaccgagattacccatgtcagccaggcactcctggaagtcgaacagttgctgaacgcaccggacctttgcgcaaaggattttgaagacctctttaaacaggaggagagtctgaaaaacatcaaagactccctgcagcaatcttctggcaggatcgatattatccactccaagaagacggccgccctgcaatccgccacacctgtcgaacgagtcaaattacaggaggcgttaagccagctggacttccagtgggagaaagtcaataaaatgtacaaagaccgccaggggaggtttgaccgaagcgtggaaaaatggcgaagattccactatgatatcaagatttttaaccagtggctgaccgaggcggagcagttcctgagaaagacccagattcctgaaaactgggagcacgccaagtataaatggtatttgaaggagctgcaggacgggatcggtcaaagacagaccgtggttcgcacgctcaatgcaaccggagaggagatcatccaacagtctagcaagacagacgcctcgatcctgcaagagaaactgggttccttaaacctgagatggcaggaagtgtgtaaacagctgtcagatcgcaaaaaaagattggaagagcagaagaatatcctgtcggaattccaaagggacctgaatgagtttgtgctctggttggaggaagctgataacattgccagtattccgctggaacctggtaaggagcagcagctgaaagagaaactggagcaagtgaagttgcttgtggaagagctgcctctgcgacagggtattttaaaacagctgaatgagacgggaggaccagtgctggtgagtgcaccaatctcccccgaggagcaggacaagctcgagaacaagctgaagcagaccaacctccagtggattaaggttagcagagccttgccagaaaagcagggagagatcgaagcccagatcaaggacctcgggcagctggaaaaaaagctggaagatctcgaggaacaattgaatcatctgctgctgtggctgagcccaattcgaaatcagctcgaaatttataaccaaccaaaccaggagggaccgtttgacgtcaaggaaaccgaaatcgccgtccaggccaaacagcccgatgtggaggaaattctcagcaagggccagcacctctacaaagaaaagcccgcaacacagccggtcaagagaaagctcgaggacctttcatccgagtggaaagccgttaatcgattgcttcaagagctgagagcgaaacagcctgatcttgcaccaggactgactacgattggagcttcccccacccagacggtcaccctcgtgacccagcctgtcgtcaccaaagagactgctatcagcaaacttgagatgcccagctcactcatgctggaagtgcctgctttggcagacttcaatagggcatggactgaacttaccgactggttgtcactgttggaccaggttattaaatcccagcgagtgatggtgggcgacttggaagacattaacgagatgattattaaacaaaaggcaaccatgcaggatctagagcagagacggccacaactcgaagagctgattactgccgcccagaatctcaaaaacaagacgagtaaccaggaggctcgtacgataattactgatcgaattgaacggatccagaaccagtgggacgaagttcaggaacacttacagaatcgccgacagcagctcaatgagatgctcaaggactctacacagtggttagaggccaaagaggaggcggagcaagtccttggacaggcaagggctaagctggagagctggaaagaggggccttacaccgttgatgctattcagaagaagattaccgaaacgaaacagctcgcgaaggatctccggcagtggcagacaaacgttgacgtcgccaatgacctcgcgcttaagcttctcagagattacagcgccgatgataccaggaaagtgcacatgattactgagaatataaatgctagctggaggagcatccacaaaagggtctctgagcgggaggccgcactggaggagacacataggctgcttcagcagttcccactggatctggaaaaatttctcgcttggctgacagaggcagagaccacagccaatgtgcttcaggatgcaacccggaaggagcggttgctcgaagacagcaaaggagtgaaggaattgatgaaacagtggcaggatctgcagggtgagattgaggcccataccgacgtgtaccacaacctcgacgaaaattcgcagaagattttgcgctcccttgagggtagcgatgacgcagtgctcttgcagcggagactcgataatatgaactttaaatggtcggaacttagaaaaaagtcccttaatatccggtcacacctcgaggcctccagtgaccagtggaaaagattgcatctctccctgcaggaactgctggtgtggttacagcttaaggatgatgaattgtcccgacaggcgccgatcggcggagactttcctgccgttcagaagcagaatgacgtacacagagcttttaaaagggagcttaaaactaaggagcctgtgatcatgtcaactctggagaccgtgaggattttcctcacggaacaaccactggagggtctggaaaaactgtaccaggagccaagagagctgccaccagaggagagagcgcagaacgtaaccaggcttctgcggaagcaagccgaggaagtgaataccgagtgggaaaaattgaacctgcacagcgctgactggcagagaaagattgacgagactctcgagcggctgagagaactgcaggaggcaactgacgagctggatctgaagttgcgacaagccgaagttatcaagggcagctggcaacccgtgggggacctgcttatagacagcctgcaggaccatctggaaaaggtgaaggccctaagaggcgagattgccccgttgaaggagaacgtcagtcatgttaacgaccttgcccgccagctgactacactggggatacagctatctccgtacaacctcagcaccttggaggaccttaatactcggtggaagctccttcaggtggcagtcgaagaccgcgtgagacagctgcatgaggctcatcgcgacttcggcccagccagtcagcattttctctcaacatccgtccagggaccatgggagagggctatctcccccaacaaggtgccctattacatcaaccacgagacccagactacatgttgggaccacccaaaaatgacagagctttatcagagcctggccgacctgaacaatgttcgtttctccgcctatcgcacagctatgaaactcaggagacttcagaaggcactttgcttggatcttctttctcttagtgccgcttgtgatgctctggaccagcacaacctgaaacagaacgaccaacccatggacattttgcaaatcataaactgcctcacaacgatctacgacagactagagcaggagcataacaacttggttaatgtgcctttgtgtgttgatatgtgcctaaattggttgctgaatgtgtatgatacaggccggaccggtcgcatccgggtgctgagttttaagaccggaataatttccctgtgtaaagcacatctagaggataaatacagatatcttttcaagcaggtggctagcagcaccggtttctgtgaccagcgccgactggggctgttgttgcatgatagcatacagatcccacgacagctaggcgaggtggccagtttcggagggtccaacatagagccctcagtgaggtcttgctttcaattcgcaaacaacaaacccgaaatagaagcagccctgtttctcgactggatgcggctggagccgcagagtatggtgtggctgccagtgctgcatcgcgtggcggctgctgaaacagccaaacaccaagcaaaatgtaacatctgtaaggagtgccccataattggttttagatacagaagcctcaaacatttcaattatgatatctgccagagctgctttttctctgggcgtgtggccaagggccataagatgcattaccctatggtggagtattgtacgcccacgacaagcggagaggacgtgcgagatttcgccaaagtccttaagaacaaatttcgtaccaagcggtacttcgcgaagcatcctcgcatgggatatttgccggtgcaaacagtcctggaaggcgataacatggaaacacccgttaccctcatcaacttttggcctgtggactcagcccccgcatcctcaccacagctgtcccacgacgacacacactcgcggattgagcactacgctagcaggctggctgagatggaaaacagcaatggatcttacctgaatgacagtatttcaccgaacgagtctatagatgacgagcacctcctgattcagcattactgccagtccctgaatcaggactctcctctgagtcagccgaggtccccagcacaaatcctcattagtctggaaagtgaagagcgcggagagctggaacggattctcgcggatcttgaggaggaaaatcgcaatctacaggccgagtacgaccgtcttaagcagcagcacgaacacaagggactgtcccccctaccctccccgcccgagatgatgccaacctcaccacaatccccacgcgatgccgaactgatcgcagaagctaagctactgaggcaacataaaggccggctcgaagcacggatgcagatattggaggatcacaacaagcagctcgagagccagctgcacaggcttaggcagctattggaacagccccaggcagaagctaaagtcaacggaacgactgtctcctccccctctactagcctccaaagaagcgatagctcacaacccatgctgctgcgcgtcgtggggtcccagactagcgattcaatgggagaagaggacctcctctcccccccgcaggacacatcaacaggcttagaggaggtgatggagcaactgaataatagcttcccttctagcaggggccgtaacacacctggcaagccgatgcgcgaggacactccatag

SEQ ID NO: 186189 - DNA, 1854 bp, synthetic construct
  misc_feature 1..1854: note = Description of Artificial Sequence: Synthetic coding sequence
  source 1..1854: mol_type = other DNA
atgcgggagcagctgaagggccacgagacccagaccacctgctgggaccatcctaaaatgaccgagctgtaccaaagcctagccgatctgaacaacgtacgttttagtgcttaccggactgccatgaagcttcgcagattgcaaaaagccctgtgcctggaccttctatcgttgagcgctgcctgtgacgcattagaccaacacaacctgaagcaaaacgatcagcccatggatatcctacaaatcattaactgtctcaccaccatttacgaccgccttgaacaggagcataataacctcgtgaacgtaccgctgtgcgtcgacatgtgcttgaattggctcctcaacgtatacgatacaggccgtacaggccgtattagagtgcttagcttcaagaccgggataattagcttatgcaaggcccatctggaggacaagtacagatatctgttcaagcaagtcgcttcttccaccgggttctgtgaccagagacgacttggactcctgcttcacgactctatccagattccaagacagctgggtgaggtcgctagcttcggcggctccaatattgaacccagtgtgaggtcttgttttcagttcgctaataacaaaccagaaatcgaagcagccttatttttggactggatgcgcctggagcctcagtccatggtctggctaccggtgctccatcgagtggcagccgccgagaccgccaaacaccaggcaaagtgcaatatttgcaaggagtgtccaatcatagggtttcgatacaggtcacttaagcactttaactacgacatatgtcagagctgttttttctctggacgagttgccaaaggtcataagatgcattaccctatggtggaatactgcacacccactacaagcggtgaagacgtgagagattttgctaaagttctgaagaacaagttccgtacaaaaaggtacttcgcaaagcacccaaggatggggtacctccccgtgcagactgtcctggaaggcgacaacatggagacacctgttaccctaattaacttttggccagtcgactcagcaccagcttcatcccctcaactctctcacgatgatacacacagtcgtatcgaacattacgcatccagactcgcagagatggagaacagtaatgggagttatcttaacgactccatttcccccaatgagtccattgatgatgagcacctgctgattcagcattactgccagagtcttaatcaggattcacctctgtcgcagccgaggtcaccagctcaaatcttgattagtctggagtccgaagagaggggcgagctggagaggatactggccgacctggaggaggagaatcgcaacctccaggcagaatacgataggcttaagcaacagcatgagcacaagggactaagcccattgccttctcctcccgagatgatgccaaccagtccgcagagcccacgagacgcggagttgatcgccgaggccaagctactgcgtcagcataagggaaggctagaagccaggatgcaaatcttggaagatcacaacaaacaactggagtcccaattgcatagactgcggcaattgctggagcagccacaggcagaagccaaagtcaacgggaccaccgttagttcaccgagcaccagcctgcagagaagcgacagctctcagcctatgcttcttagggtcgtaggcagtcaaacctctgattctatgggggaagaagatctactctcccccccccaggataccagcaccggcttagaagaagtcatggagcagttgaacaattcattccctagcagccgcggacgcaatacccccgggaaaccaatgagggaagataccatgtag

SEQ ID NO: 186190 - DNA, 3678 bp, synthetic construct
  misc_feature 1..3678: note = Description of Artificial Sequence: Synthetic coding sequence
  source 1..3678: mol_type = other DNA
atgcccagcagcctgatgctggaggtgcccgccctggccgacttcaacagggcttggacagagttgacagattggctctccttgctcgatcaggtcatcaagtcgcagagagtgatggtgggcgacctggaggatattaatgaaatgatcattaaacaaaaggctaccatgcaggacctagagcaacgtagaccacagctggaggagcttatcacagccgcccagaatctgaagaataagacttccaatcaagaggcaagaactatcatcacagatcgaatagagagaatacagaatcaatgggatgaggttcaggagcacctacagaaccgacgccaacagctgaacgagatgctaaaagacagtacccagtggctggaagctaaggaggaggctgagcaagtgctagggcaggcccgagctaagctggaatcatggaaagagggaccatacaccgtcgacgccatccagaagaagatcaccgaaaccaagcagctggctaaggatctccgccagtggcagactaatgtcgacgtggcaaacgatctagcactgaagttactaagagattatagcgctgatgacacccggaaggtacacatgataaccgagaatataaatgcctcttggcgctccatccataagcgcgtttccgaaagagaggcagccctcgaggaaactcaccgactgctgcagcagtttcccttagacctggagaagtttctggcctggctgacagaagccgaaacaacagccaatgttctccaggacgctacccggaaggaacgtctgctggaggacagcaagggcgtgaaggagctgatgaagcagtggcaggaccttcagggcgagattgaggcccacacagatgtttatcacaacctggatgaaaatagccagaaaatcctgaggtctcttgaaggttccgacgatgcggtcctgctccagaggaggttggacaatatgaacttcaaatggtcagagctgaggaaaaaatccttaaacatcaggagtcatctggaggccagctcagatcagtggaaaaggcttcacctgagcttacaggagctgctggtatggctccagctgaaggacgacgagcttagtagacaggcccccatcggaggggatttcccagccgtgcagaagcagaacgacgtccaccgagcctttaagcgagagttgaaaacaaaagagccagtgataatgagtactctggagaccgtccggatcttcctgaccgaacaaccactggagggactggagaagctataccaagaacctagggagctgccacctgaggagcgcgcccaaaatgttaccagactcttacggaaacaagccgaggaggtgaataccgagtgggaaaagcttaatcttcattccgctgactggcagcgaaagattgatgaaacacttgagagactccgtgaacttcaagaggctaccgatgagttagatctgaagctacgacaggcagaagtcatcaagggcagttggcagcctgtgggggacctcctgatcgatagcctgcaggatcacctggagaaagtaaaggctctacgcggggagatagcccccttgaaagagaatgtgtcccacgtgaacgacctggctagacaacttactactctgggaattcaactgtccccttacaacctgagcaccctagaagatttgaatacccggtggaagttgctccaggtggctgtagaggaccgcgtgcgtcaactgcatgaagctcacagggattttgggcccgcttctcagcacttcctgagcacctctgttcaggggccttgggagagggccatatccccaaataaggtcccctattatattaatcacgagacacaaacaacctgctgggaccaccctaaaatgaccgaactgtaccaaagtctggccgacctcaacaacgtccgattctctgcttatcgcaccgcgatgaaattgcggaggctccagaaggccttgtgcctggacctgctgtctttgagtgccgcgtgcgacgcactcgatcagcataacctcaagcaaaatgaccagccgatggacatcctccaaatcataaactgtcttacaaccatatatgataggctggagcaagaacacaacaatttggtgaacgttccgctgtgcgttgatatgtgtttgaactggctgttaaatgtgtacgacactgggcgcaccggcagaatacgcgtcctgtcctttaagacagggatcatcagcctctgcaaggcgcatctcgaggacaagtatcggtacctgtttaagcaggtggcatcctccaccggtttctgtgaccagcggcggcttggactgctgcttcacgactcgatccagattcccaggcagttgggcgaagtcgcatccttcggtggctccaatatcgaaccaagcgtcagatcttgtttccagttcgccaataacaagccggaaatcgaggctgcgctgttcctggactggatgaggctcgaacctcaaagcatggtctggctgcccgtgctacatagagtcgcggccgccgaaactgccaagcaccaggccaaatgcaacatctgtaaggagtgtcccattatcggcttcaggtaccggagcctgaagcacttcaactacgatatttgccagagttgcttcttttcaggacgagtcgccaaaggccacaagatgcattacccaatggttgagtactgtacaccaaccacatctggggaagacgtgagggattttgccaaagtgctgaaaaacaagttcaggaccaaacggtatttcgccaagcatcctcggatgggctatctgccagtgcagactgtgttggagggtgataatatggagacacccgttacactcatcaatttttggccggtggactctgctcccgcatcatcaccccagctatctcacgatgatacgcacagtcgcatcgaacattatgctagcagactggccgaaatggagaactcaaatggctcatacttgaacgacagcatctctcctaacgagtctatcgatgatgagcacttgctcattcagcattattgtcaaagcttgaatcaggatagccctctcagccagcccaggagccccgctcagatcctgatcagtctggagagcgaggagaggggtgagctggaacggattcttgccgatctagaggaagagaatcgaaatcttcaggccgagtatgacagactgaagcagcagcacgagcataagggccttagtccattgccctcacctcccgaaatgatgccgacgtccccacaatccccaagggacgcagaattgatcgccgaggccaaattacttagacagcataagggcaggctggaggctaggatgcagattctggaggatcacaataagcaactcgaatcccagctacaccgcctgcgacagttgctggagcagcctcaggctgaggcgaaagtgaatggaactactgtgagctccccatctacttcactgcagagatccgattcaagccagcccatgcttctacgtgtggtgggcagccagacgagtgactccatgggagaggaagatttgctctcaccaccccaggatacatccacaggtctggaagaggtcatggaacagttgaacaacagctttccatcctcgcgggggagaaacacgccaggcaaaccaatgagagaggacacaatgtag

SEQ ID NO: 186191 - DNA, 1908 bp, synthetic construct
  misc_feature 1..1908: note = Description of Artificial Sequence: Synthetic coding sequence
  source 1..1908: mol_type = other DNA
atgcgggagcagctgaagggccacgagacccagaccacctgctgggatcatccgaagatgactgagttgtatcaatcgctggctgacctcaacaacgttagattttccgcataccggacagccatgaaacttcgccgccttcagaaggccttgtgcctggatctactgtccctcagtgcagcttgtgatgctctcgatcagcacaatctgaagcagaacgaccagcccatggacattttacagataataaactgtcttacaacgatatatgataggttggagcaggagcataataacctggtaaatgtcccgttgtgcgtcgatatgtgtctgaattggctgctcaatgtatatgacaccgggcgaactggccggatcagagtactttcattcaaaaccggcatcatttcgctgtgtaaagcgcatctggaggataagtacagatatctgttcaagcaggtagcttcatctaccggcttctgtgatcaacgacgtctgggactcctgctgcacgactcgattcagattcctcggcaactgggtgaagtggcgagctttgggggctctaacatcgagcctagcgtccggagttgctttcagtttgcgaacaacaagcccgagatcgaagcagcactgttcctcgattggatgaggctggagccccagtcaatggtgtggcttcccgtgctgcacagggttgccgctgccgagaccgcaaaacatcaagcgaaatgcaatatttgcaaagagtgtcctatcattggtttccgttacagaagcctgaagcatttcaattatgatatctgtcagtcctgtttcttctccggtcgggtggccaagggtcacaagatgcattaccctatggtggagtactgtaccccgactactagcggcgaggacgtaagagacttcgccaaggtgctgaagaataaattccgcactaagagatactttgctaaacaccccagaatggggtatctccccgtgcagaccgtcctagaaggcgataatatggagacgcctgtgaccctgattaatttctggcccgttgatagcgcaccggcttcaagtcctcagctgtcacacgatgacactcactccaggatcgagcactatgcctcgcgactggctgagatggaaaactccaacggaagttatctgaatgacagtatatctccgaatgaatccatcgatgatgagcacctgctcatacagcactattgccagagtttaaatcaggattcgcctctgtctcagcctagaagtcccgcacaaatactgatttctttagaatccgaggagagaggggagctggagagaattctggccgacctggaggaggagaacaggaacctgcaggccgaatacgatcggcttaaacaacagcacgagcataagggcctgtcgcccctgccttctcctccagaaatgatgcccacatcaccgcagagtccacgtgacgccgagctcattgctgaagctaaattgttgaggcagcataagggcaggctcgaggctcgaatgcagatcctggaagaccataataaacagctggagagccaactgcatcgcttgcggcagctgctcgagcagccacaggccgaagccaaggtaaatggcaccactgtgtcttcaccttccacatctctccagagaagcgacagctcgcagccaatgctcctcagggtggttggctctcagacttctgatagcatgggggaggaagatctactgtcaccaccgcaagatacctcaacgggactggaagaggtgatggaacagctgaataattccttcccctcctctagaggccataacgtaggatcactgtttcatatggcggatgatctgggtcgtgctatggagtccctggtgtcagtcatgaccgacgaggagggagctgagtag

SEQ ID NO: 186192 - DNA, 3732 bp, synthetic construct
  misc_feature 1..3732: note = Description of Artificial Sequence: Synthetic coding sequence
  source 1..3732: mol_type = other DNA
atgcccagcagcctgatgctggaggtgcccgccctggccgacttcaacagagcctggactgagctcactgattggctgagtttgcttgaccaggtgatcaagtcacagcgggtcatggtcggagaccttgaagacattaacgagatgattatcaaacagaaagctaccatgcaggacctggagcagaggagaccccagctcgaggagctgattacggctgctcaaaatctgaaaaacaaaacaagcaaccaagaggcccgcactataattaccgataggattgagaggatccaaaatcagtgggacgaagtacaggaacacctgcaaaacagacgccaacagctgaacgagatgctcaaggacagtacccagtggctcgaagctaaggaagaggccgaacaagtcctgggacaggccagagctaagttggaatcttggaaggaagggccgtatacagtcgatgcaatccagaaaaagattaccgagacgaagcaactcgcgaaagatctgaggcagtggcaaacaaacgtggacgtggcaaatgacctcgctttgaagctgcttagggattacagtgccgatgacacccggaaagtgcatatgatcaccgaaaacatcaacgcctcttggaggtcaattcacaaacgtgtgtcggaaagagaggcagctctggaagagacacatagactcctgcagcaattccctctagacttggagaagttcctggcctggctcaccgaggcggaaaccacagccaatgtgttacaggacgccactagaaaagagcggctgttggaggactcaaaaggcgttaaggaactcatgaaacagtggcaagacctccagggcgaaatcgaggctcacactgacgtgtaccacaacctggacgagaatagccagaaaatcctcaggtctctagaaggctctgatgatgccgtactgctccagcggagacttgataacatgaactttaaatggagcgagcttcgcaagaagtccctcaacattcgatcccacctcgaggcatcatcagatcagtggaaacgcttgcacctctcgctccaggaactcctagtgtggcttcaacttaaagacgacgaactcagtcgacaggcgccaattggaggcgacttccccgccgtgcagaagcagaacgacgtgcaccgcgcatttaagcgcgaactgaaaacaaaggagcctgtgattatgagtacactggagacagtgagaatcttcttaacagagcagcctctcgagggactggagaagctctatcaggagcccagggagctgccccctgaagagagggcacagaatgtcacgcggctcctacgaaaacaggcagaggaagtgaatacagagtgggaaaagttgaacctgcacagtgctgactggcagagaaaaatagatgaaacccttgagagactgagggagttgcaagaggccaccgacgaactggacctgaagttgcgtcaagccgaggtgattaagggctcctggcagcccgtcggcgatttacttatagactcactccaggaccacctggagaaggtgaaagctctgcgtggcgaaatcgccccattgaaagagaacgtctcacacgtcaatgacttggcccgtcagctgacgacactggggattcagttgagcccatataacctgtccaccctcgaagacctcaataccaggtggaagctgctacaagttgcagttgaggatagagtccggcaactgcacgaggcccaccgagattttggccccgcgtcccaacatttcctgtcgacctccgtgcagggcccatgggagcgggcgattagcccgaataaggtaccgtactatatcaaccatgaaacccagactacgtgctgggatcaccctaagatgaccgaactttaccagtccctcgccgacctgaataacgtcaggttttctgcctacagaaccgcaatgaagctaaggcgcctccagaaagctttatgcctggacttgttatccctcagtgccgcgtgtgacgcactcgaccagcacaacctaaagcagaatgaccagcctatggacatcctccagattatcaactgtctgactaccatttatgaccggctcgagcaggagcacaataacctggtgaatgtgcccctgtgcgtcgatatgtgcctgaattggctgcttaacgtgtacgacacagggagaaccggtcgcatccgagtgctttctttcaagacaggcatcatttccctgtgcaaggcacacttggaggataagtaccgatacctgttcaaacaagtcgcatcatccacaggtttttgtgatcagagaagacttggtctcttactccacgattctattcagatacctcgacagttaggcgaggtggcaagcttcggaggaagcaacatcgagccctccgtgcggtcttgttttcaatttgcgaacaataagcccgagatcgaggctgctctcttcttggattggatgagacttgagccgcaaagcatggtctggctacctgtcttgcatagagtggctgctgccgagaccgcaaagcaccaggcaaagtgcaatatctgtaaggagtgccctatcatcgggttccggtaccgaagcctcaaacacttcaactatgacatctgtcagagttgctttttcagtggtcgcgtagctaaggggcacaagatgcattatcctatggtggagtattgcaccccaaccacctccggagaagacgtccgagacttcgccaaagttcttaagaataaattccgaaccaaaagatactttgccaagcatcctcgcatggggtacttgcccgtccagacggtcctagagggagataatatggaaacccccgtcacccttataaacttttggccggtggattcagcccccgcctcctctccacagctgtcacacgacgatactcattctagaatcgaacattatgcctctcgactcgcagagatggagaactctaatggcagttatctgaacgactccatctctcccaacgagagcatcgacgatgaacatctgctgatccaacactattgccagagtctgaaccaagacagccctttgtcccaacctcggtctcccgcccagatacttatctctctcgagtccgaggaaaggggcgaactcgaaagaatcctggcggacttggaggaagagaaccgaaatctgcaggcggagtacgaccggcttaaacagcagcatgaacataaagggctgagtcccctgccctctcctcctgaaatgatgcccacttcgcctcaatctccgagagacgccgagttgatcgccgaggctaagctgcttcgtcagcacaagggtcgcctggaagccaggatgcagatcctggaagaccataataagcaactggagtcgcaacttcatcggctcagacagttattagagcagccacaagctgaggccaaggtgaatggaacaacagtctctagcccctcaacatcgcttcagagatcagacagcagtcagccaatgttgcttcgcgtagtaggttctcaaacatcagattctatgggagaggaggatttgctctctccacctcaggacactagcactggattggaggaggtgatggaacagcttaacaacagcttcccgtcaagccggggtcataatgtcggatcactgtttcatatggccgacgacctcggacgcgccatggagagcctcgtgtctgtcatgaccgacgaagaaggagcggagtag

SEQ ID NO: 186193 - DNA, 11034 bp, synthetic construct
  misc_feature 1..11034: note = Description of Artificial Sequence: Synthetic coding sequence
  source 1..11034: mol_type = other DNA
atcctggacgagcgggaggacgtgcagaagaagaccttcaccaagtgggttaacgcgcagtttagtaaatttgggaagcagcacatcgagaatctgttctctgatctgcaagatgggcggcgactcttggatctgttagaaggcctgactggtcaaaagctgcctaaagagaaagggtcgactagggttcacgcccttaacaacgtcaataaggctctgcgggtgctccagaacaacaatgttgatctggtgaatattgggagcacagatatagtggatggcaaccacaaactgaccttgggactcatctggaacatcattcttcattggcaggtcaagaatgtgatgaaaaacatcatggctggcctgcagcagaccaactcagagaaaattttactgtcttgggtcaggcagtccactcggaattacccccaggtgaatgtgataaactttacaacgagctggagcgatgggttggcacttaatgcactcattcactcccaccgtccagacttattcgactggaattccgtggtgtgtcagcagtccgccactcaacgactggaacatgctttcaacatcgcccgttaccaactcggcatagagaaattgctggacccagaagacgtcgataccacttaccctgacaagaagtctattctaatgtacatcacaagtctgttccaagtcctccctcaacaggtgtctatcgaggctatccaggaagtagagatgctgcctcgccccccaaaggtcaccaaggaagagcatttccagctccatcatcaaatgcactatagccagcaaatcacagtctctttggcgcagggctacgaacgtacgtcttcccctaaaccgcgctttaaatcatacgcatatacccaggctgcctatgtgaccacctcagatccaacacggtcccctttcccctcacagcacctcgaggcacccgaagataaaagctttggcagttccctcatggagtccgaagtgaacctggatcggtaccagaccgcattggaggaggtcttaagttggctgctgagcgccgaggatacgcttcaggcacagggcgagataagtaacgacgtcgaggtagtgaaggaccagttccacacacatgagggctatatgatggatctgaccgctcaccagggccgtgtaggcaacatcctccaacttggaagcaagcttatcgggactggaaaactctccgaggatgaggagaccgaagtgcaagagcagatgaatctgctcaattcacgctgggaatgcctcagggtggcgtcgatggagaaacagtccaatctgcaccgggtgctgatggatctgcaaaatcaaaagttgaaggagctgaacgactggctgaccaagaccgaagaacgaactcggaagatggaggaggagccgttgggacccgaccttgaagatctgaagagacaagtccagcagcacaaagtgctccaagaagacctggaacaggaacaggtgagggtaaacagcctcacacacatggttgtggtggtggacgaaagcagtggcgaccacgcaaccgcagcactggaggagcagctgaaagtgctgggcgacaggtgggccaatatctgcagatggactgaggatagatgggttctcctgcaggacatcctgctgaagtggcagaggctgaccgaggagcagtgcctcttcagcgcctggctgtcagaaaaggaagacgccgtcaacaaaatacatacaacgggctttaaggatcaaaacgaaatgctatcctcgctgcagaagctggccgtcctgaaggctgacctggaaaagaaaaagcagagtatggggaaattatactccctcaagcaggaccttcttagcactctaaagaacaagagcgtaacccagaaaacggaagcatggctcgataactttgcccggtgctgggacaacttagttcagaaattggagaagtctactgctcagatctcccaggctgtgacgactacgcaaccgagcctcacacaaacaaccgtcatggagacagttacaaccgtgacaactcgggagcagattctggtcaagcacgcgcaggaagagctgcctccgcctcccccacagaaaaaacgacaaattacagtggactcagaaatacgcaaaagactggacgtggatatcaccgaactacactcctggatcaccaggtctgaagcagtactccagtcccctgaatttgctatctttagaaaggagggcaatttcagcgatttaaaggagaaagtgaacgcgatcgagcgggagaaggccgagaaatttagaaagctccaggacgcctctcgcagcgcccaggcactagtagagcaaatggtcaacgagggcgtgaatgcagactctataaagcaggcctctgaacagttgaattctcggtggattgagttttgtcagctactgtcagagagactaaactggttggagtatcagaacaatattatcgctttctacaatcagctgcaacagctcgagcagatgaccaccacagctgaaaactggctaaagattcagcccacaaccccaagcgaaccaacagctattaaaagtcaacttaagatatgtaaggacgaagtgaataggctaagcgacctgcagcctcagattgagagactcaagattcagagcatcgcattaaaggaaaagggacagggccctatgttcctcgacgccgactttgttgcattcactaaccactttaaacaggtgttttccgatgtgcaggcccgggaaaaagagcttcaaactatcttcgacactctgcctcccatgcggtaccaggagaccatgtctgccattagaacgtgggtgcagcagtccgagactaagctgtcaattcctcaactgtcggtgaccgattacgagatcatggagcagcgcctgggggaactccaggcccttcagtcgtcactgcaagaacaacagagcgggttgtattacttgagtacaacagtcaaggaaatgtccaaaaaggccccttccgagataagtcgaaaataccaaagcgagttcgaggagatcgaagggcgctggaagaaattaagctctcagcttgtggaacattgccagaaactggaagaacagatgaacaaactgagaaagatccagaaccatatacagacactgaagaagtggatggctgaggtcgacgttttcctcaaggaggagtggcctgcgctcggagatagtgagatcctgaagaaacagctgaagcagtgtcgactgctggtgtcggacatccagaccattcagcctagtctgaactctgtcaatgaaggcggtcagaagattaaaaacgaagccgagcccgaattcgctagtcgactggagaccgagctaaaggaactgaatactcagtgggaccacatgtgtcaacaagtttacgctcgaaaggaagccctgaaaggtgggctggaaaaaactgtctcactgcagaaagacctgagcgagatgcacgaatggatgactcaggctgaggaagaatacctggagcgcgattttgagtacaagacccccgacgaactgcagaaagctgtcgaagagatgaagagagcaaaggaggaggcacagcagaaagaagccaaggtaaaactgttgacagagagtgtcaactcagtgatcgcacaggctccccctgtcgcccaagaggctttaaagaaggagttggagaccctgaccaccaactatcagtggctatgtactcgcctgaacggaaagtgtaagactcttgaagaggtctgggcctgctggcatgagcttctctcttacctggaaaaagccaataaatggctcaatgaagtcgagttcaaactaaaaacaaccgaaaacattccagggggagccgaggagattagcgaggtcctggacagtctggagaatctcatgcggcactccgaggacaaccctaaccagatacggatcttggcccaaacccttaccgatggcggagtgatggacgagctaatcaatgaggaactggaaacatttaacagccgatggcgcgagcttcacgaggaagcggttaggcgacagaagctccttgagcagtctatccagagcgctcaggagaccgaaaagtcattacatcttattcaggagagtttaaccttcatagataaacaactggccgcgtacatagccgacaaagtggacgctgctcaaatgccccaagaggcacagaaaatccagagtgacctcacgtctcatgagatttctctcgaggagatgaagaaacacaaccaggggaaagaagcagcccaacgcgtcctgtctcagattgacgtggcacagaaaaagttgcaagacgtcagcatgaagttccgattgtttcaaaagcccgcaaacttcgagcagcgactccaggaatccaagatgatactggatgaggtcaaaatgcacttacccgctctggaaactaagtctgttgagcaagaggtggtgcagagccaactgaaccattgcgtgaatctatacaagtcactatctgaggtcaagtccgaagttgagatggtgatcaaaactggcaggcaaatagtgcagaagaaacagactgagaatccgaaggagttggatgagagggtgaccgccctcaaactccattataacgagctgggagccaaagtaactgaaagaaagcaacagctagagaagtgcctaaagctctctaggaagatgagaaaggagatgaacgtacttactgagtggctggcagcaacagacatggagcttactaagaggagtgcagttgagggcatgccaagcaatctcgacagtgaggtggcctgggggaaggctacgcagaaggaaattgaaaaacaaaaagttcacctgaaatctatcacagaggtcggagaggcactaaaaaccgtcctagggaagaaggagacacttgtcgaagacaaattgagcctgttgaattccaattggatcgcagtgacaagtagggccgaggagtggcttaacctcctgctggaataccagaagcacatggagacattcgaccagaatgttgaccacattaccaaatggattatccaggcagataccctgctggacgaatcagagaaaaagaagccccaacagaaagaagatgttctgaaacgtctcaaagcagaacttaacgacatcaggcccaaagtcgactcaacccgggatcaagctgcaaatttaatggctaaccggggcgatcactgtaggaagctagtggagcctcagatctcagagctgaaccaccgctttgcagccattagtcacagaattaaaactgggaaagcgtccattccgctaaaagagctggaacagttcaacagcgatatacagaaattacttgaacccctggaggctgagatccagcaaggtgttaatctgaaagaggaggacttcaacaaagacatgaacgaagataacgagggaactgtgaaagagctcctgcaacggggtgacaatctgcagcagagaattactgatgaacgcaagagagaggagattaaaatcaagcagcagttactgcaaacaaagcataatgctctgaaagatttgcgcagtcagcgacgcaaaaaagcactagagatatcgcatcagtggtaccaatacaaacgtcaagctgatgacctgctgaaatgcctggacgacatagaaaaaaaacttgcatctctcccagagccccgtgacgaacggaaaataaaggagatcgacagagagcttcagaaaaaaaaggaagagttaaacgcagtgaggcgccaggctgagggcttatcggaagatggagccgccatggccgtggagccaacacaaattcagctctccaagcgatggagagaaatcgagagcaagttcgctcaatttaggcggctgaatttcgcacagatccataccgtgcgggaagaaacgatgatggtcatgactgaagacatgccgctggagatctcatacgtgccatcgacatatctcactgaaatcacacacgttagtcaagccctactcgaggttgaacagctgctgaatgcccctgacctgtgtgcaaaggattttgaggacctattcaagcaagaggaatctctcaaaaatataaaggattccttgcagcagtcctctggtagaattgatatcatccatagtaaaaagaccgcagcactgcagtccgctacacccgttgagagggtcaaactacaggaagccctgagccaactggactttcagtgggagaaagtgaacaagatgtataaggatcggcagggaaggttcgaccgcagtgtggagaaatggcgccgcttccactacgatatcaagatcttcaaccagtggctgacggaagccgaacaattcttgcggaagacacagattcccgagaactgggagcacgctaaatataagtggtacctgaaagagctccaggatgggatcggccaaaggcagacggtggtccggacccttaacgccaccggcgaggagataatccagcagtcttctaagacagacgcctccatcctacaagaaaagctggggtccctcaacctccgctggcaggaagtgtgcaagcagttgtctgacaggaagaaacggctcgaggagcagaaaaacattctgtctgaattccagcgcgatctcaacgagtttgtattgtggctagaggaggctgacaatattgccagcattccattggagccaggaaaagagcagcagctaaaggagaagctggagcaggtcaaattgcttgtcgaggagctcccactccggcagggaatcttaaaacagctcaatgaaacaggagggccagtgttggtctcagcccccattagtccagaagagcaagacaagctcgaaaataagctcaagcagactaatctgcaatggatcaaggtgtctcgagctctgcctgagaagcagggcgaaatagaagcccagatcaaagatttaggccagctggagaaaaaattagaggacctggaagagcagctaaaccatctgttactgtggctgtctcccataagaaatcagctggagatctataaccaaccgaatcaggagggaccttttgacgtcaaagagacggagattgccgtacaggcaaagcaaccagacgtggaagagatccttagtaaagggcaacacctctataaggaaaagcctgcgacacagcctgtgaaaaggaagctggaagacctctccagcgaatggaaagcagtgaaccgattgctgcaggagttacgagccaaacaacccgacttagcccccgggttaactaccataggggccagcccaacacaaacagtgacgctcgtgacacagccagtagtaaccaaggaaaccgccatctcgaaactggagatgccctctagtctcatgttggaagtgcccgctctggctgatttcaatcgcgcctggactgaactaaccgattggttatccttactcgaccaagttataaagagccagagggtcatggtcggagatttggaggatattaatgagatgatcatcaagcagaaagctacgatgcaggatctagaacagcgtagaccacagctcgaagagctgatcactgctgcccagaatctaaagaataagacatcaaatcaggaagccaggactatcatcaccgaccgaatcgagcgcatacagaatcagtgggatgaggtccaagagcacttgcagaatagaaggcaacagttgaacgaaatgctgaaagactccacccagtggctggaagcgaaagaggaggctgaacaggtgttgggccaggctcgcgcaaagctcgaatcttggaaagagggaccttacacggtggatgcaatccagaaaaagatcaccgaaactaagcagctggcgaaggatttgcgccagtggcaaacgaatgtagacgtggccaatgacctcgctcttaagctcttgcgcgactactcagccgacgacactcggaaagtgcacatgattactgagaacattaatgcttcatggagatccattcacaagcgagtgagcgagagagaggctgccctggaggagacgcacagactattgcagcagtttcctttggatctggaaaaatttctagcttggttgacagaggccgagactacagccaatgtgctgcaggacgccacacgtaaggagcggttgctcgaagactcaaagggtgtaaaggaacttatgaagcagtggcaggacttgcagggagaaattgaggcccacacagatgtgtatcacaacttagacgaaaacagtcagaagatcctacggtccttagaagggagtgacgatgctgtgctgttgcagcgtcgcctcgataacatgaattttaagtggtccgagcttcgtaagaagtccctcaacatccggtcccatcttgaagcctcctccgatcagtggaagagactgcatctcagcctgcaagagctcttagtatggctgcagctgaaggacgatgaactgagtcggcaggcccccatcggaggagacttccccgccgtccagaaacagaacgatgtgcacagggccttcaaaagagagctcaaaactaaagagcctgtgatcatgtcaaccctcgagacagtgaggattttcctgaccgagcagcctttggagggcctggagaagttgtaccaggaaccacgggagctcccccccgaagaacgcgcccagaacgttactcgcctgctgcgtaaacaggctgaagaggtgaacacagagtgggagaagctgaacctacactccgctgactggcaacggaaaatcgacgaaactctggaacggctccgggaactacaggaagctaccgacgaactagatcttaagctccggcaggctgaggtgatcaagggctcctggcaaccagtgggagatctgcttatcgatagcctgcaggaccacctggagaaagtcaaagccctccggggcgaaattgccccccttaaggaaaatgtctcacacgtgaacgatctggcccggcagctgacaactctgggcattcagctttctccgtacaacctgtccactttggaggatctcaacacccgttggaagctgctgcaggtggccgtggaggaccgggtgcggcagttgcacgaggctcaccgtgatttcggacccgcgagtcagcactttctttcgaccagtgtgcaggggccatgggagcgggccatctctccgaataaagtaccatattacataaatcatgaaacccaaacaacttgctgggatcacccgaaaatgaccgaattgtatcagtctctggcagatttgaataacgtgaggttttccgcttatagaactgctatgaaattgcgaaggctccagaaggcactctgtcttgacctgctgtccctctctgcagcttgtgatgctctcgatcagcataacttgaagcagaacgatcagcccatggacatcctgcagataatcaactgcctgaccactatctacgaccggctggaacaagaacacaacaatctcgtcaatgtccctctgtgcgtcgacatgtgcctaaactggctgctcaatgtctacgatacaggtagaacaggtaggattcgagtcctgagcttcaagacagggatcattagcttgtgtaaagcgcacctggaggacaaatatcgttatctcttcaaacaagtggcttcatccaccggcttctgcgatcagagacgccttgggctgttgctgcacgatagtatacagatacccagacagctgggagaggtcgcaagcttcggcggatcaaatatcgagcccagcgtgagatcttgcttccaatttgccaataacaagccggagattgaagccgccctgtttcttgattggatgaggctggagccgcaatccatggtgtggctaccagtgttgcatagagtggctgccgctgagacagccaagcatcaagccaagtgtaatatttgcaaggagtgtccaattatcggcttccgctatagaagcctcaagcacttcaactatgatatctgtcagtcatgtttctttagcggccgggtggccaagggccacaaaatgcattaccccatggttgagtactgcactcccacaacatcaggggaggacgtgcgggatttcgccaaagttctgaagaacaaattcaggaccaaaagatactttgctaaacacccaagaatgggatacctgcccgtgcaaactgtattggaaggtgataatatggagacgcctgtcaccttaattaacttctggccagtcgattcagccccagccagctctccccagttatcacacgacgacactcactcccgaattgagcattacgcttccaggctggccgaaatggaaaactcaaatgggtcatatctaaatgatagtatctcgcctaatgaaagtatagacgacgagcacttgttgatccaacactactgccagtccctaaatcaggattctccactgtctcagcctcgaagccccgcacagattttgataagcctggaaagtgaagaaaggggagagctagaacgcatcttggctgacctcgaggaggagaaccgcaacctgcaagcggagtacgaccggctcaaacagcagcatgaacataaaggtctttcccctttaccttctccgcctgagatgatgcctacgagtccacagagccctcgagacgccgagcttattgccgaggctaagctactcagacaacacaaaggccgcctggaagcgcgcatgcaaatactcgaggatcataacaaacagctggagtcccagttacaccgacttcgccagctgctagagcagccccaggctgaagccaaggtcaatgggaccaccgtatcttctccctctacctcgttacagcggtctgactccagccagcctatgttgttgcgagttgtgggtagccaaaccagcgactcgatgggggaagaagacctgctgagtccaccacaggatacgagtacagggcttgaagaggttatggagcagctgaataacagttttccatcttctagaggtaggaacacaccaggcaaaccaatgcgagaggatactccctag

SEQ ID NO: 186194 - DNA, 10689 bp, synthetic construct
  misc_feature 1..10689: note = Description of Artificial Sequence: Synthetic coding sequence
  source 1..10689: mol_type = other DNA
atgaagaacatcatggccggcctgcagcagaccaacagcgagaagattctcctgagctgggttagacaaagcactagaaactatcctcaggtcaacgtgattaacttcactacctcctggagcgatggccttgccttgaatgccttgatccattcacatagaccggatctcttcgattggaattcagtggtatgccagcaatcagcgacacagcgcctcgagcacgcattcaacatcgccaggtaccagctcggcatcgagaagctgctcgaccctgaggatgtggataccacttaccctgacaagaagagtatccttatgtacatcacgagtttgtttcaggtcctccctcagcaggtgtccattgaggccatccaggaagtagaaatgctgcccaggccacccaaggtcaccaaggaagagcactttcagctgcatcaccagatgcactacagccaacagatcaccgtgtcccttgcccagggttatgagcgtacatcgagccctaaacccaggtttaagagttatgcctatacccaggctgcttatgtgaccacgtcggacccaacccgatctccattcccctctcagcacctggaagcacccgaagacaagagtttcggaagttccttgatggaatccgaggttaacctcgaccgctaccagactgctctggaggaggtactgagctggctgttaagtgctgaagataccctacaggcccagggcgagatctcgaatgacgtcgaagttgttaaggatcaattccatacccacgagggatatatgatggatttgaccgcgcatcaggggagagtggggaatatcctgcagctcggatctaaattgattgggacaggcaagttgtcagaagatgaagagactgaggtgcaggagcagatgaatctcctgaatagtcgatgggagtgtctacgcgtggccagtatggagaaacagagtaatctgcacagggtgctgatggatctccaaaatcagaagctgaaggaattgaacgactggctaaccaagacagaggagaggacacgaaaaatggaggaggaaccccttgggccagacctggaggatcttaaacgacaagtgcagcagcacaaagtgctgcaagaagatcttgagcaggagcaagtcagagttaactcccttactcacatggtggttgtagtggatgagtcatctggtgatcacgctaccgcggccctggaggagcagcttaaagtacttggggaccgatgggctaacatatgcaggtggaccgaggatcgatgggtgttgctgcaagacatcttgcttaagtggcagcggcttacagaagaacagtgtctgttctcggcctggttatcagaaaaagaagatgctgttaataaaatacacaccacaggatttaaggaccaaaatgaaatgctgagttctctgcagaagcttgcggtgttgaaggcagatttagagaaaaagaaacagagcatggggaaactttatagcttgaaacaggacctactgagtaccctgaaaaataaaagcgtgacgcagaagacagaagcgtggctcgacaattttgcccggtgctgggacaacttagtgcagaagttggaaaagagtacagctcagattagccaggccgtgactacaacccaacctagcctcactcagacaacagtaatggaaaccgtgacgactgtgacaacaagggagcaaatcctggttaaacatgcgcaggaggagctgcctcctccgcctccccagaaaaagcgccagatcactgttgattctgaaattcgaaagcgtttagacgtcgacataaccgagctgcactcatggatcacgagaagcgaagctgtcctccagtcgccagagttcgctattttcagaaaagagggtaattttagtgacttaaaggaaaaagtcaacgcgatagagcgggagaaagcagaaaagtttagaaagctgcaggacgctagtcgctctgctcaggccctggtggaacagatggtgaacgagggtgtcaatgctgattcgatcaaacaggctagcgaacaacttaactccaggtggattgagttctgtcagctacttagcgagcgactgaattggttggagtaccagaataatatcatagctttttataatcaattacagcaactggagcagatgacaacaaccgcagaaaattggctgaagatccagcctacaactccctctgagccaacagcgatcaagtcccaactgaagatctgtaaggacgaggtgaaccgcctttccgatctacagcctcagattgagcggctgaagattcagtccatagctcttaaggaaaaggggcaaggccccatgttcctcgatgcagatttcgtcgcatttactaatcactttaagcaagtcttcagtgacgtccaggcacgtgagaaagagttgcaaaccattttcgacactttaccacccatgcggtatcaggaaactatgtccgctatcagaacctgggtgcagcagagcgagaccaagctgtcaattccgcagttaagcgtgacagactacgaaatcatggaacagcggctcggagaactccaggccctgcagtcctctctgcaggaacagcagtccggattatattatttatccacaacagtaaaggagatgagcaaaaaggctccctctgaaatatcacggaagtaccaatctgagttcgaggaaattgagggccggtggaagaaactgagttctcaactcgtcgaacattgccagaagcttgaggaacaaatgaataaactacgcaagatacagaaccacattcagaccctgaaaaaatggatggccgaggtggatgtgttcttgaaagaagagtggcctgcccttggggacagcgagattcttaaaaagcaactgaaacagtgtagattgttagtgagtgatatacagacaatccagccatctctgaattccgttaacgagggtggccagaagattaaaaacgaggcagagcctgaattcgcatctaggctagaaactgagctcaaagaactcaatacacagtgggatcatatgtgtcaacaggtttatgcccgcaaagaggctctcaaaggcggcctggagaaaactgtgtcgctccaaaaggacttatccgaaatgcacgagtggatgacacaggccgaggaggagtacctggaacgtgatttcgagtacaaaaccccggacgagctccagaaagccgtcgaggaaatgaagagagccaaggaggaagctcaacagaaagaagccaaggtgaaactgctgactgaaagcgtgaattcagtaatagcccaagcccctcccgtggctcaggaggctctcaaaaaggagctggaaaccctcacaaccaactatcaatggctctgtactcgtctgaatggaaagtgtaaaacccttgaggaggtatgggcttgttggcacgagctactgagctacttggagaaagcaaacaagtggctcaatgaggtggaattcaaactgaagaccacggagaacattcccggaggtgccgaggaaatttcagaggttcttgacagtctggaaaacttgatgaggcacagtgaggacaacccgaaccagattcggatcctggcacagaccctgacagacgggggagtgatggacgagctgatcaacgaggagctggaaacctttaattcaaggtggagagaactgcacgaggaagcagttaggcggcaaaagcttcttgagcaatccatccaatcagcccaggagacggaaaaatcactgcatttgatacaggagtccctgaccttcatcgataagcaattggccgcgtatatcgcggacaaagtggacgcagctcagatgccacaggaagcacagaaaatccagagcgacctcacgagccacgagatttctcttgaagagatgaaaaaacataaccagggtaaggaggctgcacaaagagtcttgtcacaaatagatgtcgcacaaaaaaaattacaagacgtaagtatgaaattcaggttgttccaaaagccagctaacttcgaacagaggttacaggagtccaaaatgatacttgacgaggtcaaaatgcatctgcccgctcttgaaacaaaatcagtggagcaggaggtcgttcagagtcagcttaaccattgcgtgaacctctataaaagcctctctgaggtgaagagcgaggtagagatggtcatcaagaccggacggcagatcgtccaaaaaaaacaaacagagaatcccaaagagctggacgagagggtgactgctctgaaactgcattacaatgaactgggagctaaagttactgaaaggaaacagcagttagaaaagtgcttgaagttgagtaggaagatgagaaaggagatgaacgtcctgacagagtggctggctgcaaccgacatggagctgacaaagagatccgcagttgagggcatgcccagtaatctggactctgaagtcgcctggggaaaggcaacacaaaaagaaatagagaaacagaaagtacatctgaagagtataactgaagtaggagaagcactgaagacagtactgggaaagaaggagactctcgttgaggacaaactgtctctgctcaatagcaactggattgctgtgacatccagggccgaggagtggttgaatctcctgctcgagtaccagaagcatatggaaacctttgaccagaatgttgaccatatcaccaagtggatcatccaagcagatacgctgctcgacgaaagcgagaaaaagaaaccccaacaaaaggaagatgttttaaaaagactaaaggcagaactgaatgatattcgcccaaaagttgatagcaccagagatcaggctgcaaacttgatggcaaatagaggcgaccactgtagaaagttagtagaaccacagataagcgagctgaaccaccgtttcgccgctattagccaccggatcaagaccggcaaggcctccattccactgaaagagttagagcagttcaattccgatatccagaagctgctggagcccctcgaagccgaaatacagcaaggagtaaacctgaaagaggaagactttaacaaagatatgaacgaagataatgaagggaccgtcaaggagttattgcagaggggcgacaaccttcagcagcggatcacagatgaaaggaagagagaagagatcaaaatcaaacaacagctccttcagaccaagcacaatgcgctcaaagaccttaggtcccagcggagaaaaaaggctctggagataagccaccaatggtaccagtacaagagacaggcagatgatcttctaaaatgtctcgatgacattgagaagaagctggcatctctgcctgaaccgcgagatgagcggaaaatcaaggaaatcgatagggaactgcagaaaaagaaggaagaactgaacgcggtccgccggcaggctgaagggctaagtgaagacggggcagccatggccgttgagccaacacaaattcaactgtcaaaacgatggcgagagatagaatctaaattcgctcagtttaggagacttaattttgcacaaattcacaccgttcgcgaggagactatgatggtgatgaccgaggacatgccgctggagatctcctacgtgcctagtacttatctgactgagatcactcacgtttctcaggcactgctggaagttgagcagctccttaacgcacccgatctgtgtgcgaaggattttgaagatctgtttaaacaggaagaatccctgaagaatataaaggattctctacagcaatcctccggtcgcatcgacatcatccactcaaagaagaccgccgccttgcagtccgctaccccggtggaacgcgtgaaactccaggaagctctatcacagttggacttccagtgggagaaggtgaacaagatgtataaggaccgtcagggacgctttgaccggtcagtggagaaatggcgcaggtttcactacgatattaagatattcaaccagtggcttacggaagctgaacagttcttgaggaaaactcagatacccgaaaactgggaacacgcaaaatacaagtggtacctaatagcactcaaagatggaatcggccaaagacaaactgtcgtgcgaacgttaaacgccaccggggaggagataatccagcagtcaagcaaaactgatgcctccatcctgcaagaaaaactgggtagtctgaatctccgctggcaggaagtgtgtaagcagctgtccgataggaagaagagactagaggagcagaagaatattctctcagaattccagcgcgatctgaacgaattcgttctgtggctggaggaggcagataatatcgcttccataccactggagcccggcaaggagcagcagctaaaggagaaactggagcaggtcaagctgttggtggaggaactccctctgcgacagggaattctgaagcaactcaacgaaacgggtggcccagtgctggtcagtgctcccatctcacccgaagagcaggacaagctggagaataaactcaagcagaccaacctgcagtggatcaaggtctcccgtgctctacccgaaaagcagggtgagatcgaggcccaaatcaaagatctgggacaattagaaaagaagcttgaagatcttgaggagcagcttaaccatttgcttctttggctatcaccaattaggaaccagctggagatctataaccaacccaatcaggagggacctttcgatgtgaaggaaaccgaaatcgccgtgcaggcaaaacagcccgatgtggaagaaattttgtcaaagggacagcacctatacaaggagaaaccggccactcagccagtgaaaagaaaactggaggacctttcaagcgaatggaaagctgtaaatcggctgctacaggagctgcgcgcaaaacagcccgatctagcaccaggtctcactaccattggagcatcccccacacagaccgttactttagtaacccagcctgtagtaaccaaggaaaccgcaatctcaaaactggagatgccatccagcctgatgctcgaggtaccagccctggcagatttcaatagggcttggacagagctgactgactggcttagcctgctcgaccaggttatcaaaagccaacgggtgatggtgggagatttagaagatataaatgagatgatcattaaacagaaagcaaccatgcaggacctggagcagcgccggccccaactggaggaactgatcaccgcagcccagaacctgaaaaacaaaactagcaaccaggaggctagaaccatcataacagatcgcatagagaggattcagaatcagtgggatgaggtgcaggagcatctgcagaaccgccggcagcagctcaacgaaatgctcaaagattctacccagtggctagaagccaaagaggaagcagagcaggttctaggacaggctcgcgccaaacttgaatcctggaaagagggcccatatacggtggacgccatccagaaaaagatcacagaaaccaagcagcttgccaaagacctcaggcagtggcaaaccaatgtagacgtggccaacgacctggcactaaagctgcttcgggactacagtgccgatgatactcggaaagtgcatatgataactgagaacatcaatgccagctggcgtagtatccataagagggtgtctgaacgggaggctgccctggaggaaacccatagactgctgcagcagtttcctctcgacctggagaagttcctcgcctggctaactgaagccgagacaaccgctaatgtgctgcaagatgccacacggaaggaacgcctcttggaagattctaagggtgtcaaagaactgatgaagcagtggcaggacttacagggggagatagaagctcatactgatgtctaccacaacctggacgaaaatagccaaaagatcctacggtcactggaaggttcagatgatgccgttcttctccaacgcagattggacaacatgaacttcaaatggagcgagctacggaagaagtccctcaacattaggagtcacttggaggcgtccagcgatcagtggaaacgccttcatctgtccctccaggagttgcttgtgtggctacagctgaaagacgacgaactctcgcgccaggctccaattggcggggacttccccgcggtgcagaaacagaatgatgtccatagagcatttaaaagggaactaaagaccaaagaaccagtgattatgagcaccctggagacagttcgcattttcctgaccgagcagccgctggaaggtctggaaaagctgtaccaggaacctagggaactcccccctgaggagcgcgcacagaacgtgacaaggctcctcaggaaacaagctgaggaagtgaacacagagtgggagaaactaaacctgcattctgctgactggcagcgcaagatcgacgagacactggaacggttacgggagcttcaggaggccactgacgagttagatcttaagctgcgccaggccgaggttataaaggggtcttggcaaccagtgggcgacctgctgatcgatagtctccaagatcacttggagaaggtgaaggctctgcggggggaaatcgccccactgaaggagaacgtctcccacgttaatgacttggcaagacagctgacaactctgggaattcagctctcaccatataatctaagcacactggaggacctgaatacacggtggaagctgctccaagtggcggtagaagaccgtgttaggcaactacacgaggcccacagagatttcggacccgcgagccaacattttctgagcacgtcagtgcaggggccctgggaacgagcaatatctccaaacaaagtgccctactacattaaccacgaaacacagacaacgtgctgggatcatcccaagatgacggagctgtaccagagcttagcggacctgaacaatgtccgattttcagcatatcgcacagcaatgaagttgaggagactccaaaaagcgctgtgtctggatctgttgtcactgagtgctgcttgtgacgcccttgatcaacacaatctgaaacagaatgatcagccaatggatattctccagatcattaattgtctgaccaccatctatgaccgtctggagcaggagcacaacaatctggtgaatgtacctttgtgtgtggacatgtgtctcaattggttattgaacgtttacgacactggccgcaccggtagaattagagtgctcagtttcaagaccggcattatttctctttgcaaagcccatttagaagataagtacaggtatctgtttaaacaggtggcatcctcaacaggcttctgtgaccagcgaaggttggggttgctgctccacgatagtatccaaattccccggcaactcggggaggtggcctcgttcggcgggtcgaacattgagccatcagttcgaagttgcttccagtttgctaacaataagcccgagatagaggccgccttattcctggactggatgcgcctcgaaccccagtccatggtgtggctgccggtactgcacagagtagcagccgctgagacagctaaacaccaggctaagtgtaatatatgtaaagaatgccccataatcggtttcagatataggtctcttaaacattttaactacgacatctgccagtcctgttttttttccggtcgagtggcgaaagggcataagatgcattatcctatggtcgaatattgtacgccaactactagcggtgaggatgtgcgtgatttcgctaaggtccttaagaataagttccggaccaagcgctatttcgccaagcatccacggatggggtacctgccggttcagaccgtgctcgaaggagacaacatggaaactcccgtgactcttatcaacttctggccagtcgactcagcacctgcaagctcacctcagctctcccacgacgacacacatagccggatcgagcactatgcgtctaggcttgctgagatggagaatagcaacgggtcgtatctgaacgactctatttccccgaacgagagcatagatgatgaacacctactcattcagcactactgccagtctcttaatcaggactccccgctgtcccaaccgcggagccctgcccagattttgatatccctggagtcggaagagcgcggagagctggaacgaattttggcggaccttgaagaagaaaaccgcaacctccaggctgagtatgaccgtttgaagcagcaacacgaacacaaggggctcagccccttaccctctcctccagaaatgatgccaaccagtcctcagtccccacgggatgccgagctgattgccgaggctaagttgctgaggcaacataagggaagactggaagcccggatgcaaattttagaagatcacaacaagcagttggagtctcaactacatcgactcagacaattgttagaacagccacaggccgaagccaaggtgaacgggaccaccgtgagctcccccagtacatctctgcaacggtctgacagctcccagcccatgctcctccgagtcgtgggtagccaaacatccgactcaatgggtgaggaagacctgttgtcgcctccccaggacaccagtacaggcttagaagaggttatggagcaactgaataactcatttccttccagtcggggtagaaacacaccagggaagcctatgagggaagacaccatgtag

SEQ ID NO: 186195 - DNA, 3348 bp, synthetic construct
  misc_feature 1..3348: note = Description of Artificial Sequence: Synthetic coding sequence
  source 1..3348: mol_type = other DNA
atgcccagcagcctgatgctggaggtgcccgccctggccgacttcaatcgggcatggacggagctcacggactggctctcgttacttgaccaggtgattaagtcccagcgagtgatggttggagatctggaagacattaacgagatgatcataaaacaaaaggccacaatgcaggatttggaacaaagacgccctcagcttgaagaactgatcaccgctgctcagaatctgaaaaacaagaccagcaaccaggaggcccgaactatcatcaccgacaggatagaaaggatacagaaccagtgggacgaagtgcaggaacatttgcaaaatcgtaggcaacagttgaacgaaatgttgaaagattctacacaatggctcgaggcaaaggaagaggcggaacaagttctgggtcaggcgagagccaagcttgaatcatggaaggaagggccgtatactgtcgatgccattcagaagaaaataacagaaacaaaacaactggcaaaggaccttcggcaatggcagacaaatgtggacgtagccaatgatctagccctgaaattgctaagggattactccgctgatgatacgcgcaaagtacatatgattacagagaatattaatgcatcctggcggagtattcacaagcgcgttagcgagcgcgaagcagcgctggaggagacccaccggctgttgcagcagtttcctctggatcttgagaaatttctcgcctggctgacagaagcggaaacaacagcgaatgtcctgcaggatgcaacccggaaggagagactcctggaagacagcaagggggtgaaagagctgatgaaacagtggcaggaccttcagggagagattgaagcacataccgatgtgtaccataatctggatgaaaactcccaaaaaatcctacgctccctcgaaggatcagatgatgctgtcctgttgcaaaggagactggacaacatgaactttaagtggtctgagctgaggaagaaaagcctgaatattagaagtcacctggaggccagtagcgaccagtggaagcgtctccacctctctctgcaggaacttctggtgtggctgcagctgaaggacgatgaactgtcccggcaggcccctattggaggagacttccctgctgttcagaaacagaacgacgtccacagggcgtttaagcgtgaactgaaaaccaaagagccggtgattatgtccacgctggaaactgtgcgaatcttcctgactgaacagcctttggaaggactggaaaagctgtatcaggaaccaagggagctcccacctgaagagagggcacaaaatgttaccagattactgagaaaacaggcggaggaggttaacacagaatgggaaaagctaaacttgcactcagctgattggcaacgaaaaatcgacgaaactctcgaacggttgcgcgaactgcaggaagccacggacgagcttgatctcaagctgagacaagcagaagtgatcaagggctcttggcagccggtaggagacctcctaatcgatagcttgcaggaccatttagagaaggttaaagcactcagaggggaaattgcgcccctcaaggagaatgtgagtcacgtgaatgatctggcaaggcaactcactaccctgggcattcaactgagcccctataacctatctacactcgaggacctcaacacgcgctggaagctcttgcaagtggccgtggaggacagagtacggcagttgcacgaagcccatagagactttggcccggccagtcagcactttctctccacttccgtacagggaccctgggagagggccatttcaccaaacaaagtcccatactatattaaccacgagactcagactacctgctgggatcatccgaagatgacagagctgtatcaaagcctcgccgacctcaataatgtgcgcttctccgcctatcggacagccatgaagcttaggaggttgcagaaggcactgtgcctggacctcttatcgctgtcagcggcatgtgacgctctggatcagcacaacctgaagcagaatgaccaacccatggacattctgcaaatcattaactgcctgacaaccatttatgatcgacttgagcaggagcataataaccttgttaacgtgcctctgtgcgttgatatgtgtctgaattggctactgaatgtgtacgatacaggtaggactggccgtattagagtcttatctttcaagactggcattattagtctgtgcaaggcacatctcgaggataaatataggtatctgtttaagcaagtagcctctagtactggcttctgcgaccagcggcggctgggtctgctactgcacgactctatccagatcccccgccagctcggcgaagtcgcctccttcggcggaagcaacatcgaaccgtcagttcggtcttgttttcagtttgctaacaacaaacccgaaatagaggccgctctcttcttagattggatgagactggaacctcagagtatggtgtggctccccgtgttgcacagggtggcagccgccgagactgccaagcaccaggccaaatgcaacatatgtaaagagtgtccaatcattgggttccgttataggtcgctgaaacactttaattacgatatttgtcagtcttgcttctttagcgggagggtcgctaagggacacaaaatgcactaccctatggttgagtattgcaccccaactacgtccggagaggatgtgagagacttcgccaaagttcttaagaacaaattccgaacaaagcggtacttcgcaaaacatcccagaatgggctatctgcctgtgcagacagtgctggagggggataacatggagaccaacctgcaggcagaatacgacaggttaaagcagcaacacgaacataaagggctctcacccctcccctccccgcccgaaatgatgcccacatctccacaatctcctagggatgccgaactcattgcggaagccaagctgctgaggcagcacaaagggaggttagaggcccgtatgcaaattttggaagatcacaacaaacagcttgaatctcagctgcatcgccttaggcagctgttggagcagccccaggcggaggcaaaggtcaacgggacaacagtttcttctccttctacatcccttcagcggtcagattcgagtcagccaatgcttcttcgggtcgtgggctcccaaacatcagatagcatgggtgaggaggatttactgtctccaccacaggacacttctacaggactagaagaggtgatggaacagctaaataattcttttcccagttccaggggaagaaatactcccggcaagccaatgagagaggacacgatgtag

SEQ ID NO: 186196 - DNA, 11058 bp, synthetic construct
  misc_feature 1..11058: note = Description of Artificial Sequence: Synthetic coding sequence
  source 1..11058: mol_type = other DNA
atgctgtggtgggaggaggtggaggactgctacgagcgggaggacgtacagaagaaaacctttacaaaatgggtgaatgcacagttcagcaaatttgggaaacagcacatcgagaacctcttcagtgacctgcaggatggaaggaggctgctggatctccttgagggcttgaccggtcagaaactgccaaaggaaaagggatccacccgggtgcacgccctgaacaacgtgaacaaggccctgcgtgttctgcagaataataatgtggacctggtgaatattggctctacggacatcgtggacggaaatcataagttgactcttgggctcatttggaacatcatcctgcactggcaggtaaagaatgttatgaaaaatatcatggctgggttgcagcaaaccaattcagagaagatcctgctgtcatgggttagacagtcaactcgtaattacccccaggtcaatgtgataaacttcactacttcttggagtgatggcctagctctgaatgctttaatccactcacacaggcctgatctctttgattggaactctgttgtttgccagcaaagcgctacccagcgattagagcacgcttttaacatcgctcgctatcagctcggaatcgaaaagctccttgatccagaggacgtggacactacctaccccgacaagaagtccatcctgatgtacattacctccctcttccaggtgctgccccagcaagtgtcgatcgaggctattcaggaagttgagatgctcccacgtccccctaaggtaaccaaagaggagcatttccagctccaccatcaaatgcattattctcagcagattaccgtgtctcttgctcagggctacgagagaactagctctcccaagcccaggtttaagtcatatgcctacacacaggctgcatacgtcactacgagcgacccgacacgctccccattccccagtcagcacttggaggccccggaggataagtcctttgggtcatccttgatggagtcagaagtgaacctggatcggtaccagacggctctcgaggaggtgctgagctggcttctttctgcagaggacaccctgcaggctcaaggtgaaatttccaatgatgttgaggtggtcaaagatcagtttcacacccacgaaggatacatgatggacctgacagcgcatcaaggacgggttggcaatatattacaactgggctcaaagctgattgggactggaaagctgtccgaggacgaggagaccgaagttcaggagcagatgaatctgctgaacagccgttgggagtgcctaagagttgcctccatggaaaagcaatccaatctgcacagagtgcttatggacctgcaaaaccagaagttgaaagagctcaacgattggttgaccaaaaccgaggagaggacccggaagatggaggaggagccgctgggccccgatctggaggatctcaagagacaagtccagcagcataaagtgctgcaggaggacctggaacaggagcaggttcgagtgaactctttaacccacatggtggttgtggtggatgagagttccggggaccacgcgacagctgctctagaagaacagttaaaagttctgggggacagatgggccaacatctgcaggtggaccgaggatcggtgggtcctcctgcaagacatactcctcaagtggcagaggttaacagaggagcagtgtctttttagcgcctggcttagcgagaaagaagatgctgtgaataagatacacacaactggattcaaagatcagaatgagatgctgtccagtctccagaagctagctgtgctcaaagccgatctcgaaaagaaaaaacagtcaatgggcaaactgtacagtctcaaacaggacctcctctcaaccctgaagaacaagagcgtgactcagaagacagaagcatggcttgataactttgcccggtgctgggataacctggtgcagaaattagaaaaatccacggcacagatatcccaggcagttacaacgacccaaccatccctcactcagaccaccgtcatggagacggttacaaccgtaacaacacgcgagcagatccttgtgaaacacgctcaagaggagctgccacccccaccgccccaaaagaaaaggcagattactgtggactctgaaattaggaagcggcttgacgtggatattacagaattgcatagttggattaccaggtctgaagcagttcttcagtcaccagaattcgctattttccgcaaggagggcaacttctctgacctgaaagaaaaggtcaatgccattgagcgggagaaggcagagaagttcagaaagcttcaggacgcttctcgttctgcacaagccctagtggaacagatggtgaatgaaggtgtgaacgctgatagtatcaagcaagcttctgagcagctcaatagtagatggattgaattttgtcagctcctcagcgagaggctaaattggctggaataccagaataacatcatcgctttctacaaccagcttcaacaacttgaacagatgaccaccacagcggaaaactggctgaaaatccagccaacaacaccaagtgagccaaccgcaataaagtctcagctcaagatttgcaaagacgaggtgaaccggctttccgatctccaacctcaaatcgaacgtttgaagatccaaagcatcgccctcaaagagaagggccagggacctatgtttctggatgctgattttgttgccttcacaaatcatttcaagcaggtcttttcagatgttcaggctagagagaaggaactccaaacaatcttcgatactctgccaccaatgagatatcaggagacaatgtcagcaatacggacatgggttcagcagagcgaaacaaagctctctatcccccagttgtccgtgactgactacgagatcatggagcagagactcggagaactgcaggctctgcagtcttcactccaggaacagcaaagcggactctactacctatccactaccgtcaaggaaatgtctaaaaaggctccatcagaaatctcccgcaagtatcaatcagaattcgaggagatcgaaggcaggtggaaaaagctgagtagtcagctggttgaacattgtcagaagcttgaggaacagatgaataagttgcgaaaaattcagaatcacatacagactctaaagaagtggatggctgaggttgatgtgttcttgaaggaagagtggcccgcccttggcgactccgaaatcctgaaaaagcaactcaagcagtgcaggctgctcgtgtccgatatccagactatccagccgtcgctgaacagtgtaaacgaaggaggacagaaaattaagaacgaagctgaacccgaattcgcgagccgattggagactgaattgaaagaactcaacacccaatgggaccacatgtgccagcaagtgtatgctagaaaagaggctcttaagggagggttagaaaagaccgtatcactgcagaaagatttgagcgagatgcacgaatggatgacccaggccgaggaggagtatctggagcgcgattttgaatacaagacccccgacgagcttcagaaggcagtggaagagatgaagcgagccaaggaggaggcccaacagaaggaggcgaaggtgaaacttctgactgagagcgtgaactctgtgattgcacaagccccaccagtggctcaagaggcgctaaaaaaggagttagaaaccctgaccacaaactatcagtggctgtgcactcgcctgaatggaaaatgcaagacccttgaagaggtgtgggcctgttggcacgaactcctctcctacctggaaaaggccaataagtggctgaatgaagtggaatttaagctcaaaacaacagaaaacattccaggcggcgctgaagagatttcagaggtcctcgactctttggagaatctgatgagacacagtgaggacaatccaaaccagataaggatcctggctcaaacactgacggatggaggtgtaatggacgagctgatcaatgaagagctggagacattcaatagccggtggcgagaactccacgaggaagcggtgagacggcagaagctgttagagcaatcgatacagagcgcacaagaaacggagaaaagcctgcacttaattcaggagagcctcacgtttattgataagcagctcgcagcttacatcgctgataaagtggatgccgcccaaatgccacaggaggctcaaaagattcagtcggatctaacctctcatgaaattagcctggaagaaatgaagaaacacaaccagggcaaggaggccgcacagcgggtgctgagccagattgacgtggctcagaaaaaactgcaggacgtctcaatgaagtttaggttgttccagaaaccagccaacttcgagcagcgcctgcaggagtccaaaatgatcctggatgaggtcaagatgcaccttcccgccttggaaaccaaatctgtagaacaggaggttgtgcagtcacagctgaaccattgcgttaatttgtacaagagcttgagcgaagtcaagagcgaggtcgaaatggtaatcaaaactggccggcagatcgtgcaaaagaagcaaaccgaaaatcccaaggaactcgatgaaagggtgacagccctaaagctacattacaatgagctaggggcaaaggtcaccgaacgcaaacaacagctggaaaaatgtctgaagctgagccgcaaaatgaggaaggagatgaacgttctgactgaatggcttgccgccacagacatggagctgactaagcgtagtgccgttgaggggatgccctctaacttggatagcgaggtggcatggggcaaggctacccagaaagagatcgaaaagcagaaggtgcatcttaaatcaatcacggaagtgggcgaggccctgaaaacagtactcggaaaaaaggaaactctggtggaagacaaactgtctcttttgaactccaattggattgccgtcacttcaagggccgaagaatggcttaacttgttactggagtaccaaaaacacatggagaccttcgatcaaaacgtagatcatatcacgaagtggatcattcaggccgacaccctcctagacgagagcgagaaaaaaaagccgcaacagaaggaagacgttctgaaaaggcttaaagcagagttgaacgacatcaggcctaaggttgactccactagggaccaggccgcaaacctgatggctaaccgcggggatcattgccgcaagctggtggaaccacaaatctctgaattaaaccatcgttttgccgcgattagccatcgcattaagactggaaaggcctcaatacccttgaaagagctggaacagttcaattccgacattcagaaattactggagcctctggaggccgaaattcaacagggcgtcaatctgaaggaagaggacttcaacaaagacatgaacgaggacaatgagggcactgtgaaagagctcctgcagaggggagataatctgcaacagagaattacggacgagagaaagagggaggaaatcaagatcaaacagcagctgctgcaaactaagcataacgcgctgaaagatttgaggagccagaggcgtaagaaagcgctcgagatttcccaccagtggtaccagtacaagcggcaagccgatgatctcctgaaatgcctggacgacatcgagaaaaaactggctagcctgcctgaaccaagagatgaacgcaagatcaaagagattgatcgtgagctacaaaagaaaaaagaagagctgaacgccgtgagaagacaggctgagggactgagcgaagatggtgcagcgatggcagtggaaccaacccagattcagctgtccaagcgttggagggaaattgagtcaaagttcgcgcaatttagacggcttaatttcgctcaaatccacactgtgagggaggaaacaatgatggtcatgactgaagatatgccacttgagatcagctacgtccctagcacttacttgactgagattacacacgtttctcaagccttgttggaggtggaacagcttttgaacgcccctgatctatgcgccaaagacttcgaagacctgtttaaacaagaggagagcctcaagaacataaaggatagcttgcagcagagctcgggcaggatcgatataattcacagtaaaaagaccgccgccctgcaatcagcaacacccgtggagcgcgttaagctgcaggaggcactcagccagttggattttcaatgggagaaagtgaataagatgtacaaggacagacagggcaggttcgacagaagcgttgagaagtggaggcggtttcactacgacatcaaaattttcaaccagtggctcactgaagctgaacagtttctacgaaagactcaaataccagaaaactgggagcatgctaagtacaaatggtatcttattgcactcaaagacgggatcggacagcgacagacggtggtgcgcacactgaacgcgaccggtgaggaaatcattcaacagtcatctaagacagacgcctctatcctgcaagagaagttaggttctttgaacctcagatggcaggaagtgtgcaagcaactgtccgacagaaaaaagaggcttgaagagcagaagaatatcctgtcagaattccagagggacctgaatgagttcgtgctgtggctggaagaggccgacaatatcgccagcatcccacttgagccaggcaaagagcagcaactcaaggagaagttggagcaagtcaagctcctcgtcgaggagctgccattgaggcagggcattctgaaacagttgaacgaaactgggggacctgttctcgtttccgcgccaattagtcctgaggaacaggacaaactcgagaacaagctgaagcagaccaatttgcagtggattaaagtctctagggccttgcccgaaaaacagggagagatcgaagcccagatcaaagacctgggacagcttgagaagaagctcgaggacttggaggagcaactcaaccatctcttactgtggttgtcacctatacgcaaccagctggagatatacaaccagcctaaccaggaaggcccatttgacgttaaggagaccgagattgcagtgcaggctaaacagcctgacgttgaggaaatcttgtctaaggggcagcatctttataaggagaaacctgcaacccaacccgtgaaacgcaagctggaggacctgtctagcgaatggaaggctgttaacagattattgcaggaactgagggccaaacagcctgatttggctccaggcctgaccaccataggcgcatcccccacccagaccgtcaccctggtaacacagccagtggttacaaaggagacagcaataagcaagctggagatgccatcatctctcatgttggaggttccggcgctcgctgacttcaatcgggcgtggacggagctgacagattggctgagtctcctggaccaggtgatcaagtcccagcgggtgatggtcggtgacctcgaggatattaatgaaatgatcatcaaacaaaaggccacaatgcaggacctggagcaaaggaggccacagctggaggagctaattacagccgcacagaatttaaagaataagacatcaaaccaggaggctaggacaataatcaccgatcgtatagaacgtatccagaaccagtgggatgaggtgcaagaacatttgcagaacaggagacagcagctcaatgagatgttaaaggatagcacacaatggctggaggccaaagaagaggcggagcaggtcctgggacaagcccgtgctaagctggagtcatggaaggaaggcccttatactgtggatgccatccaaaagaaaatcaccgagactaaacaactggctaaagacctacgacagtggcagactaatgtagacgttgcaaatgacttggccttaaaattgctgcgcgactattcggccgacgataccagaaaggttcacatgattaccgagaatatcaacgctagctggaggtcgatacacaagcgcgttagcgaaagggaggctgcactcgaagagactcacagactcctgcaacagttccccctcgatctcgagaaatttctggcgtggctgaccgaagccgagacaaccgcaaacgtgctccaggacgcgactcgcaaagagcggctcctcgaagattctaagggagttaaagaacttatgaagcagtggcaagatcttcaaggcgagattgaagcacacaccgatgtctaccacaatctggatgagaacagtcaaaaaattctgcggagtctggagggatccgacgacgccgtcttgctgcagcgtcgcctggacaatatgaattttaaatggtctgaacttcggaagaagagccttaatatccgaagccacctggaagccagcagtgatcaatggaaaagattgcaccttagcttacaggagctactagtgtggctacaactgaaagatgatgagctgtccagacaggcacccatcggtggggatttcccagcagttcaaaaacagaatgatgtccacagagccttcaaaagagaactcaaaactaaagagcccgtaatcatgagcaccctcgagaccgtgaggatatttctaactgagcagccgttggaggggctcgagaaactgtatcaggagccgagagaacttccacccgaggagcgtgcgcagaacgtaactcggctcctgcgcaaacaggcggaggaagttaacacagaatgggaaaagctcaatctgcactccgccgattggcagcggaaaattgacgagacactagaaaggttaagagaactgcaggaggctaccgacgaactcgacctcaaattgcgtcaggctgaagtgatcaaaggttcgtggcagccagtgggagatttactgatcgactctctgcaggaccacctggaaaaggttaaggccttgaggggggaaatcgcaccacttaaggaaaacgttagccacgtgaatgatctggctcgacagctcactactctgggcattcagctgagcccttacaatttaagtacgctcgaagacctgaacactcgctggaagctcttacaagtggccgtcgaggatagggtcaggcaactccacgaagctcatagggactttgggcccgcctcccagcacttcctgagtacctccgtccaggggccgtgggagagagccatatcgcctaacaaagtcccttactatataaaccatgaaacccagacaacctgctgggaccatccaaagatgaccgagctgtaccaaagtctggcagacctgaacaatgtgcgtttcagcgcatatcggactgcaatgaaactccgccgtctgcagaaagccttatgtctcgacctgctgagcctctccgcagcatgcgatgcactcgatcagcacaatttgaagcagaatgaccaaccgatggatattctgcagataattaattgcctcactactatatacgatagactggagcaggagcacaacaacctggtgaacgtcccgctctgcgtggacatgtgtctgaactggcttctcaacgtgtacgatacaggaagaacaggcaggatacgggtgctcagttttaagaccggtatcatctccctgtgcaaagcacatctcgaggataaatataggtatctattcaagcaggtcgctagcagcaccggcttttgcgaccagcgcaggctcggattgctgctgcacgactcaatacagattccccggcaactgggtgaagttgccagctttggcggcagcaatatcgagccctcagtgaggtcttgttttcaatttgctaacaacaagcctgagatcgaagcagccttattcctggattggatgagacttgaaccacagtccatggtttggcttccagtgctccatcgggtggcagccgccgaaactgctaaacatcaggctaagtgtaacatctgtaaagaatgtccaatcattgggtttcggtatcgctcgctgaaacactttaattatgatatctgccagtcatgcttcttctccggccgggtcgcaaaaggtcataagatgcactatcccatggtggagtattgcacacctaccacatccggcgaggacgtccgtgacttcgctaaggtgttgaaaaacaagttcagaaccaagcgttatttcgcaaagcatcctagaatggggtatctgccagtgcagacagtgctggagggcgacaatatggagactcctgtgacacttatcaatttttggccggtcgattccgcaccagcttcgagtccacagttatctcacgacgacacccactctcggatcgaacattacgcctctagactggctgagatggaaaactctaatggatcttaccttaacgactccatctccccaaacgagagcatcgatgatgaacaccttctcatccaacactactgtcaaagtctgaaccaggatagtccactttcccaaccaaggagccctgctcagatcttaatatccttggaaagtgaagaacgcggtgagctggagagaattttggcagatcttgaggaagagaatcgaaatctacaggctgagtatgatcgtctgaagcagcagcacgagcataaggggctttctccactgccgtcaccgccagagatgatgccaacgtccccccaatccccaagggacgctgagcttatcgctgaggcaaagctattgcgccagcacaaagggagactggaggcgaggatgcagatccttgaggaccataacaaacaactcgaatcacaactgcacagactgagacaactgctcgagcagccacaggctgaggccaaggtaaatggtactacagtatcaagcccatctacaagcctgcagcggagtgattctagccagcctatgctccttagagtggtcggctcgcagacctctgatagtatgggcgaggaagacctcctgtcaccaccgcaggacacgagcaccggcctggaggaagttatggagcagctgaacaacagctttccatccagcagagggagaaataccccgggaaagccaatgagagaagacaccatgtag

SEQ ID NO: 186197 - DNA, 2874 bp, synthetic construct
  misc_feature 1..2874: note = Description of Artificial Sequence: Synthetic coding sequence
  source 1..2874: mol_type = other DNA
atgcagcccatggtgatgcagggctgcccctacaccctgccccggtgtcacgactggcaagctgctgatcagtttcatcatagtagtagcctgcgcagcacctgcccacacccgcaggttagagccgccgttacctctcctgcaccgcctcaagacggcgccggtgtgccctgcctaagtctgaagttgcttaatggaagcgtaggcgcaagcggcccattagagccaccggccatgaatctatgttggaatgagataaagaaaaagtcccacaacctccgagccaggctcgaggcgttctctgatcatagcgggaagctgcagctacccctgcaggagattattgactggctgtcacagaaggatgaagaactttccgcccagctgcctctgcagggggatgtggccttagttcagcaggagaaagaaactcacgctgcttttatggaggaggtgaaatctcgcggaccttatatctattcagtgcttgagagcgctcaggcttttttaagccagcatcccttcgaggagctggaggagccccatagcgagagtaaagatactagcccaaaacaacgaattcaaaacctgagccgcttcgtatggaaacaagccactgtagcttcagaactttgggagaagctcactgccagatgcgtcgaccagcatcgtcatatcgagcggaccttggagcagctcttggagatccagggcgccatggaagagctgagcaccaccctgtctcaagctgagggagtcagggcgacctgggagcccatcggggacctgttcattgattctctgcctgaacatatccaagccattaaactattcaaagaggaattttcaccaatgaaagatggagttaaactggttaacgatctggcacatcaactcgctatttctgacgttcatctgtccatggagaacagccaggctctggagcaaattaacgttagatggaagcagctgcaggcttctgtgagcgagagactgaagcagcttcaggatgctcatagagattttgggcccggctcccagcatttcctttcctcaagtgtccaagttccctgggagagggcaatttctcctaataaagtgccgtattacataaaccaccaggcgcaaactacgtgttgggaccacccaaaaatgacggaactgtaccagacactggccgatcttaataacattaaattttcagcataccgcacggctatgaagctgcgcagagtacaaaaggcactcagactggatctggtaacactgacgacggctctcgagatcttcaatgagcacgatctgcaggctagtgaacacgtaatggatgtcgttgaggtaatacactgcctcactgccctttacgagaggctggaggaagagagaggcatcctggtgaatgtgccactgtgcgtagacatgtctctcaactggctccttaacgtattcgattctggaagaagtggcaagatgcgcgccctgtcgtttaaaaccggtatagcatgcctctgcggcaccgaggtcaaggagaaattgcagtatttgttttcccaagtcgctaattcgggatctcagtgtgatcagaggcacctgggcgtcctgctccacgaagccatccaagtgccacggcagctgggagaagttgctgcctttggggggagtaacgttgagcctagtgtgaggagctgtttcagatttagtactgggaaacccgtcattgaggccagccagtttctggagtgggtaaacttggaaccacagtccatggtgtggcttgccgtgctccatagggtgacaatcgccgagcaggttaagcaccagaccaagtgctctatatgccggcagtgccctataaagggattccggtacaggtccctgaagcagtttaatgttgacatctgccagacttgttttctgaccggacgcgccagtaagggtaataagcttcattaccccattatggaatactacaccccaactacgtctagtgagaacatgagggacttcgccaccacgctaaagaataaattcaggtctaaacactatttcagcaagcatcctcagcgcggatatttgccggtccagagtgtgttggaggcagattattccgagacccccgcgtcatcgcccatgtggcctcacgcggacactcactcccgtatcgaacacttcgccagccgattagccgagatggagtcacagaactgctcattctttaacgatagcctgtccccggacgactcgattgacgaggaccagtacttacttaggcattcatctcctatcaccgaccgagagccagctttcggacagcaggccccctgtagtgtggcgaccgaaagtaaaggggagttgcaaaagatcctggcccacctagaagatgagaacagaatcctccagggtgagttgaggcggttgaagtggcagcacgaagaagcagctgaagcaccctcgttggctgatgggagcactgaggccgctacagatcaccggaatgaagaactactcgccgaagcacggatactccgccagcacaaatccaggcttgagacaagaatgcaaattctcgaggaccataacaagcagctcgaatcgcagctgcagaggctgagagagctgctgctgcagcctcccacagaaagcgatggttccggaagcgcaggtagcagcttagcttccagccctcagcagagcgaagggagtcatccccgcgagaagggacagactactcctgacactgaagcagcagatgacgtggggagcaaatcgcaggacgtgtctctatgcctggaggatattatggagaaactgcgccacgcattcccttctgtgaggagctctgacgtcacggcaaacacgttgctagcctcatag

SEQ ID NO: 186198 - DNA, 2874 bp, synthetic construct
  misc_feature 1..2874: note = Description of Artificial Sequence: Synthetic coding sequence
  source 1..2874: mol_type = other DNA
atgcagcccatggtgatgcagggctgcccctacaccctgccccggtgccacgattggcaagcggctgaccagttccaccattcatctagcttaaggtccacttgcccgcaccctcaggtaagggccgcggtgacctcccccgcacctccacaggacggggctggcgttccgtgcctttccctgaagctccttaatggcagtgtgggggccagcggcccgttggaaccccctgctatgaacctttgttggaacgagatcaagaaaaagagccacaacctaagagctcgcctcgaggccttttccgatcattcaggtaagttacagctcccgctgcaggagataattgactggctgagccagaaggacgaggaactttccgcccagctgcccttacagggagacgtggcccttgtgcaacaggaaaaagagacccatgcagcttttatggaggaagtcaagtcacgaggcccctatatttattccgtcctcgagagcgcacaagcgttcttgtcacagcatccatttgaggagctcgaagagccacacagcgaatccaaagacacctccccgaaacaacggattcagaacctgtccagattcgtttggaagcaggccacagtcgcaagtgagctgtgggaaaaactcacggcccggtgcgttgatcagcatcggcacatagaacgcaccctggagcagctccttgaaattcagggcgccatggaggaactgtccacaactctctctcaggccgagggggtgcgggctacttgggaacctattggggacctgttcatcgacagtctcccggaacacatccaggcgattaagctgttcaaagaagagttttcccccatgaaggatggagtgaagctggtcaatgacctggcccatcaactggctattagcgacgttcacctgtcaatggagaatagccaagccctggaacagatcaacgtcaggtggaagcagcttcaggcgtctgttagcgaacggctgaagcagttgcaggatgcacaccgtgacttcggacctggctcacaacactttctaagcagctccgtgcaagtgccctgggaaagagctatcagtcccaacaaggtcccctattacattaaccaccaagctcagactacttgctgggaccaccccaagatgacagaactttaccagacgcttgccgacctgaataacattaaatttagcgcctatagaaccgcaatgaagctacggcgtgtgcagaaggcgctcaggctcgaccttgtgaccctaacaacggccctcgagattttcaatgagcatgatttgcaggcatcagaacatgtcatggatgtcgtagaggtgattcattgtttgaccgccttatacgaaagacttgaggaggaacggggcattcttgtgaatgtccccctgtgtgtggacatgagtttaaattggctcctcaacgtttttgacagtgggaggtctggcaaaatgcgtgccctgagcttcaaaacaggcattgcctgcctgtgcggcacagaggttaaagagaaattacagtacttattttcacaggtggcaaactccggctcacagtgcgatcagagacatctgggcgtgctcctgcacgaagccatccaggttccccgccagcttggtgaagtggccgcatttggcggttcgaacgtcgagccatctgttcgctcctgctttcggttttctactggcaaaccagtgatcgaggcaagtcagtttctggagtgggtcaacctggagcctcagagcatggtgtggctggctgtactgcaccgggtgactattgctgagcaggtaaaacaccaaactaaatgcagcatttgcagacagtgtcccattaagggatttaggtaccggtcactgaaacagtttaacgtagatatatgtcagacctgttttctgacagggagagcatctaaagggaataaactgcattatcctatcatggaatactacacccctactacaagctcagagaatatgagggacttcgccaccaccctgaagaacaagttccgatctaaacactacttctccaagcatccacagcgagggtacctaccggttcagagcgtgctggaggcagactattcagagacaccagcatccagccccatgtggcctcacgcagatacgcactcgaggatcgagcacttcgcttcccggttagcagagatggaatctcagaactgctcattttttaacgactccctatctcccgacgattccatagacgaggatcaatacttgctgaggcattcttctccaattacagacagggagcctgcattcggccagcaggctccatgttccgtggctaccgagtcaaaaggggagctccaaaaaatcctggcccatctggaggacgaaaataggatattacagggcgagctgcgtaggctgaagtggcagcatgaagaggccgctgaagctccaagtctcgccgatgggtcaactgaggcggccacagaccataggaacgaggaactcctggccgaggcccggattctgcgccagcacaagagccggttggaaactcggatgcaaatcttggaggaccataacaaacagctagagtcgcagctccagcgcctgcgggaactcctcctgcagccaccaacagagtccgatggttcgggatccgcaggctcctccctcgcaagctctccacagcagtcagagggctcccaccctcgggagaaaggccaaacaaccccggacacagaggctgctgacgacgtgggatccaagagccaggacgttagcctatgtctggaagacatcatggagaagttgcgtcacgcctttccatctgtaaggagctcagatgtaactgcgaacaccctcttggcgagttag

SEQ ID NO: 186199 - DNA, 2874 bp, synthetic construct
  misc_feature 1..2874: note = Description of Artificial Sequence: Synthetic coding sequence
  source 1..2874: mol_type = other DNA
atgcagcccatggtgatgcagggctgcccctacaccctgccccggtgtcacgattggcaagccgcagatcagttccatcattcatcctccctgagatccacttgtccacaccctcaggtgagagctgctgtcacatccccggcaccaccacaagacggggctggtgtcccatgcctcagcctcaaattacttaacgggtccgtaggggcttcaggacctttagagccccctgccatgaatctttgctggaacgaaatcaagaagaagagtcacaacctacgcgcgagactcgaagccttcagcgatcattcaggcaagctccagctgccactgcaagaaatcattgactggctaagccagaaggacgaggagctatccgcccagttgcctctccagggagacgtggcactcgtgcaacaagagaaggaaacccacgcggcgttcatggaggaggtcaagtctcggggcccatatatatactctgtactcgaatctgcacaagcttttttatcccagcacccattcgaagaactggaagagcctcatagcgagagcaaggataccagcccaaaacagcggatccagaacctgagcaggttcgtctggaagcaggccactgtggctagcgagttgtgggagaaacttacggcaaggtgcgtcgaccaacaccgtcacatcgaacggactctggagcaactgctggagatccagggggcaatggaggagctgagcacaacactcagccaggccgagggagtcagagcaacatgggagccaattggcgacctgttcattgactcactgcctgaacatatccaggcaatcaaactttttaaggaggaattcagccccatgaaggacggggtgaagctggtcaatgacctggcacaccaactcgccatttcggatgttcacctgagcatggagaactcgcaggcactggaacagattaatgtgagatggaaacagcttcaggcaagcgtctccgaacgcctaaagcagctccaggacgcccacagggacttcggccccggatcgcaacactttctgtctagtagtgtacaggtgccctgggagcgggcgatctcacccaacaaggttccctattacataaaccaccaggctcagaccacatgctgggaccacccgaagatgactgagctctatcaaacgctagccgatctgaataatattaaattttcagcctaccgtacagcaatgaagctaaggagagttcagaaggcattgcgtctggatcttgttacactgacgaccgcattagagatcttcaacgagcacgatcttcaggccagtgaacacgtgatggacgtcgtcgaagtgattcattgtctcacagccctttacgaacgtctggaagaggaacgagggattttagtcaatgttcccctttgcgtagatatgagtcttaattggcttctgaacgtgtttgatagcgggcgttccggcaagatgagagccctgagctttaagactggcatagcctgtctctgcggtaccgaggttaaagagaaactccagtatctgttctctcaggtcgccaattcaggtagtcagtgcgaccagaggcacttgggagttttactacacgaggcgatccaggttccgaggcagctgggggaggtcgcagccttcggcggcagtaatgtcgagcccagcgtccggagttgtttccgcttcagcactggtaaacccgtgatcgaagcctcccagtttctcgaatgggttaatctcgaacctcagagcatggtatggttggcggtactccaccgggtgacgattgctgaacaggtgaagcatcagactaaatgtagtatttgcagacagtgtcctattaaggggtttcggtaccggtctttgaagcagttcaacgtagacatctgccagacatgtttcctgactggccgggccagcaagggcaataagctgcactaccccattatggaatactatacccccaccacctcatctgaaaacatgcgagacttcgccacaactttgaaaaacaaatttcgcagcaaacactacttcagtaagcatccgcagaggggatatcttccggtccagagcgtcctcgaagcagactactcagagacaccggccagcagccccatgtggcctcatgccgacactcactcccggatagagcatttcgcatccaggttggccgagatggaaagccagaactgcagcttctttaacgattctctctccccagacgactctattgacgaagaccagtatcttctgaggcacagctctcccataacggaccgggagcccgcattcggacagcaggctccctgctcagtcgccactgaatccaagggtgagctgcagaagatcctcgctcacctggaagacgagaaccggattctgcagggcgagctccgaaggctcaaatggcagcacgaagaagccgcagaagccccctctttggccgacggttcaacagaggcagctaccgatcatcgaaacgaggaactgctcgccgaggctagaattctgaggcagcacaaaagcaggttagagaccagaatgcaaattttggaagatcacaataagcagctcgagtcccagttacaacggcttcgggagctgctgcttcagccccctaccgagagcgacggtagtggatcagctgggtccagcctggcttcttccccacagcagagcgagggctctcaccctcgggagaagggacagacgacacccgataccgaagcagcggatgatgtgggctcaaaatcccaggatgtttctctgtgcctcgaggatattatggagaagctccgtcacgcctttccttctgtgaggtcttccgatgtcaccgctaatacattgctggccagctag

SEQ ID NO: 186200 - DNA, 2640 bp, synthetic construct
  misc_feature 1..2640: note = Description of Artificial Sequence: Synthetic coding sequence
  source 1..2640: mol_type = other DNA
atgaacctgtgctggaacgagatcaagaagaagagccacaacctgcgtgcccgactggaggccttttccgatcactccggcaaactgcaacttccccttcaggagatcatcgactggctgagtcaaaaggatgaggaactttccgcacaactccccctacaaggggacgtcgccctggttcagcaggaaaaagaaactcacgctgcctttatggaggaggtgaaaagccgtggtccatatatatatagtgtccttgagtctgcacaggccttcctgagccagcaccccttcgaggaacttgaggagccccacagcgagtcaaaagacacctccccaaaacagcgaattcaaaaccttagtcggtttgtgtggaagcaagccaccgttgcttcggaactttgggaaaaactaactgctcgatgtgtagaccagcatcgacacatagagcgcacgctggaacaattgctcgagatccaaggggctatggaggagctcagcacaaccctgtcgcaggctgaaggcgtcagggctacttgggagcccataggcgatctgttcattgactccctccctgaacacatccaagcgatcaagttgttcaaagaggaattctctccaatgaaggatggtgtgaaactggtaaatgatctggctcaccagctcgctatctcagacgtgcatctctccatggagaactcgcaggccctggaacagatcaacgtgcgttggaaacagcttcaggcatcagtgtctgaacggctcaagcagctccaggacgcccaccgcgatttcggtcccggctctcagcactttctttcctccagcgtccaggtgccctgggagcgtgccattagccccaacaaagtgccctattatataaatcaccaggctcagacaacatgttgggaccatccaaaaatgacggaactctatcagactcttgccgacttgaataacataaagtttagtgcttacagaaccgccatgaaattgcggcgggtacagaaagccttgcgcctcgatctggtgactctgaccacggccttggaaatcttcaatgagcacgacctgcaggcatctgaacacgtgatggatgtcgttgaggtcattcattgtctgaccgctctatatgagaggttggaggaggagcgtggcatcctggtgaatgtcccattgtgcgtggacatgtctctgaattggctccttaacgtgttcgactcggggcgcagcgggaagatgagggccctcagttttaaaacggggattgcctgtttgtgtggaactgaagtgaaggaaaagctgcaatacctgttctcccaagtcgcgaactcaggcagccagtgtgatcagcggcatctgggcgtactgttgcatgaagctatccaggtgccccgacagctgggcgaagtggcggcctttggagggagcaatgtcgagccctctgttcggtcttgctttagatttagcactggaaaacccgtgatcgaagcctctcagttcctggaatgggtcaatctagagcctcagagcatggtgtggttggccgtgctgcaccgggtcactatcgcagaacaggtaaaacaccagacaaagtgttcaatctgtcgccagtgccccattaaggggttcaggtaccgctccctgaagcagttcaacgtcgacatctgtcagacctgttttctcaccggtagggcgagcaaagggaataagctgcactatcccatcatggagtattatactcctacaacaagcagcgagaatatgagagatttcgccacaaccctgaaaaacaagttccggagcaaacattatttctccaaacacccccaacgcggatatctgcccgtgcagtctgtgttggaggccgactattcggaaacccctgcttcctccccgatgtggccgcacgcggacacccattctcggattgagcatttcgctagtcgcttagcagaaatggaatcccagaactgcagctttttcaatgactcgctttctccagatgactcaattgacgaggatcaatatcttcttagacactcctccccaatcactgaccgggagcccgctttcggacagcaggcgccctgttccgtggctacagaatctaaaggggaactgcaaaaaattctcgctcatctggaagacgagaatcgcattctgcaaggagaactccgccggcttaaatggcaacacgaggaggcagctgaggccccttctctagcagacgggagtactgaggccgctaccgaccaccgcaacgaggaattgcttgctgaggctagaatcctcagacagcataaaagccgactcgaaacccggatgcaaattctcgaagatcacaacaagcaactagagtcgcagctgcagcgccttcgcgaactgctccttcagccaccaaccgagagtgatggcagcgggtcagccgggtcctctctggcctctagtcctcagcagtctgagggatcacatcctcgcgagaaaggtcagactactcccgatactgaagccgctgatgatgtggggtcaaagtcccaggacgtcagtctctgcctggaagatatcatggaaaagctgcggcacgcctttccctctgttcggtccagcgacgtcactgcaaacacgctgctcgcttcctag

SEQ ID NO: 186201 - DNA, 9129 bp, synthetic construct
  misc_feature 1..9129: note = Description of Artificial Sequence: Synthetic coding sequence
  source 1..9129: mol_type = other DNA
atgcaccacggcaccggcccccagaacgtgcagcaccagctgcagcggagcagggcctgccccgggagcgagggcgaggagcagccagctcaccctaatccacccccatcccccgccgcacctttcgcgcctagcgcatctcccagcgcccctcagagcccctcttatcagatccagcagctaatgaacagaagcccggctactggccagaacgtgaatatcaccctgcagtcagtggggcccgtcgtcggaggtaaccaacagatcaccttggctcccctgcctctgccatcccctacctctcccggcttccagttttctgcccagccacgaagatttgagcacggctcgccgagctacatccaagtcacgtcccctctgtcccagcaagtgcagacccagtcccctacgcaaccgagtccaggacctgggcaggcgctgcagaatgtgagagctggcgcccctggacccgggttaggcctatgttcttcctctccgaccggcggattcgtggacgcgtctgtattggttcgacaaatcagcctgtcaccctcctctggtggtcatttcgtttttcaggacggaagcggcttgactcagattgcccaaggcgcgcaggttcaactgcagcaccccgggacccctatcacagttcgggagcgccgcccctcacagccacacacccagagtggcggtactatccatcacctggggccacagagtcctgcggcggctgggggggcaggactccaaccactggctagtccctcacacattactaccgcaaatctgccaccacaaattagctccattattcagggtcagttggttcaacagcagcaggtgctgcaggggccccccctgcctcggcctctcggcttcgaacggacaccgggggtgctgttacccggtgcggggggtgcagccgggttcggtatgacatctccccctcctccgacgtccccttctcgaaccgccgtaccccccggcctgtccagcttacctttgaccagtgtggggaacaccgggatgaagaaggtgcctaaaaaactggaggagatcccccccgctagccctgaaatggcacagatgcgaaaacagtgcctcgactatcactaccaggagatgcaggccctcaaggaagtgtttaaagaatacctcatcgagctgtttttccttcagcatttccaggggaatatgatggacttcctggccttcaagaagaagcactacgcccctctacaggcttacttgagacaaaatgacctcgacatcgaggaggaggaggaagaagaggaggaagaggaagagaaatccgaggtcataaacgacgaacaacaggctctcgctggatctctggtggccggcgctggctctactgttgaaaccgacctgttcaagaggcagcaagctatgccctcaaccgggatggccgaacaatctaaacggcccaggttggaagtgggccaccagggggtcgtctttcagcacccaggggccgacgcgggcgtgccattgcagcaactgatgcctactgcgcagggcggaatgccaccaacaccacaggccgcacagcttgctgggcagcgccaatcccagcagcagtatgatccctctacgggccctcccgtgcagaatgccgccagtctgcatacaccactgccgcagctgcccggcagattgcctccagcgggcgtccccactgctgctctgagtagcgcgctgcaattcgcccagcagcctcaggtagtcgaggcccagacccagttgcagatccctgtgaagacccagcagccaaacgtcccgattcccgcaccgccctcaagccagcttcccatcccaccaagtcagccagctcagctagctctccacgtcccaactcccggaaaggtgcaggtacaggctagccagcttagtagcctgccacaaatggttgcatccacccgtctccccgttgatcccgcccccccctgcccgcgacctctgccaacaagtagcacgagcagcctggcaccagtcagcgggtcaggacccggaccttctccagctcgctcttcacccgtaaacagaccatctagtgctactaacaaagctctctcccccgtgaccagccgtacgccaggtgtcgttgcaagcgcccccacaaagccccagtctcctgcacaaaacgctacaagcagtcaggatagctcccaggacacccttacggaacaaattacactggagaaccaggtacaccagcgcattgccgagctcaggaaggccggactgtggtcccaacgccggttgccaaaactgcaggaggccccacggcctaaatcccattgggattacctgctggaagagatgcagtggatggccactgattttgcacaggagagacgctggaaggtggcagctgccaaaaaactggtgcgtactgtcgtgaggcatcacgaagagaaacagcttagggaagagcgcggaaaaaaagaggaacagtcccgtctgcgtcggatcgccgcttcaactgcaagggagattgagtgtttttggtctaacatagagcaagtggttgagattaaattgcgcgtagaattagaggaaaagaggaagaaggccctgaatctgcaaaaggtgagcagacgtggtaaagaactgcgccccaaagggttcgatgcacttcaagagagcagcttggatagtggaatgtcgggacgtaaaaggaaagcttccatctctctgactgatgatgaagtggacgatgaagaggaaacaatcgaggaggaggaagcaaatgaaggggtcgtagatcaccagactgagctgtcaaatctggcaaaggaggccgaactgccgctactcgatctgatgaaactctatgagggagcttttcttccaagctcacagtggccacggcctaagcctgatggtgaggacacctctggtgaagaagatgccgacgactgcccaggcgacagagaatcacggaaagacctggtgctgatagactctttatttatcatggatcagttcaaggccgccgaacgtatgaacattggcaagcctaacgctaaggacatcgccgacgtgaccgctgtggcagaagccattctacccaaaggaagtgccagggtgaccacgtcggtcaagtttaacgcaccttctcttctttacggcgccctgagggattatcagaaaataggtcttgattggctcgccaaactgtatcgaaagaatctcaacgggatccttgcagacgaagccggcctgggaaaaacagtacagatcattgccttctttgctcacttggcgtgtaacgaggggaattggggtccccacttggttgtggtccgatcctgcaatatccttaagtgggagttggaacttaagcgttggtgccccggtttgaagatccttagctatattggatcccatcgagaactcaaggcgaagagacaggaatgggcagagccaaactcttttcacgtctgtatcacctcctatacccagttcttcagagggctcaccgccttcacacgtgtgcggtggaagtgcctggttattgacgaaatgcagcgtgtgaaaggtatgactgagagacattgggaggcagtcttcacactacagagccagcagcgcctgctgctgattgactctccactgcataatactttcctggagctgtggaccatggttcactttctggtgccgggaatttcccggccctatttgtcgtctccgctccgggcaccaagtgaggaatcccaggattactaccacaaggtagtgatccgactgcatcgcgtgactcagccgttcatcctgaggcggacaaagcgtgatgtggaaaagcagctgacgaagaagtacgagcacgtgttgaaatgtaggctgagcaatcgccagaaagccctatatgaggacgtgatcctccagcccggaacgcaggaggctctgaagtcgggtcactttgtgaatgtcctcagtatcctggtgcggctgcagagaatatgcaaccacccaggtcttgtggagccgaggcacccaggaagcagctacgtggcaggcccacttgaatatccttccgccagcctgatcctcaaggctctagaacgcgacttctggaaagaagcagacttaagtatgttcgatctgatcggtctcgaaaataaaattacccgtcatgaggcggaattgctctctaagaaaaagatcccacgcaagctgatggaggagattagcacttccgcagcaccggccgcccgcccagccgcagcaaaactaaaagcctcacgcctgttccagcctgtgcaatacggccaaaaaccggaaggtcgtacagtggcctttccttcaacgcaccccccccggaccgctgctcccacgacagcatccgctgcccctcaaggtcctctgcgtgggagaccccctattgccactttttcagcgaatcccgaggccaaaggcggggaagttgtgaaaattgcccagttagcatctattaccggaccccaatcaagggtggcccagcctgaaacccctgtcacactgcagttccaaggcagcaaatttacattatcacatagtcaactgcggcagctgacagccggccagcctttgcagttgcaggggagtgtgcttcagatcgtgtccgcgcctggccagccatatcttcgagcacctggacctgtcgtgatgcagacggtgtcccaagctggggcagtccatggcgctctaggaagtaagcctcccgctggcgggccttccccagccccgctgacaccccaggttggcgtgccaggcagagtggccgtgaacgccttggcagttggagagcctggaaccgcctctaaaccagcttccccaatcgggggtccaactcaagaggagaagaccaggttactgaaagagaggctcgaccaaatctacctggtcaatgaaagaagatgttcccaggccccagtctacgggagggacctactacgaatttgcgccctgccttcccacgggcgggtgcagtggcgcgggtcattggacggaaggcgcggtaaggaagccggacctgcccattcgtacactagtagctctgagagcccgtctgaactgatgcttacactctgccgctgtggggaatcactgcaagacgtgatcgatcgggttgctttcgtgatccccccggtagtggccgctcccccatctcttagagtgccgcgtccaccccctctttacagccacagaatgaggatcctccgccagggtctgcgggagcacgctgcgccttacttccaacagctgaggcaaactactgctccacgactgcttcagtttcctgaattaagactggtacagtttgactctgggaaactggaagccctagcaatcctactgcagaaactcaagtctgagggccggcgcgtgctcattctctcccagatgatcttgatgctcgatattctggaaatgtttctgaatttccattacttgacctacgttcgcatcgatgaaaacgccagctccgagcaacggcaggagctgatgcgaagctttaatcgggaccgcaggatcttctgtgctattctcagcacccactccagaacaacaggaattaacctggtggaagcagacacagttgtcttttacgataacgacctgaacccagtgatggatgccaaggcacaagaatggtgtgataggataggtaggtgtaaagatattcacatctacagactggtgagtggtaactcaattgaggaaaagctgctgaaaaatgggaccaaagacttgattcgagaagtcgctgcgcagggcaatgactattcgatggccttcttgacacagagaacaattcaggaacttttcgaggtatactctcctatggacgacgcaggatttccagtcaaggcagaggagttcgttgtcctgtcccaggaacccagtgtgaccgaaactatagctcccaagatcgctagaccattcatcgaagctctgaaatccatcgagtacttggaggaggatgcacagaagtcagctcaagagggagttctcggcccccataccgatgctctgtcatccgacagtgagaatatgccatgtgatgaggagccaagtcagctggaggagttagcggatttcatggaacaactgacccccatcgaaaaatacgcactgaactacttggagctctttcatacatcaattgaacaagagaaggagaggaacagtgaagacgctgtgatgacagccgttagagcctgggagttctggaacctcaagaccctgcaggagcgggaggcgagattacgccttgaacaagaggaggctgagctcctcacatatacccgcgaggatgcctattccatggagtatgtctacgaggatgtggacggacagacagaggtcatgccgctgtggactcctccaacgcccccacaggatgattccgatatctaccttgactcagttatgtgcctgatgtacgaggcgacacccattccagaagccaagttgccgccggtgtatgttcggaaagagcgaaagaggcataagacggaccctagcgcggccggccgtaaaaagaagcagcgacatggagaggccgtcgtgcctccgaggagcctgttcgatcgggctactcccggtctactgaaaatacgtcgcgagggcaaagaacagaagaagaacatcctgttgaaacagcaagtgccgtttgccaaacctctacctacttttgcaaagccaacggccgagccgggacaggataatcccgagtggcttatttcagaggattgggcactgttgcaggctgtcaaacagctactggagctgccactcaacctcacaatcgtgtccccagcacacacgcccaattgggaccttgtgtctgatgtggtaaatagctgctcaaggatctatcgatcatctaaacagtgccgaaaccggtacgagaacgtgattatcccacgggaggagggtaagtcgaagaacaacagaccccttaggacctctcagatctatgcccaggacgaaaacgccacacatacacagttgtacacctcccatttcgatctcatgaagatgacagccggaaagagatcaccaccaatcaagcctctcctgggcatgaatccattccagaagaatcctaagcacgcctcggtgctggccgagtccgggatcaactacgacaaacctctgccaccaattcaggtagcatcactaagagctgagcgcattgcgaaggagaagaaagctttggcggaccagcagaaggctcagcagcccgcagtcgcccagccacctcctcctcagccccagccacctcctccgcctcagcagcctccgccaccactgcctcagcctcaggccgctgggtcacagcctccggcagggcccccagcagtacagccccagccccagccccagccgcagacacagccccaaccggtacaagcaccagctaaggcccagcctgccatcactaccggaggtagtgcggccgttctcgctggtacaataaaaaccagtgtcacgggcactagcatgcccaccggcgccgttagtggtaatgtgattgtgaacactatcgcgggggtcccagcggccaccttccagagcatcaacaaaagattagcttcccctgtggctcccggcgccttgacgacacctggaggctctgcccccgcccaagtggttcatactcagccgcctccccgggcggtgggatcacctgctaccgctacacccgatctggttagcatggccacaacacagggcgttagggccgtcaccagcgtcacggcctcggccgtggtgactactaacctgacgccggtccagacgcctgcaagaagccttgttccgcaggtttctcaagccactggcgtgcagcttcctggcaaaactatcactcccgcacattttcagcttctacgccagcaacagcagcaacagcaacagcagcaacagcagcagcagcagcaacagcaacaacagcagcagcagcagcagcagcagcagcaaacgacaaccacttcacaggtgcaagttccgcaaattcagggtcaggctcaaagccctgcgcaaataaaagccgtgggtaaactcacccctgaacatctgatcaagatgcaaaaacagaaactgcagatgcctccccagccccctccaccacaggctcagtctgccccccctcagccaacagcccaagtgcaagtgcagaccagtcagccaccacagcagcagagccctcagcttacaactgtgacagccccccggcccggtgcactgctgaccggaaccaccgtcgccaatctgcaggtggcaagactgactagagttccgacaagccagctccaggctcagggccagatgcaaacccaggcccctcagccagcccaggtggcattagccaaacctccagtggtttccgttcccgccgcagtcgttagttctcctggcgtcactaccctgcctatgaacgtcgctggaatatcagtcgccatcggacaaccacagaaggcggcaggccaaacggttgtcgcccagcctgtgcacatgcagcagctgctgaaattaaaacagcaagccgtgcagcaacagaaggccattcaaccacaggccgctcagggacctgcagccgtacaacagaagatcacagcccagcagattaccactcctggcgctcagcagaaagtggcctatgccgcgcagcccgctctgaagactcagtttctgacaaccccaatctcgcaggctcagaaactagccggggcgcaacaggtgcagactcaaatacaggtggccaaactgcctcaggtagtgcagcagcagaccccggtagcatcgatccagcaagtcgcaagtgcctctcaacaggcttctccccaaactgtggccctcacgcaagccaccgcagccggacagcaggttcagatgattccagctgttacagctaccgcccaagtcgtgcagcagaagttgatccagcagcaggtggtgactactgcatctgcgccccttcagacgccaggggcaccaaaccctgcacaggtgccagcctcttcggactcgcccagccagcagcccaaattgcagatgagggttccggccgtgcggcttaagaccccaacaaagcctccatgtcagtag

SEQ ID NO: 186202 - DNA, 9261 bp, synthetic construct
  misc_feature 1..9261: note = Description of Artificial Sequence: Synthetic coding sequence
  source 1..9261: mol_type = other DNA
atgcaccacggcaccggcccccagaacgtgcagcaccagctgcagcgctcaagagcctgccctggtagcgagggagaggagcaacctgcacaccccaatccaccaccctccccagccgctccattcgctccatctgcgtccccttctgccccccagagtccatcttatcaaatacagcagttgatgaaccggagtcccgccactggccagaacgttaatattacactgcagagcgttggcccagtggtagggggtaatcagcaaattacactcgccccactacctctgccctcccctacttcacctgggtttcagtttagcgctcagcctaggcggtttgagcatgggtcccctagctacatacaggttacttcacccctctcccaacaagtgcagacccagtctcccacccagccctcacccggacccggacaggccctgcaaaatgttcgggccggggctcctggacctggcctgggactttgctcaagctctcctacaggaggttttgtggatgcctccgtgctagtgaggcagatcagccttagtccatcgagtggcggccatttcgtttttcaggatgggtccggattgactcaaattgcccagggcgctcaggtgcagctccagcacccagggacccccatcaccgtgcgcgagcgcagaccttctcagccgcatacccagtcaggggggacgatccatcacctggggccacagtccccagccgccgctggtggagccggcctgcaacccctggcaagcccatcccatatcactactgctaatctgcctcctcagatttcctccattatccaggggcagttagtccagcagcagcaagtgttacagggcccaccactcccacgccccctcgggttcgaacggacaccaggggtgctcctcccaggcgcaggtggcgccgccggattcggtatgacttctccccccccccctacatcaccgtctcgaacagctgtgccccctgggctgagtagcttgcctctcacaagtgtgggcaacacaggcatgaagaaggtgcccaaaaagctagaagaaatcccacccgcctccccagagatggcccagatgcgcaaacaatgcctggactatcattaccaggagatgcaggcactcaaagaggttttcaaggaatatttaatagagctcttttttcttcaacactttcaggggaacatgatggactttttggcattcaagaagaaacactatgccccactacaagcttaccttaggcagaacgacctggatatagaggaagaagaggaagaggaggaagaagaagaggagaagagtgaggtgattaacgatgaacaggctctggcaggctccctagtagccggggccggaagcactgttgaaaccgatctttttaagagacagcaggcaatgccctcaaccggcatggcaggggggatgccccccacaccccaggctgcacaattagccggacagagacaatcccagcagcaatacgacccgtctaccggacctccagtgcagaatgctgctagtcttcatacgccgctgccacagttaccgggacggctcccacccgctggcgtgcccaccgcagctctcagctccgctctacagttcgcccagcaaccacaggtggtcgaggctcagacccaactgcagataccggtaaaaactcagcaacctaacgtgccaatcccagcccccccttcctcccagttacctatccctccgagccagcccgcgcagctcgctttgcacgtgcccactcccggaaaagtgcaggtccaggcgtcacagctgagctccctgccgcagatggttgcaagcaccaggcttccggtagatccagctcccccttgtcctagacccctccccaccagttcgacctctagcctggcccctgtgtctgggagcggtccagggcctagcccagcaaggtcttccccagtaaatcgcccttctagtgcgaccaacaaagccctgtcacctgtgactagtaggacgcccggagtcgttgcttcagccccaaccaagccccagtctccggcccagaacgccacttcttcccaggacagttcacaggacactttaaccgagcagattacgttagaaaaccaagtgcaccagcggattgccgaactcagaaaggccggactgtggtcccagaggcgtttgcccaaactgcaggaggctccccgacctaaatcacattgggactacctcctcgaggagatgcagtggatggcaaccgacttcgcccaggaaaggagatggaaggtggcagctgcaaagaaattagttcgtactgttgtgcgtcaccatgaggagaaacaactccgagaagagaggggaaagaaggaggagcagtcgaggctcaggcgaatcgctgcctcaacagcaagggaaatcgagtgcttctggagtaatatagagcaggtggttgagatcaagctgcgtgttgagctcgaggagaagcgaaagaaagccctaaatctccagaaagtatcaagacggggaaaggagctgagacccaaaggttttgacgccttgcaagaatccagccttgattctggcatgtcgggtcggaaacgaaaggcctcaatttctcttaccgatgacgaagtggacgacgaagaggagacaatcgaggaagaagaggctaacgagggtgtcgttgatcaccagactgagctgtctaacctagctaaggaggcggagctgccgctgcttgatctgatgaagctgtatgaaggggctttcctgccatcctcacaatggcctagaccgaagcctgacggcgaagatacatctggtgaggaggatgccgatgattgcccaggggacagggagtcccgcaaggacctcgtcctaatcgacagcctctttattatggaccagttcaaggctgccgagcggatgaacatcggtaagcctaacgccaaggatattgcggacgtgaccgcggtagctgaggctattctaccaaagggttccgccagagttactaccagtgtgaaattcaatgcaccttccttattgtacggcgcgctcagggactatcaaaagatcggcctggactggctggcgaagctttatcgaaaaaacctgaacgggattctggccgatgaggccggccttggcaagacagtgcaaatcatagcattttttgcccacctggcttgcaatgaagggaattggggaccgcaccttgtcgtggtaagaagctgcaacatcctgaaatgggaactggagctgaagcgctggtgcccaggcttaaaaattctttcttatattggatcccaccgcgagctgaaagcaaaacgacaggagtgggctgaacccaactctttccacgtgtgcattacaagctacacccagttctttcgcgggctcacagcatttacaagagtgcggtggaaatgcctggtgatcgacgaaatgcaaagggttaaaggaatgacggagcggcactgggaggctgtgttcaccctgcaaagccaacaaagactcttgctaattgattcacccctccataacactttccttgagctgtggaccatggttcacttcctcgtccctggtataagccgtccctatctcagtagccctctgagggccccatctgaggagtctcaggactactatcacaaagtagtgatcaggctgcaccgcgttacgcagccattcatccttcggagaactaagagggacgttgagaagcaactcaccaagaagtatgaacacgtgctgaagtgccggctcagtaatcggcagaaggccctgtacgaggacgtcatcctccaaccagggacacaggaggcgctgaaatcaggccattttgtcaatgttttgtcgatcctggtccgcctccagagaatatgtaatcatcctggcttagtagaacctcggcaccctggaagttcctatgttgcgggcccgctcgaataccctagcgcatcactcattttgaaagccctggagcgggatttctggaaagaggcagacctgagcatgtttgacctcatcgggcttgaaaacaagattacacggcacgaggcggaactcctgagtaagaaaaaaatacccaggaagctgatggaagagatcagcacgtccgccgctcctgccgcacggcccgccgccgccaaactcaaggctagccgcctctttcagcccgtgcagtatggccagaaaccggaaggtcgaaccgtcgcctttccatccactcatcccccaaggaccgctgcaccgactacagcctcggccgcccctcagggccccttgcgagggcggccacctattgcaacattctcggctaaccctgaggccaaggccgctgcggctccgttccaaaccagccaggcttcagcgtcggctccgcggcaccagcccgcatccgctagctccacagcggcaagcccagctcacccagctaagctgcgtgcccagactaccgcccaggctagcacccccggccagcccccacctcagccacaggcaccgtctcatgcagcgggccaaagtgctctgccgcaaagactcgtcctcccatcccaagcccaggcccgccttcccagcggcgaggtggtcaagatagcacagctggccagcatcaccggaccccagtcacgcgttgcgcagccagaaacaccagtgactctccaatttcaaggtagtaaatttaccctgagccattcacagctgcgtcaattaacagccggccagcctctgcagctgcaaggcagcgttctgcagattgtgtccgcacccggccaaccctatctgcgggccccgggacccgtggtcatgcagacagtgagtcaggccggggcggttcacggggctttagggagtaagccccccgctggcggaccttcccccgccccattaaccccacaggtaggagttccaggacgggtggctgtcaacgctctggctgtgggcgagcctggcaccgcctccaagcctgcctcacccatcggtggtccaacccaggaggagaagactcgcttgcttaaggaacggctcgatcagatttacctggttaacgagcgtcgctgttctcaggctcccgtgtatggccgagatctcctcagaatctgcgctctgcctagccacggcagagtgcagtggcgggggagcctggacggaaggagaggaaaggaagctggccctgcacactcctacacatctagttcggaaagtccatcagagctgatgttaaccctctgtcggtgtggagagtccctccaggacgttattgatagggtcgcttttgtgatccccccagtggtggctgcaccaccctccctacgcgtgcccagacctccaccgctatacagtcaccgaatgcggatactcaggcaggggttgcgagagcacgctgccccttactttcagcagttacgccagaccaccgcacccaggctgctccaatttcctgaactgcgcctggtgcagttcgattccggcaaattagaagcactggccattctcttgcagaaacttaagtccgaaggacggcgagtgctgatcttgtcacagatgatacttatgctggatattcttgagatgtttctgaacttccactacctgacatacgtccgaattgacgagaacgcaagtagtgagcagaggcaggaactcatgcgcagttttaaccgtgaccggcggatcttctgcgccatcctgtccacacatagccggacaacaggcattaacctcgtggaagccgatacagtggtattctacgacaacgacctgaaccctgtgatggatgccaaagcccaggagtggtgcgaccgcatcggacggtgcaaggatattcacatctatcgcctggtgtccggaaatagcatcgaagagaagttgctcaaaaacggtaccaaggatctcattcgtgaggtggccgcacagggcaacgattactcaatggcattcctaacgcagaggactatacaggaactgtttgaggtgtacagtcccatggacgatgcaggcttcccagtgaaggccgaggaatttgtggtcctgagccaagagccaagcgtgacggaaactatcgcacccaagatcgcacggccttttattgaggccctgaaaagcatcgagtatttggaagaggatgcccaaaagtcagctcaggaaggggtcttgggacctcatacagacgcactgtcatcagactccgaaaatatgccttgcgacgaagaaccgagtcagttagaggagctggctgattttatggaacagcttacacccatcgaaaagtatgcgcttaactacctagagctgttccacaccagcatcgaacaagagaaagagcgcaactcagaagacgccgtgatgacggccgttagagcctgggagttctggaacctcaagacattacaagaaagggaagcccgcttgcgtcttgaacaagaagaagccgaactgttgacttatacccgtgaggatgcctactctatggaatacgtctacgaagacgttgatgggcagactgaagtgatgcctctgtggacaccacctaccccaccgcaggacgattctgatatttacctcgactccgttatgtgcctcatgtacgaagctacccctatacctgaagctaaactgccacctgtctatgtcaggaaggaacgcaagcgccataaaacggacccctccgccgcaggcaggaaaaaaaagcaacgacacggagaggccgtggtgcctcctcggtccctgttcgatagagccacgcctggcctcctgaaaattcgccgggagggtaaggaacagaagaaaaacatcttattaaaacagcaggttccttttgcaaagccactgccaacatttgctaaaccaacagcagagcccggacaggacaatccagaatggctgatttccgaagactgggcacttttgcaggctgtgaagcaactcttagagctgccccttaacctcaccatcgtttctcctgcacataccccaaactgggatttggtctctgacgttgtgaattcctgctctcggatttaccggagctcaaagcaatgtcgtaacaggtacgagaatgtgatcatcccacgggaagagggcaaatccaagaacaacagacccctgaggacctctcagatttacgctcaagacgaaaacgccacgcacacacagctctatacttcacacttcgatcttatgaaaatgaccgcaggaaagaggtcgccgcctattaaaccactgctcggcatgaaccctttccagaagaacccaaagcatgcttctgtgctggcagaatccgggatcaactacgataagccgctcccccccattcaggtggccagtctgcgagctgaaagaatagctaaagagaaaaaagctctggcagaccagcagaaagcgcagcagcccgccgtcgcccaaccaccccccccgcagccccaacctcccccccccccgcagcagccccccccacctcttccccagccccaagcagcaggctctcagccacctgctggtccgcccgctgtgcagccccagccccaacctcagccgcagacacagccccaacccgtgcaggctcctgcgaaggcccagcctgcaatcacaaccggaggctctgctgcagtcctcgccggcacaattaagacctccgttactggcacaagcatgccaactggagcggtgtccggcaacgtgatagtaaacacaattgcaggcgtgccagctgctacatttcagtccattaataagcgtctcgcttcaccagtggcacctggtgcactgaccactcccggagggtctgccccagcgcaagttgtgcacactcagcctccccccagagcagttgggagccccgctactgcaacccccgatctggtaagtatggctaccactcagggagtgagggctgtgacctctgtgaccgcttcagccgtggtaactacaaatcttaccccagtgcaaactcccgcacgctcactggtgcctcaggtgtcccaagccaccggcgttcagctgccgggaaaaacaataacacccgcacacttccagctgctgcgccagcaacagcagcagcagcagcagcaacagcagcagcagcagcagcagcaacagcagcagcagcaacagcagcagcagcagcagcagacaactactaccagccaagtccaggtgccgcagatccagggccaggcccagagccctgcccagattaaggcagtcggcaagctgacacccgaacacttgatcaagatgcagaaacagaaattgcaaatgcccccacagcccccaccaccgcaggcacagagtgctcctccgcagccaaccgctcaagtgcaagtccagacatcccagcccccccagcagcagagtccacaactcacgaccgtgacagcgcctcggccaggggcgctgctgactggaaccactgtggccaatctgcaagttgccagactcactcgggtccctaccagccaactacaggcccagggccagatgcaaacccaagccccacagcctgcacaggtagccttagccaagcctccagtggtgtcggtgcccgccgcggtggtgagcagccccggcgtcaccacccttccaatgaatgtcgccgggatatctgttgccattggacagccacagaaagctgccgggcaaaccgtggtagcccagcctgttcatatgcagcaattgctcaagttgaagcagcaagcagttcagcagcaaaaagccattcagccccaggcagcgcagggtcctgcagcggtgcaacagaagattaccgctcagcagatcacaacccccggagcccagcaaaaggtcgcatatgccgcccaacctgcccttaaaacccagtttttgaccacacctattagccaggctcagaaattagccggggcccagcaagtgcagacacagattcaggtagcgaaactgccccaggtcgtccagcagcagacccctgttgcctctattcaacaggtggcctctgcatctcagcaagcctccccgcaaactgttgctctgacacaagcgaccgccgctggtcagcaggttcagatgatcccagcggttactgccacagcccaggttgttcaacagaaacttatccagcagcaggtagtgacaactgcctccgctccgttgcaaacgcctggcgcaccgaatcccgctcaggttccggcttctagtgactcacctagccagcagccaaaacttcagatgagggtcccggccgtgaggttgaaaacacccacaaagccaccctgccagtag

SEQ ID NO: 186203 - DNA, 9480 bp, synthetic construct
  misc_feature 1..9480: note = Description of Artificial Sequence: Synthetic coding sequence
  source 1..9480: mol_type = other DNA
atgcaccacggcaccggcccccagaacgtgcagcaccagctgcagagatcaagggcgtgccctggatcagagggggaggagcaacctgctcaccccaacccaccccctagcccggcggcccccttcgcaccgtcggcatctccttctgcgccacaatctccgagttatcagattcagcagttgatgaatagaagccctgcgacaggccaaaatgttaacatcacactgcagagcgtgggcccagtggtcggaggcaatcagcagatcaccctagcccctttacccctgccaagtccaaccagtccggggttccagtttagcgcccaacctaggcggtttgaacatggatccccatcctatattcaggtgacttcaccactaagtcagcaggtgcagactcaatctcctacgcaaccttccccgggcccgggccaggcactgcagaatgtcagagcaggcgcaccgggccctggactcggtctctgtagctcttcacctaccggcggtttcgtcgacgccagtgtcctcgtgaggcagatctcgttgagtccttcttctggcggtcattttgtctttcaggatggaagtgggctcacccagattgcccagggtgcacaggtgcagctccagcatcctggcaccccaatcaccgtgcgcgagagaagaccatcccaacctcatacacagtctggaggcacaatccaccacctgggccctcaatcacccgccgcagcaggcggtgctggcctgcaaccgttagcctcaccttcccatattactactgccaacctgcctccacaaatatcatccataattcaaggccagctggtccagcagcaacaagtgctgcagggcccccctctgcctcgcccactgggatttgaaaggacccccggcgtcttgctgcccggggcgggaggagctgccggctttggaatgacgtcacctcctccccccacgtcaccatcccgcacagccgtccccccagggctctccagcctgccattgaccagtgtaggaaatacgggaatgaagaaagtccctaaaaagctggaagaaatcccgcctgcgagcccggaaatggcacagatgagaaagcagtgccttgattaccactatcaggagatgcaagccttgaaagaggtgttcaaggagtatctgattgagctgtttttcttgcagcacttccaaggtaatatgatggacttcctggcattcaaaaaaaagcactatgcacctttgcaggcatacctcagacagaacgacctggacatcgaagaggaagaagaagaggaagaagaagaagaagagaaatccgaggttataaacgacgaagtcaaggttgtgacaggaaaagacggacagaccgggacacctgtggccattgcaacccagctgccgcctaaggtgtccgccgccttcagcagccagcagcagccgtttcaacaggcattggccggatccctcgtggctggcgccggaagtacagtggagaccgacctctttaaacgccagcaggccatgccttcaacaggaatggcagagcaatcaaaacggccgcggctggaagtgggtcatcagggggtggtctttcaacatcccggagcagacgcaggagtgcctctccaacagcttatgcctaccgctcaagggggaatgccacccactccacaggccgctcagttggctggccagaggcagtcacaacaacagtacgacccaagcaccggcccgcccgttcagaatgctgcctcgctccatacccccttaccgcagctgcctgggcgcctgcccccagccggcgtgcctactgcagcgctatcttctgccctccagtttgctcagcagccacaagttgtggaggctcagacacagctgcagatccccgtgaaaacacagcagccgaatgtaccaattcctgccccccccagctctcagctgccaattcccccctctcaaccagcccagctggctctgcacgtgcccacgcctgggaaagtccaggtgcaggccagccagctctcctcactgccgcagatggtggcttccacacgcctccctgttgatcctgctcccccctgcccacggcctctcccaacttccagtacttcttccctggcgccggtgagtggttccgggcctggaccatctcccgcccgatcttcccctgtaaataggcctagttcagccactaacaaagccctgtccccagtcacgagtcggacacctggggttgtggcctctgctccaacgaaaccccaaagtcctgcccagaatgccacctcaagccaggactcctcacaagacacacttaccgaacagataactctcgaaaaccaggtgcatcagcgcatcgctgaactgaggaaggcagggctgtggtcccagaggcgcctgccaaaactgcaggaggccccgcgacccaaatcgcactgggattacctccttgaggaaatgcaatggatggctacagattttgctcaggaaaggagatggaaggtcgctgccgctaaaaaactggtgaggaccgtcgtcaggcatcacgaggagaagcagctgcgggaagagagaggcaaaaaagaggaacagtctcgcctgaggcgaattgcagcctccactgcaagagaaatcgaatgcttctggtctaacatagagcaggtggtggaaatcaagctgcgagtggagcttgaggagaaaaggaagaaagcactgaatctgcagaaagtgtctcgtaggggcaaggaactgcgcccaaaaggctttgatgcccttcaagagtcgagcctcgactctgggatgtccggtagaaagagaaaggcaagcatttctctgactgatgacgaagtggacgacgaggaggagacaattgaagaagaggaggcaaacgagggagtcgttgaccaccaaactgagctgtcgaacttggccaaagaagccgaactgcccctgcttgacttaatgaaattgtatgagggagcttttctcccaagctcacaatggccccggcctaaaccagatggggaggacacgtccggagaggaggatgcggatgattgtcctggagacagggagagccgcaaggatctggtgctgattgacagtctgttcataatggaccagttcaaggccgctgagcgcatgaatatcggtaaaccaaatgccaaggatatagctgacgtgactgcggtggccgaagcgatcctgcctaaaggatctgcccgagtgacaacctccgtcaagttcaacgcgccctccctgctgtatggagcccttcgggactatcagaagatcggactggattggctggccaaattgtatcggaagaacttgaacggcatactggccgatgaagccggactgggaaagaccgtgcaaattattgcttttttcgcccatcttgcctgcaatgagggaaattggggaccacatctggtcgttgtgaggtcctgcaatatccttaagtgggagctcgaacttaaaagatggtgtcctggtctgaagatactctcctacatagggtcgcaccgagagctaaaggctaaaagacaggaatgggccgagcccaacagcttccacgtgtgcatcacttcttatacccagttcttcaggggtctcacggcattcacacgtgtacggtggaagtgcctcgtgattgatgagatgcagcgtgtcaagggtatgaccgagcggcactgggaagccgtgttcaccttgcaatctcagcaaagactgctcctgattgatagtccactgcacaacactttcctggagctttggaccatggtgcatttcctggtccccggtatcagtcggccctatctgagcagtccactgagggcgcccagtgaggagagccaggactactatcataaagtggtgataagattgcacagagtgacccaaccctttatcctgagacggaccaagcgggacgtggagaagcagttgaccaagaaatatgagcatgtgctgaaatgtcggctcagcaatcgtcagaaggcgctttacgaggatgtaattctgcaacccggaactcaagaagcactaaagtccggacacttcgttaatgttctgagtattttggtgcgcttacagcggatttgtaatcatcctggactagttgaaccacggcacccaggttcaagctatgtggcaggcccattggagtacccatcagctagcctcattctcaaagccctagaacgcgacttttggaaagaggctgacctaagcatgttcgacttgatcggactagagaataagataacacgccacgaggcggagctgcttagtaaaaagaaaatccccagaaaactcatggaagagatttccacgtctgcggccccggctgctcgcccggctgccgcaaagttgaaggcatcacggcttttccagccggtgcagtacgggcagaaaccagaaggcagaaccgtcgctttccctagcacacaccctccacggactgcagctccgaccacggcaagcgctgccccccagggaccgcttcgtggtcggcctccaattgctacgttcagtgcaaatcccgaagctaaggccgcagcggcaccctttcagacgtcacaggcatcagccagtgctccgaggcatcagcccgcttccgcatcaagcacagcggcaagtcccgcccacccggctaaactccgcgcccagaccaccgctcaggccagcactcccggccagccgcctcctcagccacaagctccgtctcacgcagccggccaaagcgccctgccgcagagactcgttctgccaagccaagcgcaggccaggctacctagtggcgaagttgtgaagatcgcccaactggcaagtattacaggaccccagtctcgcgtcgcccagccagagacgcccgtgacactccaattccagggcagcaaatttaccctgagccattcacaattacgccagctgaccgccggtcagcctttgcaactgcagggcagcgtcctgcagatcgtgtctgcacccggccaaccgtacctgcgcgcacccggccccgtcgtgatgcaaactgtgtcacaggccggagctgtgcatggggccctcggttctaaaccacctgccggtggcccctcgcccgctccattaacacctcaagtgggagtcccaggtagagttgccgtgaacgccctcgcagtcggcgaacccggaacggcttcaaagccagcctctccaataggcggtcctacgcaggaagaaaagacgcggctactgaaagagaggttagaccagatctatctggtgaacgagcgccgttgtagccaagcgccggtgtacgggagggatttactccggatatgcgccctcccgtcacatggaagagttcagtggcgcggttcgctggacggtagacgtggaaaagaggcgggccccgcccactcttacacctccagctcagagtccccaagtgagcttatgttgactctttgcaggtgcggcgagagcctgcaggacgtgattgatcgcgtcgcttttgtgattcctccggtagtggccgcccctccttcattgcgggtccctcgacccccacccctctactctcacagaatgaggatccttagacaagggctccgtgaacacgcggcgccttactttcagcagctgcgccagaccaccgccccaaggttactgcaattccccgaactgcggctcgtgcagttcgactccggcaaactcgaggctctggccatcctcctgcaaaaattgaagagtgaagggaggcgtgtgttgattctatcacagatgatcttgatgctggacatcttagagatgttcctgaatttccactacctgacctacgtgcgcatcgacgaaaatgcgtcaagtgaacagagacaggaattaatgagatcctttaaccgggatcggagaattttttgcgctatcctgtcaacacactctaggactaccggaatcaacctggttgaggccgatacagtggtcttctacgacaacgaccttaatcccgttatggatgccaaagcccaggaatggtgtgacagaattggccgctgcaaggacatccatatctaccgcctggtatccggaaacagcatagaagagaagttgcttaagaacgggactaaagatctcatcagagaggtggccgcccagggaaacgactattccatggcatttctgacccagaggacaattcaggagctctttgaggtctactcccctatggacgacgctggatttcccgtgaaggccgaagaattcgttgtcctgagtcaagagccttctgtaaccgaaactattgctcccaaaatcgcccgcccattcatcgaggccctcaaatctatcgagtacctggaagaggatgcccaaaagagcgcccaagaaggtgtgctcggcccccacacagacgcgttgtccagcgactcagaaaacatgccctgcgacgaagaaccgagccaattagaagagcttgctgactttatggaacagcttacccccatcgaaaaatacgccctgaactacctggagttattccatacatctatcgaacaggagaaagagcggaattccgaggacgcagtcatgacagctgtgcgggcctgggaattctggaatctgaagacactgcaggagagagaagcccgcctgaggctcgaacaggaggaggccgagctcctgacatatactcgcgaggacgcgtatagcatggagtatgtgtacgaggatgtagacgggcagaccgaagtcatgcctttatggaccccacctaccccaccccaggatgactcggatatctacctggactcggtcatgtgtctaatgtacgaagcgacccccatacctgaggccaaacttccccccgtatacgtgcggaaagagagaaaaaggcacaagacagatcccagcgccgccggcaggaagaagaagcagcgtcacggcgaggccgtggttccccccagatctctgttcgaccgcgcaacacccggactcctgaagatccgacgagagggcaaagaacaaaaaaagaatatcctgttgaagcagcaggtgcccttcgccaagcctctccctacattcgccaagccgactgcagaacccggccaggacaacccagaatggctcatatcagaggattgggctctcctccaagccgtgaagcagctgctggaacttccactgaacttaaccatagtatcacctgcccacacacccaattgggacctcgttagcgatgtcgtcaacagctgctcgagaatctaccggagtagcaagcaatgtaggaacagatacgaaaacgtgattattcctcgtgaggaaggcaaatcaaaaaataacagaccccttcggacaagccagatctatgcccaggatgagaatgctactcacactcagctgtatacatcacattttgaccttatgaagatgactgctggcaagcggagtccaccaattaaacctctcctgggaatgaacccattccagaagaatccaaagcatgcttccgtccttgcggaaagtgggattaactacgataagcctctacccccgatccaggtggcatcactgagggcagagcgcattgctaaagaaaaaaaggcattagccgaccaacaaaaggcccagcagcccgcagtcgcccagcctccacccccccagccacaaccgcccccccctccacagcagcctccaccacccctgcctcaaccccaagccgccgggtcccagcctccagcggggcctcctgctgttcaaccacagccccagccccaaccccaaacccagccccagccagtccaagcaccagccaaggcccagccggccatcaccaccggaggaagtgcggcagtccttgcaggaaccattaaaacaagcgtcaccggaacttcaatgccaacaggagccgtttcgggcaacgtaatagtgaacacaattgctggggtgccggctgccaccttccagagcatcaataaaagactggccagcccggtagcgccaggagccctaacaactccggggggcagtgcccccgctcaggtggtccacacccagcctcctccccgggccgtcggttcacccgcaaccgcaacaccagatctggtgtcgatggcaacaacacagggggtccgagccgttacaagcgtaacggctagcgccgtagttacaaccaatcttacacccgtgcaaaccccggcccgctccctggttcctcaggtgtctcaagccacaggagtgcagttacccggcaagacaattactcctgcccattttcagctgctgcgccagcagcagcagcagcagcagcagcagcagcagcagcagcaacagcagcagcaacagcagcagcagcagcagcaacagcagcagcagaccacgaccacttcacaggtgcaagtccctcaaatacagggccaggcccagtccccagcacagatcaaggccgtaggaaaactgacccctgagcacctgattaagatgcagaagcaaaaactccaaatgcccccacagccaccccctcctcaggctcagtctgctccgcctcagccgactgcccaagtacaggtccagacctctcagcccccacagcaacagtcaccacagctcacgaccgtaactgccccccgccccggcgccctattaaccggcactaccgtggctaatctgcaggttgcgcggctgacaagagtcccaaccagtcagctgcaggcccagggacaaatgcagacacaagcccctcagccagctcaggtcgcactcgcaaaacccccagtggtgagcgtgcctgccgcggtggtgtcaagcccaggcgttacaaccctcccaatgaacgtcgctggcatttctgttgcaatcggccagccccagaaagctgcaggtcaaaccgtggtggcccagcctgtgcatatgcagcagctgctcaaacttaaacagcaggcagtgcagcagcaaaaggctatccagcctcaggccgcccaagggcccgccgccgtgcaacaaaagatcacagcccaacagatcaccacccccggcgcccaacagaaggttgcttacgccgctcagcccgcactgaagacacagtttttgaccaccccaattagccaggcccagaagctggcgggggcccagcaggtgcaaacacaaattcaggtagccaagttgccacaagttgtgcaacagcagacaccagtggcctccatccagcaggtggctagtgcttctcagcaagcttccccacagacagtggctctcactcaggctacggccgcgggccaacaggtgcaaatgatccccgcggtcaccgcaacggcacaggtagtgcagcagaaattgatccagcagcaggtcgtgaccacagcgtcagctcctctccagacacccggagctccgaatccagcacaggtgcctgcatcctctgactccccgtctcagcaaccaaagctccagatgcgcgttcctgcggtccgtctgaaaacgccaacaaaacccccctgccagtag

SEQ ID NO: 186204 - DNA, 9372 bp, synthetic construct
  misc_feature 1..9372: note = Description of Artificial Sequence: Synthetic coding sequence
  source 1..9372: mol_type = other DNA
atgcaccacggcaccggcccccagaacgtgcagcaccagctgcagcgtagcagggcttgccccggttccgaaggtgaagaacagccagctcatccaaatcctccaccttccccagctgctccctttgccccctcagcgtcaccctccgcaccgcaatccccctcctaccagatccaacagctcatgaacaggagtcccgccacaggtcaaaatgtgaatatcactctccagagcgtaggcccggttgtgggcgggaatcagcagatcactctggccccccttccacttccatcaccaacatctcctggatttcaattctccgctcagcccaggcgtttcgagcacgggtcccccagttatattcaggtgaccagtccactttcccagcaggtacagacgcagtcacccactcaacctagcccagggcccgggcaggccctccaaaacgtgcgcgccggcgcccctggccccggcctcgggctgtgctcaagttccccaaccggagggttcgtggacgcctcagttctggtccggcagatcagtctttccccctcaagcgggggccattttgtttttcaagatggctctggactgacacagattgctcagggtgcccaagttcaacttcaacaccctgggacccccatcactgtgagggaaagaagaccgtctcagccccacacacagagcggtggtacgatccaccatcttggcccacagtctcccgctgccgccgggggcgctggtttacagcctctggcctctccatcgcacatcacaacggctaaccttccaccgcagatcagctccattattcagggacagctcgttcagcagcagcaggtcctgcaaggtcctccactcccaagacctttgggtttcgagcgaactccgggcgtcctgctgccgggagctggaggggcggctggctttgggatgacgtcaccgccccctcccacctcgccatccaggaccgccgtgccgcctggacttagtagcttgcctttaacgtctgtgggaaacacaggtatgaaaaaggtgccgaaaaagctggaagaaatccccccagcgagcccagaaatggcccagatgagaaagcagtgcctggactatcattatcaggagatgcaggcgttgaaagaagtttttaaagagtatctgatcgagctattcttccttcaacacttccagggaaacatgatggatttcctcgcctttaagaagaaacattatgctccactacaggcgtatctgaggcagaatgaccttgatatcgaagaagaggaggaggaggaggaggaggaagaggaaaagagcgaagtaattaatgacgagcaacaggctcttgcaggatctctggttgccggagctggctcaaccgtggaaactgatctattcaaacggcagcaggccatgcctagcaccggtatggccgagcagtctaagcgcccaagactggaagttggacaccagggggtcgtgttccagcatcccggcgctgacgcaggagtgcccctgcagcagcttatgccaactgcccagggcgggatgcctcccacaccccaggcagcccagctcgcgggccagcgtcagtcccaacagcagtacgacccgtccacaggaccacccgtgcagaatgcagcatcccttcacacccctttgccccagttaccaggcagattgccacccgcgggtgtgcctacagctgctttaagttcagctcttcagtttgcccagcagccgcaggtcgtcgaagctcaaacacaattacagatccccgtgaaaacccagcagcctaacgtgccaatccccgctcccccatcctcgcagctgccaattccgccctctcagccagcacagctggccctccacgtaccaacacccggtaaggtgcaggtgcaggcctcccagctttcatcgttgcctcagatggtcgccagcaccagactgcccgttgacccggccccaccatgccccagacctctgcctacaagtagcacatcatcattggctcctgttagcgggtccggccccggtccaagtcctgcccggtccagtcccgtcaacaggccatcttctgctaccaataaagccctctcgcccgtgacttcccgaactcccggggtggtagctagcgcacccactaaaccccagtcccctgctcagaatgctacctccagccaggattccagccaagatactctcaccgagcagatcacactggagaaccaagtacaccaacgaattgccgaactgcggaaggctggcctgtggagtcaaagaaggctgcctaaactccaggaggctcctcgcccaaagtcacattgggactacctcctggaagagatgcaatggatggcaactgacttcgcacaggaacgacgctggaaagttgcagctgctaagaagcttgttcgcacagtggtgcgccatcatgaagagaagcagcttcgcgaggagaggggaaagaaggaggaacagtctcggcttaggcgcatagccgccagtactgccagagagatcgagtgcttctggtctaatattgagcaggttgtggaaataaagctgagggtcgagctcgaagaaaagcggaagaaggcactgaatctgcaaaaagtaagccgcagggggaaggaactccggcctaaaggttttgatgcgcttcaggagtccagcctcgattctgggatgtcagggcgcaaaagaaaggcatccatatctcttactgatgatgaagttgacgatgaagaggaaacaatagaagaggaagaagccaacgagggtgtggtcgatcaccagaccgaactgtctaacctggcaaaggaggccgaactacccctgcttgatctgatgaaactgtacgagggcgcctttctaccatcttcacagtggcctcggccgaagcccgatggtgaagacaccagcggagaagaagatgccgatgactgccccggggacagggaatcaagaaaagatctagttttaatcgactccctcttcataatggatcaattcaaagctgccgaaaggatgaatatcggcaagccaaatgccaaagatatcgcagatgttacagccgtcgctgaagctattctaccgaaggggagcgcccgcgtgaccacttccgtcaagttcaacgctcccagcctgttgtacggagcgctgcgggattaccagaagatcggcctggattggctcgcaaaactctatcgcaaaaatctgaacggtatcctcgcggacgaggccggccttggcaagaccgtgcaaattatcgctttttttgcccacctcgcttgcaacgagggtaactggggcccccatctggtagttgttcggagctgtaatattttgaagtgggaactggagctgaagcgatggtgtcccgggcttaaaatactcagctatattggttcgcacagagaacttaaggccaagcgtcaggagtgggctgaaccgaacagtttccacgtgtgtataacgtcttacactcagttttttaggggactcacagcctttactagagttcggtggaagtgtctggtgatcgatgagatgcagcgggttaagggcatgacagaacgccattgggaggccgtctttacattgcagagtcagcagcggcttctgctgatcgatagcccactgcataacacgtttcttgagctctggaccatggtccactttctcgttcctgggatttccagaccctacttgtctagcccacttagggccccctccgaagagagccaggattattatcacaaggttgttattaggttacaccgcgtcacccaacctttcattctccgtcgtactaagagagatgtggagaagcagctgactaaaaaatacgaacacgtgctcaagtgtaggctcagtaacaggcagaaagcactgtatgaagatgtgattctgcaacccggaacgcaggaggccctaaagtcaggccactttgtcaacgtcctctctatcctggtcagattgcagcgtatctgtaatcaccctggactagtggaaccccgtcaccccggatcttcctacgtggctgggccactggagtatccatcagcctccctgatactgaaagcacttgagagggatttttggaaggaggcggacctttccatgtttgacttgatagggcttgaaaacaaaatcaccaggcatgaggctgagctgctgtctaagaagaagatcccgcgcaaattgatggaggagattagtactagcgctgcaccggccgctcgtcctgccgcggccaaactgaaggcctctcgattgttccagcctgttcagtacggccaaaagcccgagggaaggactgtggccttccctagtacgcaccctcctcggaccgcagcccccactactgcgtctgccgcccctcagggccctcttcgagggcgtcctcccatagcaactttcagtgcaaacccggaagctaaagcggccgcagccccctttcagacctcacaggcctcagcctcagccccccgccaccagcccgcttctgccagcagtactgctgccagccctgcccaccccgctaagctgcgggcccagaccacagctcaggcctcaacacctggccagccccccccacaacctcaggcacctagccacgcagctgggcaatctgccctcccacagcgactggtattaccttcgcaggctcaggctcgactgcctagcggcgaggttgtgaagatcgctcagctggctagtataaccggcccacaatccagagttgcccaacctgaaacccccgtcacgctacagtttcaggggtctaagtttacccttagccactcgcagcttcggcagctgacagctggtcagcccctgcaactccagggctccgtactgcagattgtctccgccccaggccaaccttaccttcgtgcaccaggtccagtcgtgatgcagactgttagtcaagccggcgccgtgcatggcgctctgggctcaaagccccctgccggaggaccctcaccggccccgttaacacctcaggtaggagttcccggtcgggtggctgtgaacgccctcgccgtgggcgaaccaggaacagcatctaaacctgcctcgcctattgggggtcctacccaggaggagaagactcggctcctgaaggaaaggctcgaccagatctacctggttaacgaaagaaggtgctcccaggcccccgtttatgggagagacttactccggatatgcgccctaccatcacacgggcgtgtccagtggcgcggtagtctcgacggccgcagggggaaggaagcgggccctgcccactcatacacatctagttccgaaagcccctccgagctgatgttgactctgtgcaggtgtggggagtcattgcaggacgtgattgaccgagtcgcctttgtgatcccccctgtcgtcgccgctcctccctccctccgagttcccaggccccccccactctatagtcaccgaatgcgcatcctaagacaggggctgagagagcacgcagcgccttactttcagcagctcaggcagactaccgcacctaggctgcttcagtttccggaactacgactagtgcaatttgactctgggaagctagaggctctggcgatcctgcttcagaaactcaaaagcgagggacggagggtgctgatcctgtcccagatgatccttatgctggacattctggagatgttcctgaacttccattatctgacatatgtcaggattgacgagaatgcttcaagcgaacaacgccaggagctcatgcgtagtttcaatagagaccgccggatcttttgtgcaatcctgtctacacattcaaggactacgggtatcaacctggtggaggctgacacggtagtcttctacgataacgatctcaatcctgtcatggacgcaaaggcacaagaatggtgtgaccgcattggtcgctgcaaagatattcatatctaccgcttagtgagcggtaactccatcgaggagaagctgcttaagaacggcactaaggacctgatacgggaggttgcagctcaggggaacgactatagcatggccttcctgactcaacgcaccattcaagaactcttcgaagtctactcgcctatggacgatgcgggctttcccgtgaaagcagaagaattcgtcgttttgtctcaagaaccatctgtgacggagacaattgcccccaaaatcgcccgcccatttattgaggctttgaaaagtatcgagtatttggaggaagatgctcagaaatctgcacaggaaggagttctcggtccccacacagacgcattaagtagcgattcagagaacatgccatgcgatgaagaaccctcccagctggaggaactggcagactttatggaacaactgaccccgatcgagaaatacgctctgaactatttggaactgttccacacttctatagagcaggaaaaagagaggaactctgaggatgccgtcatgactgccgtgcgagcttgggaattctggaatctcaagactctgcaggaacgcgaggctcgactgcgtctggagcaagaagaagccgagttactaacctataccagagaggacgcctactcaatggagtatgtgtacgaggacgtcgacggccaaaccgaagttatgcccctctggactcctcccacgcccccccaggacgactcagacatctacctcgacagcgtaatgtgtctgatgtacgaggctacgcccatccctgaggccaagctgccccccgtatatgtaaggaaagagcgaaagagacacaaaaccgaccccagtgcggccgggcgaaaaaaaaaacagcgccacggggaagcggtggtcccacctaggtcactttttgacagagcgacccctggcctgctgaaaattcggcgggagggtaaagagcaaaaaaagaacatactcttgaagcagcaggtgcctttcgcaaagcccttgcctaccttcgcaaagcctaccgccgagccaggacaggataatccagaatggctgatcagcgaagattgggcgcttttacaggccgttaagcagctgctggagcttcccctgaacctaaccatcgtgtctcccgcacacactccaaattgggatttggtaagcgatgtagtgaatagttgttctcgtatttatcggtcatccaaacaatgtagaaaccgctatgagaatgtcatcatcccccgggaagagggaaagagcaagaataatagacctctgaggactagccaaatctatgctcaggacgagaacgccacccacacccagctgtatacctctcacttcgacctgatgaaaatgacggccgggaagagaagtcctcccatcaagccactgttgggcatgaacccgttccagaagaatccaaagcacgcctccgtcctggccgagtctggcattaactacgataagccactgcctcctatacaggtggcatcattgcgggcggaaaggattgctaaggagaaaaaagccctcgccgatcaacagaaagcccagcaacccgccgtcgcgcagcccccccccccgcagccacagcctcctcccccacctcaacagccccctcctcccctgccgcagccacaggcagctgggtctcagccccccgctggcccacctgctgtgcaaccgcaacctcagccacagcctcagacccagccacagccggtgcaagctcccgccaaagcccagcctgccatcaccacaggtggctcggctgccgttctggctggtacgatcaagaccagcgtgactggcacaagcatgcccacaggagctgtgagtgggaatgtcattgtgaacacgattgctggggtgcccgccgccacctttcagtcaatcaacaagaggctggcatcccctgtggcccccggggcgctgactacgcccgggggcagcgctcctgctcaggttgtgcacacccagcctccacctagagccgtgggttcccccgctaccgctactcctgatcttgtgtcaatggctaccacccagggcgtccgcgcagtaaccagcgttactgctagcgctgttgtgacaaccaaccttacaccagtgcagactcctgcccgaagtctggttccccaagtttctcaggctacaggcgtgcagctgccggggaagacaattactcctgcacacttccagctgcttcggcagcaacagcagcagcagcagcagcaacagcagcagcaacagcagcagcagcaacaacagcaacagcagcagcagcaacagcaacagacaacaacaaccagtcaagtgcaggtgccgcaaatccagggccaggcacagagcccggcgcagatcaaggccgtaggcaaactcacgcctgagcacttaatcaaaatgcagaagcagaaacttcagatgcccccacagccgccccctccacaggcccagtcagcccctccacagcctacagctcaggtccaggtgcagacatctcagccaccccaacagcagtctccgcagcttacaactgtgacggctccaagacctggcgcactcctgaccggaacaaccgtcgcaaaccttcaagtggcaaggctgacacgcgtccctacctcgcaactacaagcccaagggcagatgcagacgcaggcaccacaaccagcccaggtcgcccttgccaaacccccagtcgtgagcgtgccggccgcggtcgtcagttctcccggagtaaccaccctgccaatgaacgtggccggcatatccgtagctattggtcagccccagaaggccgccggtcaaaccgtggtggcacagcccgttcacatgcaacaattgcttaaactaaagcaacaggcggtgcagcaacagaaggccattcagccccaggctgctcagggtcctgcggcagtacagcagaaaatcacagctcagcaaatcactacccccggagctcaacagaaggtggcctacgctgctcaacctgccctaaaaacacagttcctgaccaccccaatttcacaagcccaaaaactggctggcgctcagcaggtgcagacgcagatccaggtcgccaagctgccacaagtggtgcaacagcagacaccagtcgctagtattcagcaagttgcctctgcttcccagcaggcctccccgcaaactgtggcactgactcaggccacagctgcgggacaacaggtgcaaatgatccccgcggtcaccgcaaccgcccaggtcgtccaacaaaagctaattcaacagcaggtggtgacgaccgcaagtgcacctctccagacgccgggagccccgaatcccgcccaggtcccagctagttcggacagcccgtctcagcaaccaaagcttcagatgcgcgtgccagcggtgaggctgaaaacaccaacaaaaccaccctgtcagtag

SEQ ID NO: 186205 - DNA, 9369 bp, synthetic construct
  misc_feature 1..9369: note = Description of Artificial Sequence: Synthetic coding sequence
  source 1..9369: mol_type = other DNA
atgcaccacggcaccggcccccagaacgtgcagcaccagctgcagcgatccagggcctgccctggctcagaaggcgaagagcagcccgcccatcctaacccacccccgagcccagccgcaccgttcgcaccatcagcaagtccttccgccccacagagtccttcttatcagatacagcagctgatgaaccgctcccctgctactggacagaacgttaatatcacgctgcaatcggtcggacccgtggtaggcggaaaccagcagattacgctggctcctctgcctctcccctccccaaccagccctggatttcaattctcggcacagccgcgtcggttcgagcacggatccccttcatacattcaggtgacttcccctttgtcacagcaggttcagacacagtctccaactcagccgagccccgggcccgggcaggccctgcagaacgtgagagccggcgccccagggccaggactgggcctatgctctagttctccaacgggaggcttcgtggacgcatccgttctggtgcggcagatttcactcagccccagctctggcggacatttcgtgttccaagacggctccggactcactcagatcgcacagggtgcgcaggtccagctgcagcatcccggaacccctattacagtgcgggagaggcggccatctcagccgcatacccaaagtggcggtacaatccatcacttaggcccacagtcgcctgccgcggccggcggggctggcctgcagcccctagcttcaccctcccatatcactacagctaacctgcctccacagatctcctccattattcagggccagctcgtccaacaacagcaagtgcttcagggccccccacttccgagacctctgggatttgagaggacgccaggggtgttgcttccaggggccggtggggctgccggttttggaatgaccagtccccctccccctacaagcccatctcggaccgccgtgccccctggcctgtccagcctgcctcttacctccgtcgggaatactgggatgaaaaaggtccccaagaagcttgaagagatcccccctgccagcccagagatggcccagatgcggaagcagtgcttggactaccactatcaggagatgcaggctctgaaggaggtgttcaaggagtacctgatcgaactgttctttctccagcacttccaaggaaacatgatggacttcttggcgtttaaaaagaaacactacgcacctctgcaggcctacctgagacagaatgatctggacatcgaggaggaagaagaggaggaagaggaggaggaagaaaaatccgaggtcatcaatgacgagcaagctctggcagggtctcttgtcgccggggccggtagcaccgtagaaacagacttattcaaacgccaacaggcgatgccttctaccgggatggccgaacagagcaagcgcccaaggcttgaagtgggacatcagggcgtggtgtttcagcaccctggcgcagatgccggtgttcctctacagcagctgatgcccacagcgcagggagggatgcctccgacgccacaggccgcccagttggcaggccagcgtcagtcacaacagcagtatgacccatccaccggccctcctgttcagaatgctgcctctttgcacacaccattacctcaactgcctggtcgcctgccgccagccggagttccaacagccgccctgagtagtgcactgcaattcgcccaacagccacaagtggttgaagcacagacccaactacaaattccggtcaagactcaacagccgaatgtgccgatcccagcgccaccatccagccaacttcctatcccccctagccagccagctcagctggccctgcatgtgcccacacccggaaaggtgcaggtgcaggcctcgcagctttcctccttacctcaaatggtggctagtacccgcctgccagttgatcccgccccaccgtgtccccggccactcccaacaagcagtacttcatccctagcccctgtgtcagggagcggccccggaccttcaccggccagaagttcacccgtgaatcgcccgagcagcgccaccaataaggcattatccccagtaaccagcagaactcccggagtcgtggcctctgcccccactaagccccagagtcctgcccaaaatgcaacctcatcccaggattcttcacaagataccctgacggaacagatcaccctggaaaaccaggtgcaccagcgcatcgctgaattgagaaaggccggactgtggtctcagcgccgtctgcctaaactgcaggaagccccccgccccaaaagtcattgggattatctactggaagaaatgcagtggatggccacagactttgctcaggagaggcggtggaaggtcgctgctgctaagaagttggtaaggaccgtggtgaggcaccacgaggagaaacagctaagggaggaacgaggaaagaaggaggaacaatctaggcttcggcgcatcgctgcctcaacagcccgcgaaattgagtgcttttggtcaaacatagaacaggtggtggaaatcaaacttcgagtagaattggaagaaaaacgaaaaaaggcacttaacctacaaaaagtctcaagaaggggcaaggaactacgcccgaaggggtttgatgcactccaggaaagcagcctcgattccggaatgtctggccgaaagaggaaagcatcaattagcttgacagacgatgaggttgatgacgaggaggagacaattgaggaagaagaggccaacgaaggagtggtggaccaccagaccgagctcagcaacctggctaaagaagccgaacttcctttattggatctgatgaagctgtatgaaggcgcatttcttccttctagtcaatggcctcgacccaagccagacggggaagacacgtctggggaggaagacgctgatgattgtcccggtgacagagaaagccgcaaagatttggtgctcattgactcactgttcataatggatcagttcaaggccgcggagaggatgaacattggtaaaccaaatgctaaagacatcgctgatgtgacggcagtggccgaggctatcttaccaaagggctccgccagagtaacaacttcagtcaagtttaacgccccatccttgttgtacggagcattgagagactaccaaaagatcgggttggattggcttgccaagctatatcgcaagaacctgaacgggattctggcggacgaggctgggttaggcaagaccgtgcagattatcgcgttcttcgcgcacctggcgtgcaacgaaggcaattggggaccccatctagttgtagtgaggtcatgtaacatcctgaagtgggaacttgaattaaagcgatggtgtccaggtctgaagattctgagctacatcggctcacaccgcgaactgaaggctaagaggcaggaatgggcagaacctaatagctttcatgtctgtatcacttcgtacactcagttctttcgcggccttaccgctttcactcgcgtccggtggaagtgcctggtcatagacgagatgcagcgagtgaaggggatgacagaaaggcactgggaagccgttttcacactgcagtcccagcagcgtttgttgctgatcgatagcccacttcacaacacctttctggaactttggactatggtccactttctggtgcccggcatctctcgcccgtacttgagctccccactgcgcgcaccttccgaagagtcacaggactattaccacaaggttgtgatcagactccacagggtgacacagcctttcattttaaggaggaccaagcgggacgtagaaaagcagttgacaaaaaagtacgagcacgtcctgaaatgccgtctgtccaaccgccaaaaggccctgtacgaagacgtgattctccaaccaggaacccaggaggctctgaagtccggacattttgtgaacgttctaagcattctggtaaggcttcaacggatttgtaatcaccctggactagtggagcctagacatccgggcagtagctatgtggccgggcccctagaatacccttccgcctcgctgattctcaaagcattggaaagagacttctggaaggaagctgacctgtcaatgttcgatttgattggcctcgagaataagataacgaggcacgaggccgaactcctttctaagaagaaaatcccacgcaaattaatggaagaaatctcaacatctgctgcccctgcagcccgccctgccgcagcaaagctaaaagcctctcggcttttccagcccgtgcaatacggacaaaaacctgagggtaggactgtggcatttccctctacacacccccctagaaccgcagcccctactaccgcttcggcagcccctcaaggtccacttagaggaaggccaccaatagccaccttttctgccaaccctgaggcaaaagcagcggccgcccctttccagactagtcaggcgagcgcatccgcaccacgccatcagccggcatcagcgtcatctacggcagcatcccccgcacaccccgctaaactgcgggcacaaaccactgcccaggccagtactcctggccagccaccgccccagccccaggcaccgagtcacgccgctggtcagtctgccctcccacaacggctcgttctgccctcccaagcacaggcaagattgccatccggggaagtcgtgaaaatcgcccaattggcatccatcactgggccacaaagtcgcgttgctcagcccgagactcctgtaacactacagtttcaggggagcaagtttactctgagtcatagtcaactgaggcagttgacagctggacagccactccagctgcaggggtctgtgttgcagatagtgagcgctcctggccagccttacttacgggccccgggacctgtcgttatgcagaccgttagtcaggcaggcgctgtgcatggagcactgggctcaaaacccccagccggcgggcctagtccagccccgcttactccccaggtaggcgtgccaggaagggtggctgtgaacgcactagcagtgggtgagcctggcactgctagcaaacccgcaagcccaatcggcggtccaactcaggaagagaaaacaaggctgctgaaggagcgtttggaccaaatttacttggtgaacgaacggagatgctcgcaagctcccgtgtatggacgtgacctactgcgcatctgcgctctgccctcacacggaagagtgcagtggcggggctcactagacggacgtcggggaaaagaagccggccctgcccactcttacacatcctcctctgagagtcccagtgagctcatgctcaccctgtgcagatgcggggaatccctgcaagatgtgattgaccgggtggcgtttgttatcccacctgtggtcgccgctcccccatccttacgagtgcctcggcccccccccctctactcccatcgtatgaggattctgcgacagggactgagggagcatgccgccccctatttccagcaacttaggcagacgaccgctcccagactgctacagtttccagagctgagactggtgcagtttgattccgggaaactggaagccctggctattttattgcagaagcttaagagtgagggaaggcgcgtcttgattctgagtcagatgatactgatgctcgacatacttgagatgtttctgaattttcattacctcacatacgtgcgcatcgacgagaatgccagtagcgaacagcgacaggaactgatgcgcagtttcaatagggatagaaggattttctgtgcgatactgtctactcacagcagaacaacgggaattaacctggtggaggccgacaccgtggtattctacgataatgacctgaacccagtcatggacgccaaagcccaggagtggtgcgataggattgggcgatgcaaggatatccatatttatcggctagtgtctggtaactcaatcgaggagaagctgctgaagaacgggacgaaagatctgatccgggaagtcgccgcccaaggaaatgactattcaatggccttccttacccagagaacaatccaggagctgtttgaagtttactccccaatggatgatgctggtttccctgttaaagcagaagagttcgtcgtcttgtcccaggaaccatcagttactgagaccattgcccctaagatcgcgcgtccctttatcgaggctctgaaatctatcgaatatttggaggaggatgctcaaaagtccgcacaagaaggcgtgttaggtccccataccgatgcactgtcatccgattcggaaaatatgccctgcgacgaagaacctagccaacttgaggaactggcggattttatggagcagctgactccaatagagaagtacgctcttaattaccttgagttgttccacacaagtatcgaacaggaaaaggagcgaaacagtgaggatgcagtaatgacagcagtgagagcttgggagttttggaatctgaagaccctgcaggagagggaggcaagactgcggctggagcaggaagaggcagagctcctcacgtacacgagagaagatgcatatagtatggaatatgtctacgaggatgtagatggccagactgaggtgatgcccctgtggacgcctccaacccctccccaggacgactccgacatctacctggacagcgtcatgtgtttaatgtatgaggctacacccattcccgaagcgaagcttccacctgtgtatgttagaaaagagagaaagcggcataaaacagatccgagcgctgccggccggaagaagaaacagcggcatggagaggctgtggtgcctccacgctccctgttcgatagggccacacccggccttctgaagatccgaagagagggaaaggaacagaaaaagaacattctactgaaacagcaggtgccatttgcaaaaccattgcccacttttgctaaacctactgcggagcccggccaagacaatccggaatggctcatctccgaggactgggcactcttgcaagcagttaagcagctcttagagcttcccctgaacctgacaattgtgagtccagcccacacccccaactgggacctagtcagtgacgttgtcaacagttgctccagaatctacagatctagcaaacagtgtaggaatagatacgaaaacgtgattatccctagggaggagggaaagtccaagaataaccgccctcttcgcaccagccagatttacgctcaggatgaaaacgcgacacacacacagctgtacactagccactttgatttgatgaagatgacagctgggaagcgctccccaccaatcaagccccttctgggtatgaatccatttcaaaagaacccaaagcacgccagtgttctggccgagtccggcatcaattatgacaaaccactgcctcccattcaggtggccagcctccgggccgagagaatagctaaagaaaagaaagccctggccgatcaacaaaaggctcagcagcctgccgtcgcccagcctcctcccccgcagcctcagccacctccacctccacagcaaccacctccgccgctcccccaaccacaggctgcgggctctcagccccctgcggggccccctgctgtccagccccagccccagcctcagcctcagacccagccacagccagtgcaggccccagctaaggcccagcccgccatcactacgggaggcagcgccgccgtcctggccgggacaataaaaacctctgtgactggcacaagtatgcctaccggagcagtatcaggcaacgtgattgttaacactattgcaggagtaccagcagcaacgttccagtccattaacaagcggttagcctctcccgtggcgccaggcgccctcactacacccggaggctctgccccggcccaggtcgtgcatacccagcctccgccgagggccgtgggcagtcctgctacagccaccccggatcttgtcagcatggccactacacagggagtcagagctgttacttcagtgactgcatctgctgtggtgacaacaaatcttacacctgtccagaccccagcacgaagcctggtcccccaggtctctcaggccacgggcgtccaactgcctgggaaaactatcaccccggcccatttccagttgcttcgccaacaacaacagcaacagcaacagcagcagcagcagcagcagcagcagcagcaacaacaacagcagcagcagcagcagcagcagcagactacaacaactagtcaggtgcaggtgccccagattcaaggccaggcccagagcccagcccaaatcaaggcagtcggcaaactgacaccagaacatctgatcaaaatgcagaagcagaagctgcagatgccaccgcagcccccccctccgcaggctcaatctgccccaccccagccgaccgcccaagtccaggtgcaaacatcccagcccccccagcagcagtctccacagctgactactgtgacagcccctcggcccggggcgttgctcacaggaacaaccgtggccaatctccaggtggctcgcctcaccagagtcccgacaagtcagctccaggctcagggacaaatgcagacacaggccccgcagccagctcaggtagctctggccaagccgcctgttgtttctgtgcctgctgcggttgtttcatcccctggggtgaccactcttccgatgaatgtggccgggattagcgtagcgatcggccaaccgcagaaggctgctggccaaacggtggttgcccagccggttcacatgcagcagctgctgaagctgaagcagcaggctgtacagcagcagaaagccatccaaccgcaggccgcacaggggccggctgctgtccagcagaaaattacagcccaacaaataacaactcctggtgcccaacagaaagtggcctatgctgcccagcccgctttgaaaacccagtttttgactacccctattagtcaggctcagaagctggcaggcgcccagcaagtacagactcaaatccaagtggccaagctcccacaggtggtacagcagcagacacctgttgcgtccattcagcaggtggccagcgcctcgcagcaggcatctccccaaaccgtggccctcacacaggctaccgcagctgggcagcaggtacagatgatcccagctgtgacagccactgctcaagtggtccaacagaaactaatacagcagcaggtggtcaccacggctagcgcacctctgcagacccctggagccccgaaccctgcacaagtacccgccagtagtgactctcccagtcaacagcccaagctgcaaatgcgtgtgcctgccgttcggctaaaaacgcccactaaacctccatgccagtag

SEQ ID NO: 186206 - DNA, 2475 bp, synthetic construct
  misc_feature 1..2475: note = Description of Artificial Sequence: Synthetic coding sequence
  source 1..2475: mol_type = other DNA
atgcaccacggcaccggcccccagaacgtgcagcaccagctgcagaggtcaagagcctgcccaggctctgaaggcgaagagcaacccgcccatcctaatcccccgccctcccccgccgcccctttcgctccgagcgcttcacctagcgcacctcagagcccttcataccagattcagcagttgatgaacaggagccccgccacaggccagaatgtcaacattaccctgcagagcgtagggcccgttgtgggcgggaaccagcaaataaccttggccccactgccactgccatcaccgacttcaccaggatttcaattctcggcccagccaaggagattcgagcacggctcgccatcttacatccaggttacttctcctctttcccagcaggtccagacccagtcccctacccagcctagccctggccctggacaggcgctgcagaacgttagggctggggcacccgggccaggacttgggctttgttcctccagtcccaccggcggtttcgttgatgctagtgtcctagtcagacagatcagtctatcaccctcctccggcggacattttgtgttccaggacgggagcggcctgacccagattgcccagggcgcacaggtgcagcttcaacaccctgggacacctattactgttagagagcggcggcccagtcaaccccatacccagtccgggggtacgattcaccacttgggcccccaatctccagccgccgcaggcggagctggactccagccattggcctcaccgagtcacattacaaccgccaatctgcccccacagatttccagcatcattcagggccaactggtgcagcaacagcaggtactgcagggcccgcctctgcccagacccttaggattcgagaggacgcctggcgtgctcctgcctggcgcaggtggagcagccggctttggaatgacctcaccgccgccaccaacgtcaccaagccgcactgccgtcccccctggtctttcaagtttgcctttgaccagtgtcggaaatactgggatgaagaaggtccccaaaaagctcgaagaaatcccacccgcgagtcccgaaatggcccagatgagaaagcaatgtctagactatcattatcaggagatgcaggcactgaaggaggtgtttaaggagtacttaattgaactgttctttttgcagcatttccagggtaatatgatggatttcttagcctttaagaagaagcactacgcccctctgcaggcctatctgcggcagaatgatttagacattgaagaggaggaggaggaggaggaggaggaagaagaaaaaagtgaagtgattaacgatgagcaggcactagcaggcagcctcgttgcgggtgccggctcaaccgtggaaacagatctgttcaagagacagcaagccatgccttctaccggaatggccgggggcatgcccccgaccccccaagctgcccagctggccgggcagaggcagagccagcaacaatatgacccttctacaggcccacctgtccagaacgccgcctctctgcacacccctcttcctcagcttcccggcaggttgcctcctgccggcgtgcccacagcagccctgtcctcagcactgcagttcgctcaacagccccaggtggttgaagcccaaacacaactgcagattcccgtgaagactcagcagcctaacgtgcctatcccagctcccccatctagtcagctcccgatcccgccgagtcaaccggcccagctagcgctgcacgtgcctacccccggcaaggtgcaggtgcaggcctcccagctcagctcgcttcctcagatggtcgcttcaaccagacttccagtggacccagccccaccatgcccccgcccactccccactagttcaacttccagtctggcgcccgtaagcggatccgggccgggtcctagccccgcccggagctctccagtgaacagacccagcagtgctacaaacaaggcgctttctcccgtcacttctcgaactcccggcgtcgttgctagtgcccctacgaagcctcagagccctgcacagaatgcaaccagttcacaagactcctcacaggacaccctgacagagcagataactctggagaatcaagtgcatcaaaggatagcggagctgcgcaaagccgggttgtggtctcagaggagactccctaaactgcaagaggctcctcgacctaaatctcactgggattacttgcttgaagagatgcagtggatggccacagactttgctcaggaacggcgatggaaggtggccgccgcaaaaaaattagtgagaacagttgtgcggcatcatgaagagaagcagttacgagaagagagaggaaaaaaggaggaacagagtaggctccgtaggatagcagcctctactgcccgggaaatagaatgcttctggtccaatatcgaacaggttgtggaaatcaaattacgtgtggagttagagtag

SEQ ID NO: 186207 - DNA, 9372 bp, synthetic construct
  misc_feature 1..9372: note = Description of Artificial Sequence: Synthetic coding sequence
  source 1..9372: mol_type = other DNA
atgcaccacggcaccggcccccagaacgtgcagcaccagctgcagcggtcgagagcatgcccaggcagcgagggagaagaacaaccagcacacccaaatccaccaccaagccccgcagcccccttcgctccctccgccagtccatcagcaccacagagccccagctatcagattcagcagctgatgaaccgcagtccagccaccgggcagaacgtcaacataaccctgcagagcgtgggacctgtggtgggcgggaatcaacagatcacattggctcccctacccctgcccagcccgacaagtccagggttccagttcagcgcccaacctcgcaggttcgaacatggcagcccaagctatattcaggtgacttcccccctgagtcagcaagtacagacacagtctccgacccaaccctctccaggtccagggcaggcgctgcagaacgtccgcgcgggagcccccggacccgggcttggcctgtgttctagctctcccacaggcggattcgttgatgcatctgtgctggtgcgacagatttccctctctccatcatctggaggacactttgtgtttcaggacgggagtgggctgacccaaattgcgcaaggagctcaagtacagctgcagcacccaggaacccctatcacagtgcgggaacgcagaccgagccagccccatacacaatcgggggggaccattcatcacctcggtccacagtcacctgcagcagccggcggagctgggctgcagcctctcgcctctcccagccacatcactactgccaacctgccaccccagatttcaagcatcatacagggacagctggtgcaacagcagcaagtgcttcagggccccccattgccccgccccctgggctttgaacgaacccccggagtactgctgcctggcgctgggggagcggccgggttcggaatgacctcccccccgccccctacatcgccgagccgaaccgctgttcctcctggcctcagctctcttcctctgacgtcagtgggcaatactggtatgaagaaagtgccaaagaagttagaagagatcccccccgcttctccggagatggctcagatgcgaaaacaatgtttggactaccattaccaggagatgcaagcactgaaggaagtatttaaagagtacctgatcgagctgttcttcctccagcactttcagggtaatatgatggacttcttggcctttaagaagaaacactatgccccattgcaagcatacctgcgacaaaacgatcttgacattgaggaggaagaagaggaagaagaggaggaagaagaaaaatctgaggtgatcaacgatgagcagcaggcactggccggatccttggtagctggcgccgggagtactgtggaaacggatctgtttaagcggcagcaggccatgccctcaaccggaatggcggagcaaagtaaaagacctcggctcgaggtgggacaccagggggttgtcttccagcatcctggagctgacgcgggcgtccccctgcagcagcttatgcctactgctcagggtgggatgccaccaacaccacaagctgctcagctggccggacaacgccaatctcaacaacagtatgacccatctactggtcccccagttcagaatgcggcttccctgcatacacccctgcctcagttgcccggaaggctccctccagctggggttcctaccgcagccctgagttcggcattgcaattcgcccagcagccccaggtagtggaagcacagacacagctgcagataccagtgaagactcagcagccgaacgttcccatccctgcccccccatcctctcagctccctatccccccatcacagcctgcccagctcgcccttcacgtgcccactcctggaaaggttcaagtacaagccagccagctgagtagccttcctcaaatggtagcgtcaacccgtcttcctgtcgaccctgcacccccttgccctcggcccctccccacttcctccacttcaagtctggcgcctgtttcgggttccggcccggggcctagtccagctcgttcctcacccgtgaataggcctagttctgctactaacaaagccctaagccccgtgacctccagaacaccgggggtagtagcaagcgccccaacgaaaccacaatccccagctcagaatgcaacttcatcccaggacagctctcaggacactctgaccgaacaaatcaccttggagaaccaggtgcatcagcgcatcgcagagctgagaaaggcaggcctgtggtctcagaggaggcttcccaaactgcaggaggcgccgcgtcctaagagccactgggattacctgctggaggagatgcagtggatggccacagactttgcacaggagaggcgatggaaggtggccgctgccaagaaacttgtacgcacagtcgtgaggcatcacgaagagaaacagttgcgtgaggaaagaggtaagaaggaggaacaatcaaggttacgcagaatcgccgcttctacagcgagggaaatcgaatgcttctggtcgaacatagagcaagtcgtagagataaaacttagggtggagttggaagaaaaacgcaaaaaagcccttaacctgcagaaagtgtctcgaagaggaaaggagctgcgcccgaaggggttcgacgctctgcaggaaagcagtttagactcgggtatgtcaggcaggaaacggaaagccagcatttcactaacagatgatgaggtggatgacgaggaagaaaccattgaggaggaagaggccaacgagggcgtggtggatcaccagacagagctgtcaaatcttgccaaggaagctgagctaccactcctggacttgatgaaactctatgagggagcatttctgcccagttcccagtggccacggccaaagcctgatggcgaagatacaagcggggaggaggatgccgacgattgtccgggagaccgagaatctcgcaaggatctagtcctcatcgacagcttgtttatcatggatcagtttaaagccgcagagcgcatgaatattggaaaacccaatgcgaaagatattgcagatgtgacagccgtggccgaggccattttgcctaaaggcagtgctcgagtgactacctccgtgaaattcaacgccccctccctgctgtatggcgcactcagggattatcaaaaaattggattggattggttagcaaagttatatagaaagaatctgaatgggattcttgcagacgaggccggacttggaaagactgtccagatcatcgcatttttcgctcacttagcttgcaacgagggcaactggggtccacacctggtcgtcgtgaggagctgcaacatcctcaaatgggaattagagctaaaacgctggtgtcccggtctgaaaatcctgtcttatattgggtctcatcgggagcttaaagcgaaacgccaggagtgggcggaacctaactcgttccacgtttgtattacttcgtacacccagttttttaggggcctgacggcttttacccgcgttcgatggaagtgtctcgtgattgacgaaatgcagagggtaaagggaatgacagagaggcactgggaggccgtgttcacactgcagtcccagcaacgactccttctgatcgattcaccactgcataatactttcctcgaactttggaccatggtccacttcctcgtaccaggtatctcgcgaccctacctaagcagtcccctccgagcacctagcgaagagtcacaggattactatcataaagtcgtcatccgtctgcaccgtgtgacacagcctttcatcttacggagaaccaagcgcgatgtggagaaacaactcaccaagaagtatgaacacgtactgaagtgcagactcagcaatagacaaaaggctttatacgaagatgtgatcctccagcctggaacacaggaagccctcaagagtggtcactttgtgaatgttctttcaatacttgtgcggctgcaaagaatttgcaaccaccccggactggtggagccccggcacccaggctcatcctacgtggccggtcccctcgagtacccatctgccagtctgatcctgaaggcccttgaacgcgacttttggaaggaggcagacctttctatgtttgatctgatcgggcttgaaaacaaaattactagacacgaggccgaattgctgtccaagaagaagattccgcggaaattgatggaagagatttcaacttctgccgcacccgctgcccgaccagcagccgccaagctgaaagcctccaggttattccaaccagtgcagtatgggcaaaagcccgagggccggactgtggcctttccaagcacccatccgccaaggaccgcagcccctaccacggcaagcgcagctccacaggggcccctgcgcggaagaccacctatcgccaccttttcagcaaaccccgaagccaaagctgccgcggctccgttccagacgtcccaagcctcggcgagcgcacctcggcatcagccagcttccgcttcaagcactgctgccagcccggcccaccccgcaaaactccgggcccaaactactgcccaggcatcaacccctggccagcccccaccccagcctcaggccccctcccacgcggctgggcagagcgcactgccgcagcgcctagtcctgccctctcaggcgcaggcgcggctcccaagcggcgaggtcgtgaagattgctcagctcgcaagtatcactggccctcagagcagagttgcccagcctgagacccctgtgaccctccagtttcaagggagcaagtttaccttaagtcattcccagctgagacagctcacagctggccaacccttgcaactgcaaggcagcgtcttgcagattgtgagcgcccctggccaaccatatttgagggctccaggccccgtcgtcatgcaaaccgtctctcaggctggtgccgttcacggggccttgggttctaagcctcctgccggaggcccatcccccgcaccacttacccctcaagtaggggttcctggccgagtggctgtgaacgccctcgctgtcggagaaccaggcaccgcctctaaaccggcctcgccaatcggaggccccacccaggaggaaaaaacccgccttcttaaggaacgtttggaccagatatatcttgtgaacgagcgacgctgttcgcaagccccagtgtatggtcgggatttactgcggatctgcgcgcttccgtcccatgggagagtacagtggcggggatccttggacggaagacggggcaaggaagccgggccagcgcatagttacacaagttcttctgagagcccatcagagttgatgttgactctctgccggtgcggggagtctttgcaggatgtaattgaccgcgtggccttcgtcatcccacctgtggtggctgccccgccctcactgagggttccaagacccccacccctttattcgcatcgcatgcgaatcttgagacagggtctgcgcgaacacgcagctccatacttccagcagttaagacagacaacagcccctcgtttactgcagttccccgaactacgcttagtacagttcgatagtggtaaactcgaggccctagctatcctcctgcaaaagttgaagagcgaaggccgccgggtgcttattctgtcccaaatgatcttaatgctcgacatccttgaaatgtttctaaattttcattatctgacatatgtgcgcatagacgaaaatgcatcttcagagcagcgtcaggagctgatgcgttcctttaacagggaccgccggattttctgcgctatcctaagcacccatagtcggactaccggcatcaatcttgtggaagccgataccgtggtgttttacgataacgacctaaacccggtgatggacgccaaagcacaggagtggtgcgatcgcattggccgttgtaaggacattcatatctacagactggtctccggcaattctattgaggaaaagctcttgaagaatggtaccaaggacctgattcgagaggtagcagctcagggaaatgactactcaatggcattcctgactcagcggacaattcaagaactatttgaggtgtattcccccatggatgatgccggattcccagtcaaggctgaagaatttgttgtgctaagccaagaaccaagtgtgactgagaccattgcccctaagattgccaggccttttatcgaagcactcaaaagtatagagtacctggaggaggatgctcagaagtccgctcaagagggggttctaggccctcatactgatgctttgtcatcagacagtgagaatatgccatgcgacgaggaaccaagccagctggaagagctggccgatttcatggagcagcttacccctattgagaaatacgccttgaattacctagagctgttccatacaagtattgaacaggaaaaagagaggaactctgaagacgccgtgatgaccgccgtgcgcgcttgggagttctggaacctgaaaacactacaagagcgggaggcaaggctgcggttggaacaggaagaagccgagctactgacgtacactagagaggatgcttacagtatggaatacgtgtacgaagacgttgacgggcagacagaggtcatgcctctctggacccctcccacccctcctcaggatgatagtgatatttacctggacagtgtcatgtgtctcatgtatgaagcgacacccattcccgaggccaaactgcctcccgtgtatgtcagaaaggaaaggaagcgtcacaagacagatccttccgcagctggaagaaagaagaaacagcgacacggagaggctgtcgtgccgccacggagtctgtttgacagggccacacccggattgttgaagatacggcgcgagggtaaggaacagaagaaaaatattctcctgaagcagcaggtgcccttcgcaaagcccctgcccactttcgcaaagcctaccgctgagcctggccaggataaccccgagtggttgatttctgaggattgggccctgttgcaggccgtgaagcagctgctcgagctccctctaaacttaacaatagtgagtcctgctcatacgcccaactgggacctggtgagcgacgtggtcaacagttgttcccggatctataggtcctcaaaacagtgcaggaaccggtacgagaatgtgattataccaagagaagagggcaagtccaagaataaccggcctttgagaacatcccagatttatgcccaagacgaaaatgctacacacacccaactgtacacgtcgcacttcgacctgatgaagatgacagcaggtaaacgatcaccgcccattaagccgcttttgggtatgaatccattccagaagaatcctaagcacgcgtctgttctcgctgaatcaggcataaattacgataagcccctgccccctattcaggtggcttctcttcgtgcagagcgtatcgcaaaagagaaaaaggctctcgcagatcagcaaaaagcccagcagcctgctgtggcacagccgcccccccctcagcctcagccgccaccacccccccaacagcccccccctccgctgccacagccgcaagccgctgggtctcagcctccagcagggccacccgccgtacagccacagccccagccgcagccccagacacagcctcagcccgtacaagctcccgcgaaggcccagcctgctatcaccactggcggatcggccgccgtcctggcaggcaccatcaaaacctcagtgactggcaccagcatgcccaccggagctgtttcaggaaatgtgattgtgaatacgattgctggcgtccccgccgccacctttcaatcaattaacaagcggctggcatcccccgtcgcgcctggtgcactgactacgcctggggggtctgcaccggcacaggtcgtacatacacaaccaccgccacgggctgtggggtcacctgcaaccgccacacccgacctcgtgtccatggccactacacagggtgttcgcgccgtcacttccgtgaccgcatccgcggtcgtgaccacaaatctcaccccagtgcagacacctgcgagaagtctcgttcctcaggtgtctcaggccaccggcgtgcaattgcctggtaagaccatcaccccagcccattttcaattattgcggcaacaacagcagcagcagcagcagcagcagcaacagcagcagcagcagcagcagcagcagcagcaacagcagcagcagcagcaacagacaaccacaacgagtcaggttcaggtgccacagatacagggccaagcccagtcacccgcccagatcaaggctgtaggcaagctcacccctgagcacctcattaaaatgcaaaagcagaagctgcagatgcccccgcagccacctccaccccaagcgcaaagcgccccccctcagcccaccgcccaggtccaagttcagacttcccagcctccccagcaacagagtcctcaactaactacagtcacagcaccgcgccctggggctctgctgacagggacaaccgtggccaacctgcaggttgctcgtctgaccagggtgcccacctcccagctccaggctcagggccaaatgcagacacaagctccacaaccagcccaggtggcactagctaagcctcctgtggtgagcgtgccagcagccgtagtttcttcgccaggcgtaactacactgcccatgaacgtggcgggcatttcagtcgcaataggccagcctcaaaaggcagccgggcagactgttgtcgcccagcctgtccatatgcaacagcttctcaaactgaagcagcaggctgtgcagcagcagaaagccattcagcctcaagcagcacaagggcctgccgccgtgcagcagaaaatcacagcccagcaaatcaccaccccaggcgcccagcagaaagtggcctacgccgcgcagcctgccttgaaaactcagttcctgactaccccaattagccaggcgcagaagttggctggggcccagcaagttcaaacccaaattcaggtcgctaaactgccccaagtcgtgcaacagcaaacacccgtcgcaagtatccagcaagtcgcatcagcaagtcaacaggccagtccccaaacggtggcactcacgcaggcgactgctgccggtcagcaggtgcaaatgatcccagcagttactgcaaccgctcaggttgttcagcagaaactgatccagcagcaggttgtcacaactgcatccgcgccactgcaaacgcccggagcgccaaacccggcccaggtgccagcatctagcgatagtccttctcaacagccgaagctgcagatgcgcgttcccgcagtccgactgaagacacctacgaagcctccctgtcagtag

SEQ ID NO: 186208 - DNA, 1314 bp, synthetic construct
  misc_feature 1..1314: note = Description of Artificial Sequence: Synthetic coding sequence
  source 1..1314: mol_type = other DNA
atgctgcagggcccccgggccctggccagcgccgccggccagacccccaaggtcgtacctgctatgtcccccaccgaactatggccctctgggttaagcagtcctcagctatgtcccgctacggccacctactacacccccctttatccccaaactgctcctcctgcagctgccccggggacttgcctcgatgccacaccacacggacccgagggccaggtcgtgcgctgcctgccagccggacggctccctgctaagcgcaagttagatcttgagggaattggacggcccgtggtgcctgaatttcctacgccaaagggcaagtgtatccgtgtggacgggttgcccagccctaagactccaaagtcaccaggggaaaagacacggtatgacacctctctcggacttctgacgaagaaattcatatacctgttatctgagtctgaggacggagtcctcgatcttaactgggctgctgaggtgttggatgtccagaaacgtagaatttacgatataacgaacgtgctggagggaatccagctcatccggaaaaaagcaaagaacaacattcaatgggtcggacggggaatgttcgaggatccaacgaggcctggaaagcaacagcagcttggacaggagctcaaggaactcatgaatacagagcaggccctcgatcagctcattcagagctgttctctctccttcaaacacctgaccgaagacaaagcaaataagagattagcgtatgttacataccaagacatccgggccgtaggaaacttcaaggaacagaccgtgatagcggtcaaagctcccccacagactcgtctcgaagtgcccgacaggacagaagacaatttgcagatttatcttaaatcaactcaggggcctatcgaggtttatctgtgtcccgaagaagttcaggagcctgactccccttctgaagaacctctgccaagcacttccacgctgtgtcccagccccgactcagcccagccctcttccagtaccgatccgagcatcatggagccaacggctagttcagtaccggcccccgctcccactcctcagcaggccccacctccaccatcacttgtaccactcgaggccacagactctctcctagagctcccccaccccctgcttcagcagacagaagatcaatttcttagccccaccctggcttgcagctccccactcatttccttctccccttccctggaccaagatgattacctctgggggcttgaagccggtgagggtattagcgatctcttcgattcctacgatctgggagatctgctcatcaactag

SEQ ID NO: 186209 - DNA, 1398 bp, synthetic construct
  misc_feature 1..1398: note = Description of Artificial Sequence: Synthetic coding sequence
  source 1..1398: mol_type = other DNA
atgcggaagggcatccagcccgccctggagcagtacctggtgaccgccggcggtggtgagggtgcagccgttgtcgctgctgccgcagctgcaagtatggataaaagggctctcctggcctccccgggcttcgctgccgcagctgccgccgccgccgcaccgggggcctacattcagatcctgactacgaacaccagtacgacttcctgctcatccagcctgcagtcgggcgctgtggcagccggacctctcctgccgtccgcccctggtgctgaacaaactgccgggtcgctattatacactacaccccatggcccgagcagtagggccggattgctgcagcaacccccggcgttgggacgcggcggtagtggcggtggaggaggcccacctgcaaaacgccgactggagctcggtgagtccggacatcagtacttatcagatggcctgaaaacccctaagggaaaagggcgtgccgcattgcggagccctgactcacccaaaacgccaaagtcacccagtgaaaaaaccaggtatgacacatcactgggattgctgaccaagaagtttatccaattactttcacagtctcccgacggtgtcctcgatctgaacaaagcagcagaagtcctgaaagtccagaagcgtcggatctacgatattactaatgtgctagaaggtatccacctgattaagaagaagtccaagaataacgtccaatggatgggctgttctctgagcgaggacggagggatgctggctcagtgccaaggattaagtaaggaagtaactgaattgtcgcaggaagagaaaaagttggacgaactgatccaatcttgcacccttgacctcaaactcctgaccgaagactcggagaaccaacggctcgcgtacgttacctaccaggatataaggaagatatcaggcttgaaggaccagaccgtgatcgtggtgaaggctcctcctgaaacgcggctggaggttcccgattccatcgaaagcctccagatccatctcgccagcacacagggacccattgaggtttatctgtgtcccgaagagacggagactcatagtcccatgaaaacaaataatcaggatcataacggaaacattccaaagcccgctagtaaggatttggcgtccacaaactccggccacagtgactgctctgtatccatggggaacttgtctccactggctagcccggcaaatctgctacaacaaaccgaagaccagatcccatcaaaccttgagggaccattcgtcaacttgttgcctcccttgctgcaggaggactatctgctgagcctgggcgaggaagagggtatcagcgatcttttcgatgcatatgatctggaaaaactccccctcgtcgaagattttatgtgttcctag

SEQ ID NO: 186210 - DNA, 387 bp, synthetic construct
  misc_feature 1..387: note = Description of Artificial Sequence: Synthetic coding sequence
  source 1..387: mol_type = other DNA
atggacaagcgggccctgctggccagcggcggcggcggcggccccccggcaaagcgacgtcttgaacttggagaatccgggcatcagtatctttccgatgggctgaagaccccaaaggggaaagggcgtgcagctctccggagccccgattcccctaaaaagaagacacgctacgacacatctctggggttactcacaaaaaaattcattcagttgctaagccagtcccctgacggtgtgctagaccttaataaagcagccgaggtgctcaaggtgcagaagagaagaatctatgatattactaacgtgctcgaagggatttccgatctgttcgatgcctacgatctggagaaactgcccttggtcgaggactttatgtgttcatag

SEQ ID NO: 186211 - DNA, 1005 bp, synthetic construct
  misc_feature 1..1005: note = Description of Artificial Sequence: Synthetic coding sequence
  source 1..1005: mol_type = other DNA
atgcccctgcagcagcaggccaagcggcggctggagctgggcgagagtggacaccaatacttgtcagatggcttgaagacacccaagggcaagggaagggcagcactgcgttcacctgactccccgaaaaagaagacacgatatgatacttccctaggcttactaacgaagaagtttattcagctactttcccagtcacccgatggcgtgctcgacctgaacaaagctgctgaggtgctgaaagtccagaaaagacggatctatgacattaccaatgtcctggagggcattcatctgatcaagaaaaagtccaagaataacgtgcaatggatgggatgttccttaagtgaagacggagggatgcttgctcagtgccaaggcctaagcaaggaggtcaccgaactctctcaggaagagaaaaaactggacgaactgattcagagttgtaccctggacctgaaactcctgaccgaagacagcgagaaccagcggctggcgtatgtgacctaccaggacattcgcaagattagcggcctgaaggaccagaccgtgatagtggtgaaggcgccacctgagacgagactggaggtgccagatagcatcgagagcctccaaattcacctagctagcacccagggacccatcgaagtctatctgtgccctgaagagaccgaaacacattctcccatgaagactaacaaccaagaccacaacggaaacattcctaaacctgcgtcaaaagacttagcgtccacaaattccggccattcagactgcagcgtttctatgggtaatctttcaccgctggcctcccctgccaacttgttgcagcaaaccgaggatcagataccttctaacctagagggtccatttgtcaacctcttgccgcctctccttcaagaagattacctgctcagcctaggcgaagaggaagggatcagtgacctgttcgacgcctacgatctggagaaattacctctggtggaggacttcatgtgcagctag

SEQ ID NO: 186212 - DNA, 2736 bp, synthetic construct
  misc_feature 1..2736: note = Description of Artificial Sequence: Synthetic coding sequence
  source 1..2736: mol_type = other DNA
atggaggtgaactgcctgaccctgaaggacctgatcagcccccggcagccccggctcgacttcgcagtggaggacggtgagaatgcacagaaggagaatatctttgtggaccgaagccgcatggctccaaagacccccattaaaaacgaaccaattgatctgtccaagcagaagaaattcacacccgaacgcaatcccatcacacctgttaagttcgtcgatcgccagcaggcagaaccctggacacccaccgcaaacctcaagatgcttattagtgccgcatcgcctgatatccgcgaccgagaaaagaagaaagggctgttccgccccattgagaacaaggacgatgctttcactgatagtttacaactggatgttgtgggtgattcagctgtggacgagttcgagaaacagaggcccagcaggaagcaaaaatccttagggctactgtgtcagaaattcctggcaaggtaccctagctatccactgtctaccgaaaagaccactattagtcttgatgaggtcgcagtgtccctgggagtagagaggcgcaggatctatgacattgtcaacgttttggaatccttgcatctcgtatcccgtgtcgctaaaaatcaatatggatggcacggccgacatagtctgcctaagactcttagaaaccttcagcgtctaggcgaggaacaaaagtatgaggagcaaatggcgtaccttcagcagaaggaactggatttaatagactataagtttggagagcggaagaaagacggcgacccagattctcaggagcaacagctattagatttctcagagcccgattgtccatcttctagtgcaaactcacggaaagataaatctctgcgcattatgtcacagaagtttgtgatgctcttcttagtatcaaaaacaaagatcgtgacattggatgtggccgctaaaatcttaattgaagaatcccaggacgcaccagatcactctaaattcaaaacaaaggttcgaaggctctatgacattgcaaacgtactgacctcactggctcttattaagaaggtacacgtcactgaggaaaggggtagaaagccggccttcaagtggattggccccgtggattttagctcctctgacgaagagcttgtggatgtgtctgcgtcggtgttacctgaactgaagcgcgaaacatatgggcagatccaggtatgcgccaaacaaaagttggcgagacacggctctttcaatactgttcaggcatccgagcggattcagcgaaaggtgaattctgaaccttcatccccctatagggaggagcagggatcgggcggatactcactagagatcggctctctggcagccgtttaccgccagaaaatcgaagacaattcccaaggaaaagcctttgcgagtaaacgagtcgtgcctccatcctctagcctggacccagtggcaccttttcccgtgctgagcgtggatcctgaatattgtgtgaacccacttgctcacccagtattcagcgtagctcagacagacctgcaggctttttctatgcagaatggactcaacggacaggttgatgtgtccctcgccagtgccgcatccgccgtagagtccttgaagcccgcacttctcgctgggcaaccactggtgtatgtgccatcggcctccctctttatgttatacggctcactacaggaggggccggcctcaggatccggcagcgaacgggacgatcgatcttccgaggcaccagcaactgttgagctgagctcggcgccatcagcacagaagagactgtgtgaggaacgcaaaccacaggaggaggatgagcccgctactaagcgccagagtagagagtatgaagacggaccactgagcctggtgatgccaaaaaaacctagtgacagcactgatctggcatccccaaagaccatgggaaatagagcaagcattcccctgaaagacattcacgtaaatggccagcttccagctgcagaggagatatccggcaaagccacagctaatagtcttgtctctagtgagtggggcaatccaagtagaaatacagatgtggaaaagcctagcaaagagaatgaaagtaccaaggaaccctctcttttacaatacctatgtgtgcaatcccccgctgggttgaacggcttcaatgtgctgctctcagggtcacagacccccccgactgtggggccctcgtccggccagctgcccagcttctccgtgccgtgtatggtgcttccgtcccctccccttggcccatttcctgtcttgtactcgcccgccatgcctggcccagtgagcagtacgctgggcgcactgccaaatacaggacctgtgaacttctcactccctggtcttggatccattgctcagcttctggtgggaccaacagcggtggttaacccaaaaagctctacgctgccaagtgccgaccctcaactccaatctcagccaagcttgaatctcagccccgtgatgtccagaagccacagcgttgttcagcagcccgaatctcctgtgtacgtgggacatcccgtctccgtggtgaaactccaccaaagtcccgtgcccgtcactcctaagtcgatccaaagaacacacagggaaacattttttaagacacccggaagtctgggagatccggtgctaaagaggagggagagaaaccagtcaagaaacacgtccagtgcacaaagaaggctggaaattcctagtggtggagccgattag

SEQ ID NO: 186213 - DNA, 1149 bp, synthetic construct
  misc_feature 1..1149: note = Description of Artificial Sequence: Synthetic coding sequence
  source 1..1149: mol_type = other DNA
atgcagaacggcctgaacggccaggtggacgtgagcctggccagcgcagcttcagcagtggaatcgttgaaacccgccctgttggccggccaacccctggtttatgtacctagcgcttctctttttatgctatacggaagcctacaggagggtccagcgagcgggtctgggtctgagagggatgacaggtccagtgaagctcccgccaccgtggagctgtcctcagccccaagcgcgcagaagcgcctgtgcgaagagagaaagcctcaggaagaagacgagcctgcgacaaagcggcagtctcgcgaatacgaagacggtccgctgtctctcgtgatgcctaaaaaacccagcgactctacggatcttgcgagccccaagactatgggcaacagggcctcaatacctctgaaggatatccacgtcaacggacagctgcctgccgcagaagagatcagcggcaaggctactgctaatagtttagtgtcctcagagtgggggaatccttcaagaaacacagatgttgaaaagccttctaaggaaaacgagagtactaaagaaccttccctacttcaatacctgtgcgtacagtctcctgctggtcttaacggattcaacgtgctactgagcgggagccaaaccccacctacggtgggcccatcaagtggacaactcccgtccttctctgtgccctgcatggtgttaccttcaccacctctgggtccgttcccagttctgtactcacccgctatgcccggaccagtgtcctctacactcggatcgatcgctcaactgcttgtgggaccaactgcagtagtgaacccaaagtcgagtacccttccttcagcagacccacagctgcagtcacaaccgtctctcaacttgtccccggtgatgtctaggagtcactccgtcgttcagcagccagaaagccctgtctacgttggacacccagtctcggtcgtaaagctgcaccagagccctgtgccggtgacacccaagtctattcaaaggactcacagggagacttttttcaagacccctggatcactgggggatcctgttcttaaaaggcgtgaacgcaaccagtcccgcaataccagctcagcccagcgaaggctggaaatcccttccggtggcgccgactag

SEQ ID NO: 186214 - DNA, 2187 bp, synthetic construct
  misc_feature 1..2187: note = Description of Artificial Sequence: Synthetic coding sequence
  source 1..2187: mol_type = other DNA
atggaggtgaactgcctgaccctgaaggacctgatcagcccccggcagcctcggctggatttcgcggtggaggatggagaaaatgcccagaaggagaatatcttcgtcgacaggtctagaatggcgcctaagaccccgattaagaatgaacccattgatttgtcaaaacaaaaaaaattcactccagaacggaatcccatcactcccgtgaaatttgtggaccggcaacaggccgaaccttggacacctactgcaaatctgaaaatgctcatctccgccgctagccctgacatacgggatagagagaaaaaaaaggggctgttccgcccaattgaaaacaaagatgacgccttcaccgacagtctccagcttgatgtcgtgggagacagcgccgtcgacgaatttgaaaaacagcgcccgtctcgaaaacagaagagcttggggctcttgtgccagaaatttctagctcgctatccaagttatcccctgagcactgagaaaactaccatttctctcgatgaggtcgcggtgagtctaggggtggaacgccgccgcatctacgacatcgtgaacgtgctggagagtctccacctcgtgtcgcgggtggccaaaaatcagtatggatggcatgggcgccacagtctcccgaagacactgcgcaacctgcagcgcctaggcgaagagcagaaatatgaggagcagatggcttacctgcaacagaaggaactcgatctgattgattacaagtttggggaaagaaaaaaagacggcgaccccgattcacaggaacagcagttactcgatttttctgagccggactgtccatcttcttccgcaaattcaaggaaagataagtcattacgaattatgtcacagaagtttgtcatgctctttctggtgagcaagactaagatcgtgactctggatgtggctgctaagatccttatcgaggaatctcaggacgctcctgaccattccaaattcaaaacaaaggtcaggagactctatgatattgccaatgtactgacctcacttgcccttattaaaaaagtgcacgttactgaggagcgtggcagaaaaccagcctttaagtggattggtcccgtcgatttttcaagctccgacgaggaactggtagacgtgagtgctagtgtgttgcccgagctgaagagagagacatatggacaaatccaagtctgtgccaaacagaaacttgcgcgacatggtagttttaacaccgttcaggcatctgagaggatccagcgtaaagtgaatagtgagcccagttcaccttatagggaggaacagggctccggtggttactccctggagattgggagtcttgctgccgtttataggcagaaaatagaggataacagtcagggaaaagcctttgccagtaaaagagtggttcccccgtcctcttccctggacccggtcgctcccttccccgtgctgtcggtcgatccagaatactgcgttaatccactggctcatcccgtatttagtgtagcccagactgatttacaggcgtttagcatgcagaacgggttgaacggccaggtcgacgtgagcctggcaagcgcggcatctgccgttgagtctctaaaaccggcacttctcgcggggcagcctttggtctacgtaccaagtgcttcattgttcatgctctacggatcactacaagaaggccctgcctccggcagtggttcggagcgcgacgatcggtcaagcgaggcacccgcgacagtcgagttatcgtctgcgcctagcgcacagaagcgcctgtgtgaagagaggaaaccacaggaagaggacgaacccgcgactaagagacagtctagagaatatgaagatggtcccctgagtttggttatgcctaaaaaaccaagtgattccactgacctggcttctcctaagactatgggcaaccgtgcatcgatcccattgaaggatatccacgtgaacggacagctcccggccgctgaggagatttctggcaaggccaccgctaacagtctggtgtctagcgaatggggaaatccctcgcgcaacacagacgtggaaaagcctagcaaagaaaacgaatctacgaaggagcccagtctattgcagtatctgtgtgttcagtcacctgccgtcaccagcagttccgatccccaggaacacccaacccacactagctag

SEQ ID NO: 186215 - DNA, 348 bp, synthetic construct
  misc_feature 1..348: note = Description of Artificial Sequence: Synthetic coding sequence
  source 1..348: mol_type = other DNA
atggaggtgaactgcctgaccctgaaggacctgatcagcccccggcagccccgcttggacttcgcggtggaggatggcgaaaacgctcagaaagaaaatatcttcgtcgatcgctcccggatggcccccaagaccccgatcaagaacgagcccatcgatctaagcaaacagaaaaagttcactccggaacgcaacccgataacacctgttaagttcgtggacaggcaacaggccgaaccctggacccctacagcaaatctgaagatgctaatctctgccgcttctcccgacatcagggaccgtgagaagaagaaggggttgtttcggccaattgagaacaaggattag

SEQ ID NO: 186216 - DNA, 2604 bp, synthetic construct
  misc_feature 1..2604: note = Description of Artificial Sequence: Synthetic coding sequence
  source 1..2604: mol_type = other DNA
atggagaacgagaaggagaacctgttctgcgagccccacaagcgggggcttatgaagacgcctctgaaggaatccacgacagctaacattgtgcttgccgagatccagccggactttggacccctgacaacccccacaaaaccaaaagaagggtcccagggggaaccctggactcctaccgccaatctgaaaatgttgatctccgcagtatcccctgagatcaggaaccgagaccagaagcggggattatttgataaccgatctggcttgcccgaagctaaggactgtatccacgaacacctgtccggcgacgaattcgaaaaaagccagccatctaggaaagagaagtccctcggactgctgtgccacaagttcttagcccgctaccccaactacccgaacccagccgtcaataacgacatctgtctggacgaagttgctgaggagcttaacgtggaacgtcggcgcatctacgatattgtcaacgtgctggaatccctgcacatggtgtcccgcctggcaaaaaaccgctatacatggcacggcaggcataacctcaataagacgctcggcactttgaaatcaatcggcgaggagaataagtacgcggagcaaattatgatgattaaaaagaaagaatacgagcaggagttcgattttatcaagagttactctatagaggaccacatcatcaaatcaaatacaggacctaatggacatcctgacatgtgcttcgttgaattgcctggagtcgagtttcgagctgcaagcgtaaatagtaggaaggataagtccctgagggtcatgtctcagaagtttgtgatgttgtttctagtgagcacaccacaaatcgtgtctctggaagtggcggcgaagattttgatcggtgaagaccatgtcgaagatctggacaaaagcaagtttaagaccaagatccggcggttgtatgatatagccaatgtcctcagttcccttgaccttatcaagaaggttcacgtgactgaggagcgcgggcggaagccagcctttaaatggactggaccagagatcagccctaacacatctggcagttcacctgtgatccattttaccccctctgacctagaggttcggcgcagtagtaaggagaactgtgctaagaaccttttttctacccgagggaaacctaattttacacgccaccctagcctgattaaactggtgaaatcaattgagagcgatcggaggaaaattaactccgctccctcgagtcccattaagactaataaagctgaatcctcacagaactcggccccttttccaagcaaaatggcccaattagccgctatctgcaagatgcagctggaagagcagagcagtgagtctaggcagaaagttaaagtccagttagcacgctctggtccatgcaagcctgtcgcgccgctagaccccccggttaatgctgagatggaattgactgccccttctctcatccagccactcggcatggttcccctcatcccttccccgctgtctagcgctgttccattaatactgccccaggcgccctccggtccgtcatatgcaatatatctccaacctacccaggctcatcaaagcgtcacaccaccacaagggctctctcctaccgtgtgcaccacacattctagcaaagcaaccggaagcaaagactctacggacgctaccactgagaaagcagctaatgatacctcgaaggccagtgcctcaacgagacccggatcgctccttccggcgccagagagacaaggcgctaaatcacgtaccagggaacctgccggcgagaggggcagtaagcgagcgtccatgctagaggactcaggcagcaaaaagaagttcaaagaagacctgaagggcctcgagaatgtttctgccaccttatttccctccgggtaccttatccccctcacacagtgttcttctctcggagcagagagcattctgtctggaaaggagaactcctcagcacttagccctaaccaccgaatctactcatcgcccatcgcaggtgtgatccctgttaccagtagcgagctgactgctgtaaactttcccagttttcatgtaacacctctgaagctaatggtgtcaccaacgtctgtggccgcagtccccgtgggcaattcccctgccctggcaagctcccacccagtgcccatacagaatccttcaagcgcaatcgtcaattttactctacagcatcttggcctaattagtcctaatgtgcagttatctgcttctccgggttcgggcatagttccagtgagccctcgtatcgaatcagtcaacgtggcacccgaaaacgctggcacacagcagggtcgggccacaaattacgactctcctgtccccggtcagagccagcccaacggtcagtccgtcgccgtcaccggggcccaacaaccagtgccagtcacccccaagggcagccagctcgtagctgagtccttcttccgcacacccggcggacctactaaacccacctcttcgagctgcatggattttgagggtgccaacaaaacatcactcggcaccctgtttgtacctcagcggaagttggaagtgtcaaccgaggatgtgcactag

SEQ ID NO: 186217 - DNA, 2604 bp, synthetic construct
  misc_feature 1..2604: note = Description of Artificial Sequence: Synthetic coding sequence
  source 1..2604: mol_type = other DNA
atgcagaagaagaaggagaacctgttctgcgagccccacaagcggggcctcatgaagacccccctgaaggagtcaaccaccgccaatatcgtcctggcggagattcagcccgacttcggaccgctaaccaccccgacgaagccaaaagagggatcgcaaggggaaccttggactcccactgccaacctcaaaatgctaataagtgcagtttccccagagattagaaacagggaccagaaacgcgggttgttcgacaataggtcgggactccccgaagctaaagactgcatccacgagcacctctccggagacgagttcgaaaaatcccagcccagtcgcaaagagaagtccctgggtctgctttgtcacaagttcctggctcgctatcctaattatcccaacccagccgtcaacaacgacatttgtctcgacgaagttgcggaggaactgaacgtagagaggagacggatctacgatattgtaaacgtgctggagagcctccatatggtcagtcggctggcaaaaaacagatacacctggcacggtaggcataatctcaacaagacactgggaacgcttaagtctatcggggaggagaacaagtatgctgagcagattatgatgattaaaaagaaagaatatgaacaggagtttgatttcatcaagtcgtacagcattgaggaccacatcatcaaaagtaataccggtccaaacggccaccccgatatgtgtttcgtggagctgcccggtgtcgagtttcgcgccgccagcgtcaattctcgtaaagataagtcactgcgtgtgatgagtcagaagttcgtgatgctgtttttggtctccacaccccagatcgtgtccttggaagtcgccgccaaaattttgatcggagaggaccacgttgaggaccttgacaaaagcaaatttaagacaaagatccgacggctgtacgacattgctaatgtactgtcttctctcgatttaattaagaaggtgcatgttacggaagagaggggtcggaaacctgcctttaagtggacaggtccagaaatctctcccaatacaagtggtagtagcccagtgattcatttcaccccttcagatctcgaagttcgccgcagcagcaaggagaattgcgccaagaacctctttagcacacgtggcaaacccaacttcaccaggcatcctagtctcatcaaactcgtgaagtccatcgagagtgatagaaggaaaataaattccgccccctcatcccccatcaagaccaataaagctgaaagctcccagaattccgcaccgttcccgtccaaaatggcacagctggctgcgatatgcaagatgcaactggaggagcagtcttccgagtcacggcagaaggttaaggtgcaattagcacggagcggtccatgtaagccagtggccccattggaccctccggtcaacgccgagatggagttgacagccccaagtcttattcagccattgggcatggtccctctcattccatctccactgagctccgccgtgcctctgatccttcctcaggctccgagtggtccgtcatatgcgatttaccttcagcctacccaggctcaccagagcgtaacacccccccaaggactgtcccccaccgtgtgtacaacccactccagcaaagctaccggctccaaggactctactgacgcgacaacagagaaagccgcgaacgatacgagtaaggcttctgcctctactagaccaggcagcctgctgcctgcccctgagaggcaaggggccaagtcaagaacccgggaacctgctggggaacgcggctctaaacgcgcttctatgctcgaggacagcggatccaaaaaaaagtttaaggaggaccttaagggactggaaaacgtgtcagccacgctcttccctagtggctacctcatccccctgactcaatgctctagcttgggtgctgaaagtatcctgagtggcaaagaaaactcctcagctctgtcacctaatcacaggatatacagcagccccatcgccggcgtaatccccgttacaagctcagaactgaccgcagtcaactttccatccttccacgtcacccccctgaagctcatggtatcacccacatctgtggccgcagtacctgtagggaattccccagccctggcatcgagccacccagtgccaatacaaaatcccagctcagcaatagttaacttcactctgcagcacttgggcctgatttcacctaacgtgcagttgtccgcctctcccgggtctggcatagtgccagtttcaccccgcattgagtctgtgaatgtggcaccagagaatgcggggacacagcaggggcgggccacaaactatgatagccctgtccctggacagtcacagcctaacggccagtccgtcgcagtcactggcgctcagcagcctgtgccagttactcctaagggttctcagctcgtggcagaaagcttcttcaggactcctggcggaccaactaagcccactagctcctcttgcatggattttgaaggagctaataagacctctctggggacgctgttcgttccgcagagaaaactggaagtatccaccgaagatgtgcattag

SEQ ID NO: 186218 - DNA, 2604 bp, synthetic construct
  misc_feature 1..2604: note = Description of Artificial Sequence: Synthetic coding sequence
  source 1..2604: mol_type = other DNA
atggagaacgagaaggagaacctgttctgcgagccccacaagcggggactcatgaagaccccgctcaaggagtcaacgacagctaatatcgtcctggctgagatccagcccgactttgggcccctgactaccccgactaagccaaaagaaggctcacagggggaaccatggactcccactgccaatctcaagatgctcatatcagcagtgagcccagaaattagaaatagggaccaaaagagaggacttttcgataatcgcagcggactgccagaggctaaggactgtatccatgaacatttgtccggcgatgagtttgagaagtctcagcccagcaggaaagaaaagtccttgggactcctgtgtcataagttccttgcacgctaccccaattatcccaaccctgcagtcaacaatgatatttgtctggacgaggtcgctgaagaattgaacgtagagcggaggcggatttacgatattgtgaatgttttggagagtctgcatatggtctctagattagctaagaacagatatacttggcacggaagacataacttaaacaagactctgggaacgcttaaatcaattggcgaagaaaacaagtacgccgagcagatcatgatgattaaaaagaaggaatacgagcaagagtttgatttcatcaagagctactctattgaggaccatattataaagagcaatactgggcccaatggccacccagatatgtgtttcgtcgaactgcctggcgtggaatttagggcagcctctgttaatagcaggaaggacaaatcactgcgcgttatgtcacagaagttcgttatgttgtttctggtgtcgaccccgcaaatcgtctcactggaagtagctgccaagattctcatcggagaggaccacgtcgaagatctggacaaatcaaaatttaagaccaaaatcagacgattgtacgatatagctaatgttctgtcgtccctggatctgattaagaaagtacacgtgaccgaagagcgaggcagaaaacccgcctttaaatggaccgggcccgaaattagtccaaatactagtgggtcttcacccgtaatccacttcaccccatcggacctggaggtgagacggtcttcgaaagaaaactgtgccaagaatttgttttcaaccagaggcaagcctaatttcacacggcatccatcgctgattaaactggtgaaaagtatagagagcgaccgcaggaagataaattccgcccccagctcccccatcaaaacaaataaggcagaaagctcacagaacagtgccccatttcccagcaagatggcccaattggccgccatttgtaagatgcagctagaggagcaaagctcagagagcaggcagaaggttaaagtacaacttgcacgctccgggccttgcaagcccgtggctccgcttgatcctccggtaaacgccgagatggagctgaccgcaccatccctgattcagccactcggaatggtcccccttattccatcccctcttagttccgccgttcctcttatcttacctcaagctcccagtgggcccagttacgcaatttacctgcagcctactcaggcccaccagtctgtaactcctccgcagggcctaagccccaccgtgtgcacaactcacagctcaaaggctactgggtccaaggactctactgatgcgaccacagagaaggccgctaatgacacgagtaaggcatccgcttctacgcggcctgggtcactactgcctgccccagagcgacaaggggcaaaaagtcgcactcgtgaaccagctggagagcgtggatcaaaacgggcttctatgcttgaggactccggctcaaaaaagaagtttaaggaggacttgaaaggccttgaaaacgtgtctgcgacgctgtttccctctggttacctgatcccgctcactcaatgttcatccctgggcgccgaatccattctgagtggcaaagaaaactccagcgccctgtccccaaaccataggatctactctagccctattgctggtgtgataccggttacatcatccgagctcaccgctgtgaactttccatcattccatgttactccccttaagctcatggtatcacctacttccgttgccgccgtgccagtaggtaacagccccgccttggcttcctctcaccctgtgcccattcaaaacccttcttctgccattgtaaatttcaccctgcagcatctgggcctgatttcacccaatgttcagctctccgcttctcctggctctgggattgtgccagtgtcacctcggatagaatcagtcaatgtcgctccagagaacgcagggacacagcagggtcgcgcaacaaattacgacagtcctgtgcctggccagtctcaacctaatggacaatctgtggcggttaccggtgcacagcagccagtgcctgtgacaccgaaagggagtcagcttgttgctgagtcatttttcagaacccctggcggaccaaccaagcccacctcatcctcatgtatggatttcgagggagctaacaagaccagcttgggaaccctgttcgtgccacagaggaagctggaggtttccactgaggacgtgcactag

SEQ ID NO: 186219 - DNA, 2355 bp, synthetic construct
  misc_feature 1..2355: note = Description of Artificial Sequence: Synthetic coding sequence
  source 1..2355: mol_type = other DNA
atggagggcgccatggccgtgcgggtgaccgccgcccacaccgccgaagcccaggccgaagctggcagggaggccggggaaggcgctgttgcagctgtcgcagcggccttggctccatccggcttcctggggctgcctgcccccttctcagaagaagacgaagatgatgtgcatagatgtggcagatgccaggccgagttcaccgccctcgaggacttcgtgcaacacaagatccagaaagcgtgccagcgcgccccccccgaagcgttacctgcaactcctgccactacggctctgctcggccaggaagtggtacccgccgcgccaggccctgaagagcctatcactgtcgcccatatcgttgtagaagccgccagtctggcagccgacatttctcacgcttcagacctggtcggaggaggacacattaaggaggtgatagtggccgcagaagcagagctgggggacggtgagatggccgaggcaccaggatcaccaagacagcaaggactgggcctggccggggagggagagcaagctcaggtaaagttactggtgaacaaggatggccggtacgtgtgcgccttgtgccacaagactttcaaaactggttccatcctgaaagctcacatggttacacactcctctcgaaaagatcacgaatgtaagttgtgcggagctagcttccgtacgaagggcagcctgatcagacatcataggaggcataccgacgaacgcccctacaaatgttcaaaatgcggcaaatcctttagggagtctggagccctaaccaggcatctgaagtcactgacaccttgtaccgaaaagatccgtttcagcgtgagcaaggatgtagtcgtgtcaaaggaagacgccagagccgggtcaggagctggggcggctggattggggactgcaacctcttctgtgacaggagagcccatagaaacatcaccagtcattcatctcgtgacggatgccaaaggcacggtgattcacgaagtgcatgtgcagatgcaggaactgagcctcgggatgaaggccctggccccggagcctcccgtttctcaggaactcccttgcagtagcgaggggtcacgggagaacctcctgcatcaagccatgcaaaattcaggcatcgtgctggagagagcagcaggggaggagggggcactggaaccagctccagctgcaggaagctccccacagccgctcgctgttgccgctccccaacttcctgttctcgaagtccaaccccttgaaacccaagtcgcctctgaggcaagcgcggtcccgcgcactcatccttgcccccagtgttccgaaacatttccaactgcagccaccctggaagcccataaacgtggccatactgggccaaggccttttgcgtgtgcccagtgcggcaaggccttcccaaaggcttacctcctgaagaagcatcaggaggtgcatgtgcgcgagcggcgttttagatgtggcgattgtgggaagctgtataaaactatcgctcacgtccggggacatcgacgcgtacactccgacgaaagaccttacccctgccccaagtgcgggaagagatataaaaccaagaacgctcagcaggttcactttcgcactcacctggaggagaaaccccacgtgtgccagttttgtagccgcggcttccgcgaaaagggatcactggtcaggcatgtgcgacaccatacaggggaaaagccttttaaatgttataagtgcggcagagggtttgcagagcacggtactctaaacaggcacctgaggacaaaaggcggatgtctcctagaggtcgaagagctgttggtctctgaagactcacccgctgctgccaccaccgtgctcactgaggacccacatacggtgctggtagaattctcgagcgtggtagccgatacacaagaatacattattgaagcaacggcggatgacgccgagacaagcgaggctaccgagattatagagggcacccagactgaggttgactctcatataatgaaggtcgtgcagcagattgttcatcaggcatcggcgggtcatcagatcatagtgcagaacgtgaccatggatgaagaaacagctcttggcccagaggccgctgccgccgataccattaccattgccacacccgaatctctcactgaacaggttgctatgacactcgcatcagctatcagtgaagggactgtcctggcagcaagagcgggaacttccggcacagagcaagccactgtgacaatggtgagttctgaggatattgagatcttagaacacgcaggcgaactggtgatcgcatcaccagagggccaactcgaggtgcagaccgtcatcgtgtag

SEQ ID NO: 186220 - DNA, 1047 bp, synthetic construct
  misc_feature 1..1047: note = Description of Artificial Sequence: Synthetic coding sequence
  source 1..1047: mol_type = other DNA
atggccgccacctgcgagatcagcaacatcttcagcaactacttctcagctatgtactcatctgaagattcaaccctggcatcagtgccacccgctgccacctttggggcagacgacctggtgctgactctgagcaatccccagatgagtttagagggcaccgagaaggctagctggttgggtgagcaaccccagttctggagcaagacccaagttctggattggatttcgtaccaagtggagaaaaacaagtatgacgcctccgccattgacttctcccgttgcgacatggatggtgcaaccctgtgcaactgtgctttagaggaactaaggctcgtgttcggacctttgggagaccagctccacgctcaactgagggaccttacctcatcctcatctgacgagctgtcatggattattgaacttctagagaaagatggcatggccttccaggaggccctggacccggggcctttcgaccagggctctcccttcgctcaggaactactggatgatgttagcacggctggaacaggggcctctcgttcctcccatagctccgacagcggaggctcagacgtggacctggatcctaccgacggtaagctcttcccgagcgacggcttccgagattgtaagaagggcgaccccaaacacggcaaaaggaagaggggaaggcctcggaaactgagcaaggaatactgggactgtcttgaaggcaagaagagcaagcatgcacccagaggaacacacctttgggagttcattcgggacatcctgattcatccagaactgaacgaaggcttaatgaagtgggaaaataggcatgagggcgtcttcaaattcctgagatccgaagcagtggcccaactgtggggtcagaaaaagaaaaatagcaatatgacttatgagaaactgtccagagccatgcggtactactataagcgagagatcctcgagagagtcgacggccgacggcttgtgtacaaattcggcaaaaatagcagcggctggaaagaagaggaagttcttcagagccgtaactag

SEQ ID NO: 186221 - DNA, 1116 bp, synthetic construct
  misc_feature 1..1116: note = Description of Artificial Sequence: Synthetic coding sequence
  source 1..1116: mol_type = other DNA
atggccgccacctgcgagatcagcaacatcttcagcaactacttctccgccatgtactcatccgaggactccactttagcgtcagtgcctccagctgctaccttcggcgctgacgacctagttctgactctctctaatccacagatgtctttggagggcaccgagaaggcttcttggctgggagaacagccccagttctggtccaaaacccaagtcttggactggatttcctatcaggttgaaaagaataagtacgacgcgtccgcaattgatttctctcggtgtgatatggacggcgccaccctctgcaattgcgcactggaggaactgagactggtattcgggcccctcggggatcagcttcacgctcaactgagggatctgacctcttcttcaagcgacgagctgtcatggatcatagagcttttagagaaagacggcatggcattccaggaagccctggacccaggaccattcgatcagggcagccccttcgcccaagagttgctggatgacgggcagcaggcttctccatatcatcctgggagctgtggagctggggctccctcccctgggtcttccgacgtgtctactgcagggaccggcgctagccgcagctctcactcctcagactctgggggaagtgatgttgatctggaccctaccgacggcaagctgttcccatctgatggatttagggattgcaagaagggggaccctaagcatgggaaacggaaaaggggccgtcctagaaagctgagtaaggaatattgggactgcttggagggcaagaagagcaaacatgccccacgcggcacccacttgtgggaattcatcagggacatacttatccatccagaactcaatgaaggcctgatgaaatgggagaaccggcatgagggggtgttcaagttcctaaggtccgaggctgtggctcaactttggggccagaagaagaagaacagcaacatgacatacgaaaagttgtctcgcgcaatgcgatactattataagcgggagattttagaaagagtcgacgggagacgactggtgtataagttcggtaagaatagttctggatggaaagaagaggaggtgttgcagagcagaaattag

SEQ ID NO: 186222 - DNA, 1116 bp, synthetic construct
  misc_feature 1..1116: note = Description of Artificial Sequence: Synthetic coding sequence
  source 1..1116: mol_type = other DNA
atggccgccacctgcgagatcagcaacatcttcagcaactacttctccgccatgtatagctcagaggattccacactggccagtgtgcctcccgccgctacatttggtgctgatgatctcgtgctcaccctgtctaacccacagatgtctttagagggcaccgagaaggctagctggctcggggagcagccccaattttggtcaaagacacaagtcctcgactggatcagttaccaggtggagaagaataagtatgacgcgagtgccatagatttctcacgctgtgacatggacggggccaccctatgcaattgtgccctggaagagctcaggttggtgttcggacccctcggcgatcaactacacgcccagttaagagatctgacgtcgagtagctccgatgagttgagctggatcattgagctattggagaaggacgggatggccttccaggaggctctcgatcccgggcccttcgatcaaggcagcccattcgcccaggagctgttggacgacggccagcaagcgagtccctaccatcctggctcctgcggagcaggcgccccctcccccggatccagtgacgtatccaccgctgggacgggtgcatcacgctcctcacacagttctgattctggcgggagtgatgtggacctggacccgactgacggaaaattattcccctccgatgggttcagagattgtaagaaaggggatcccaagcatgggaagcggaagagaggtagacccagaaagctcagcaaagagtattgggactgcttagagggaaaaaaaagcaaacatgctcccaggggtacacatctctgggagtttatacgtgatatcctcatccaccctgagctaaatgaaggcctgatgaaatgggagaatagacatgagggcgtcttcaaatttctcaggtctgaggcagtggcacagctgtgggggcagaaaaagaagaattctaatatgacctacgagaagttaagtagggcaatgcgctattactataagagggagattctagagcgcgtggatgggcgacgactggtgtataagttcgggaaaaacagctcaggatggaaagaagaagaagtattgcaatcccgcaattag

SEQ ID NO: 186223 - DNA, 1116 bp, synthetic construct
  misc_feature 1..1116: note = Description of Artificial Sequence: Synthetic coding sequence
  source 1..1116: mol_type = other DNA
atggccgccacctgcgagatcagcaacatcttcagcaactacttctccgcgatgtactcttccgaagatagcactctagccagtgtcccgcccgccgcaacatttggagctgacgacctggtcctgaccctttctaatccacagatgtctcttgagggtactgagaaggcctcgtggctcggggagcagcctcagttttggtccaagacacaggttttggactggatttcttaccaggtcgagaagaataaatatgacgcaagcgctattgatttttcacgatgcgacatggatggcgcaacactgtgtaactgcgcgctggaagaactcaggcttgtgttcggacccctaggcgaccagcttcacgcccaactgagggatctcaccagtagctcctctgatgaactgtcctggataattgagctcctggagaaagatgggatggcgtttcaagaggccctggatccaggaccatttgaccagggctcgccattcgcccaggaattattagacgatggtcaacaagcctccccatatcaccccggatcctgcggggccggggctccatcgccgggcagttcagatgtgtcaactgccggcacaggtgcctctagatcaagccactctagtgactccggggggagtgacgtggatctcgatcccacggacggcaagctctttcccagcgatggcttccgagattgtaaaaaaggggatccgaagcatgggaaaagaaaaagaggccgtcctcgaaaattaagcaaggagtactgggattgcctggagggtaaaaaaagcaaacacgcacccagaggcacccatctgtgggagtttataagagatatcttgatacacccagaactcaatgagggcctcatgaaatgggagaacaggcacgagggggtatttaaattcctccgctccgaagcagtggcacagctttgggggcagaagaaaaaaaactcaaacatgacttacgagaagctctcccgggcgatgagatactattacaaaagggaaattctggaacgtgtggacgggcgcaggctggtatataaatttggtaagaatagtagcggttggaaagaggaggaagttctgcagtccaggaattag

SEQ ID NO: 186224 - DNA, 699 bp, synthetic construct
  misc_feature 1..699: note = Description of Artificial Sequence: Synthetic coding sequence
  source 1..699: mol_type = other DNA
atggccgccacctgcgagatcagcaacatcttcagcaactacttctccgccatgtatagtagcgaggattccaccctggcctcagtgccccctgccgctaccttcggtgcagacgatttagttctcacgctgagcaaccctcagatgtccctagaagagaaagctagctggctcggggaacagccacagttctggtctaagacccaggtcctggattggatcagctaccaggtggagaaaaataaatatgatgccagtgccatcgacttcagccggtgtgatatggacggggccactctatgcaactgcgccctggaagagctcagactcgtgtttggccctttgggtgaccaactgcacgctcagctgagggacttaacctcatcttcctccgacgagctgtcctggataatcgaattactggagaaagacgggatggcctttcaggaagcccttgatccaggtccattcgaccagggatccccctttgcccaggagctattagacgatggacagcaggcatctccctaccatccaggcagctgtggggcgggggccccaagccccgggagctctgatgtgagcacagccggaactggggcttcccgctcatctcacagttcagatagcgggggctctgacgtcgacctcgacccaaccgatggaaagctgttcccaagtgacggtttcagagactag

SEQ ID NO: 186225 - DNA, 1992 bp, synthetic construct
  misc_feature 1..1992: note = Description of Artificial Sequence: Synthetic coding sequence
  source 1..1992: mol_type = other DNA
atggccatcaccctgcagcccagcgacctgatcttcgagttcgcctcaaacgggatggatgacgatattcatcagctggaggacccatccgtgtttcctgctgtcattgtagaacaagtcccctaccccgatctcttgcatctttatagtggattggaactggatgatgtacacaatggaataattacagacggcactctctgtatgacgcaggaccagattctggagggctcctttttacttactgatgacaatgaggcaacgagtcacactatgtctaccgccgaggtgctcctgaacatggagtccccgtcggatattctggacgaaaagcagatcttctctaccagtgagatgctcccagattccgacccggcccccgccgtcacccttcctaattatctgtttcctgcaagtgagcccgatgccctgaatcgggccggcgatacctcagaccaggagggccattcgttggaggagaaagcctcacgcgaggagtccgccaagaaaaccgggaaaagtaagaagcgaatccgtaagaccaaaggaaaccggtccacatcacccgtcactgacccctccattcccataaggaaaaagtcaaaagacggaaaaggaagcacgatctacctgtgggagtttctgttggcactccttcaggacaggaatacctgccctaaatacattaaatggacacaacgcgagaaaggaatttttaagcttgtggactccaaggcggtgtccaagctttggggcaaacagaagaacaagcccgatatgaactatgagactatggggagagccttgaggtattactatcagcggggaatcctcgccaaggtggagggacaaagacttgtttatcagtttaaagaaatgccgaaggacttagtggtgatagaagatgaagacgagtctagtgaggccaccgctgctcctccacaggctagtactgctagcgtagcgagcgcgagtacaacccgacgcaccagttcacgggtaagttccagatcggcacctcaaggcaagggcagctcttcctgggaaaagcctaaaattcagcatgtcggcctacagccatccgcttcgttagagctgggtccatccttggacgaggagattccgacaacaagcacaatgctggtaagtccagctgaaggacaggtgaagctcaccaaggctgtgagtgcatcatctgtaccgtcgaatattcacctgggagtggccccagtggggtcaggttccgctctcacccttcagaccatacccctcaccacagtgcttaccaacggtcctccggcctcaacgaccgccccaacccagctcgtgttacagtcagtgccagctgccagtaccttcaaggatacgttcaccttacaggccagcttccctctaaatgcctctttccaggacagtcaggtggccgctcctggtgccccacttatcctgtcaggactgccacagctcctggccggagcaaataggcctaccaatcccgcccctcctaccgtgactggggcaggccccgcaggtccgtcatcccagccaccgggcacggtgattgccgcttttatccgtacgtctggcacaaccgccgctccacgtgttaaggaaggtcctttgaggtccagcagttacgtgcagggcatggtaacaggcgcgcccatggaaggcctgctggtcccggaagagaccttacgggaactgctgagagatcaggcccatctccagccactgcctacacaggttgtatccaggggtagtcacaatccatccctgcttggtaatcagacacttagcccgccctcgcggcctaccgtggggctaactccagttgctgagctggagctttcatctggttccggttctctgctcatggcagaacccagcgtaactacgtccggcagtttgctgacacgttccccaacccccgcacccttctcacccttcaacccaaccagcttgatcaaaatggagccgcacgacatttag

SEQ ID NO: 186226 - DNA, 1992 bp, synthetic construct
  misc_feature 1..1992: note = Description of Artificial Sequence: Synthetic coding sequence
  source 1..1992: mol_type = other DNA
atggccatcaccctgcagcccagcgacctgatcttcgagttcgccagcaacgggatggacgatgatatccaccaattggaagatccttccgtttttcccgcagtaatcgtggagcaagttccttaccccgatctcttacacctgtactctggcttggaacttgatgacgtgcacaacggaattataacagatggtaccctctgcatgacacaggaccagattctcgagggatccttcctattaacagatgacaatgaagccacctcacacacaatgagcaccgcagaggtgctgctcaacatggagagcccaagtgatattctggacgaaaagcagattttttcaacttccgagatgctgccggactccgaccccgctccagctgtgacccttccaaattacctcttcccagccagtgaaccagacgcccttaatagagctggggatacatccgaccaggaggggcatagcctggaagagaaggcatcccgcgaagagtccgctaagaaaacggggaaatccaaaaagagaattcgcaagaccaagggaaatagatcaacatccccagtcacagatcccagtatacccattcgtaaaaagagtaaggacgggaaggggagcactatatatctttgggaattcctcctcgcactgcttcaggatcggaacacttgtcccaagtacatcaagtggacccagcgggagaaggggatctttaagctggtagacagtaaggccgtttctaagctgtgggggaagcagaagaataagccagatatgaattatgagacaatgggacgggccctcagatattattaccagcgaggcattctggcaaaagttgaagggcagcgtctggtttaccagttcaaggaaatgcctaaagacctggttgtgattgaggacgaggacgaaagcagtgaggccacagccgcacccccacaggcctctacagctagcgtcgcgagcgcttctactaccaggcggacctcaagcagagtgtccagccgcagtgcccctcagggcaagggaagctcctcctgggagaagcccaagatccaacatgtcggactgcagccgtcggcttctttagaactgggtccttcattagacgaggagattcctactacaagcacgatgctggtgtcacctgcagaaggccaggtcaagcttaccaaagccgtctcagcttctagtgtgccttccaacattcacctgggggtcgcgcctgtcggcagcggctcagctctgaccctacagactatccccctcaccactgtcttgacgaatgggccgcccgcatccacaacagcccccacacaactggtcttgcagtcagtaccagcggcaagcacattcaaggacacattcacactccaggccagctttcctctaaacgctagcttccaggattcccaagtcgcagcccctggagcacccctgatactgagtggtctaccacagctccttgccggcgcaaatcgtcccaccaaccctgctcctccaaccgtcaccggggccgggcccgctggcccatcaagtcagccacctggcactgtgattgccgccttcatcaggacttctgggaccaccgcggcccctagagtgaaagaaggccccctgaggagttcgagctatgtacaaggtatggtgacaggggcccccatggaaggccttctcgtacctgaggagaccctgcgggagctgctccgggaccaagctcacctgcagcccttgccgacgcaggtggttagcagaggaagccacaacccgtccctgttaggcaaccagaccctctctccaccgagtcgcccaaccgtagggttaactcctgtggcagagcttgagctcagcagtgggtcagggagcctgttgatggccgagcctagcgtgacaacctctggctccctgctgaccaggtcccctacgccagcaccatttagccctttcaacccaactagccttattaaaatggagccacatgacatatag

SEQ ID NO: 186227 - DNA, 234 bp, synthetic construct
  misc_feature 1..234: note = Description of Artificial Sequence: Synthetic coding sequence
  source 1..234: mol_type = other DNA
atggacgacgacatccaccagctggaggaccccagcgtgttccccgccgttatagtagagcaggtcccataccccgacctgctgcacctctactctgggctggaactcgacgacgtgcataacggcatcattactgacggtaccctgtgcatgacacaggaccagatcctcgagggaagttttctgttgactgacgacaacgaggcaacatcccatactatgtcgaccgcctag

SEQ ID NO: 186228 - DNA, 768 bp, synthetic construct
  misc_feature 1..768: note = Description of Artificial Sequence: Synthetic coding sequence
  source 1..768: mol_type = other DNA
atgctggacagcgtgacccacagcaccttcctgcccaacgccagcttttgtgatcctttaatgagctggacagacctgttctccaatgaagagtactatccagccttcgaacaccaaaccgcctgcgacagctattggacttctgtacatcccgaatactggacaaagagacacgtctgggaatggctgcagttttgctgcgaccaatacaaactggacacaaactgcatttctttttgtaatttcaatatctcaggactgcagctgtgcagcatgactcaggaggagttcgtcgaggccgccggtctctgtggcgaatacctctacttcatcctgcagaatattagaacgcaggggtactccttcttcaacgacgccgaagagagtaaggcaaccatcaaggattatgccgacagcaattgccttaagacctctggcatcaagtctcaggactgtcattcccacagtcgcacctcacttcagtcaagccatctgtgggaattcgtgcgagatctgctactgtcacctgaggaaaactgtggtatcctcgaatgggaagacagagaacagggtatattcagagtcgttaaatccgaagcattggcaaagatgtggggacagagaaagaaaaacgatcgaatgacatacgaaaagctgtctcgagcactgcggtattactataagacaggtattctcgagcgcgtggacaggagactcgtgtataaatttggaaagaatgcccatggctggcaggaagataaactgtag

SEQ ID NO: 186229 - DNA, 798 bp, synthetic construct
  misc_feature 1..798: note = Description of Artificial Sequence: Synthetic coding sequence
  source 1..798: mol_type = other DNA
atgcccagcctgccccacagccaccgggtgatgctggacagcgtgacccattctaccttcttgcctaatgcctctttttgcgaccctctcatgagttggaccgacttattctctaatgaggaatactacccggcttttgagcaccagacagcctgtgactcttactggacaagcgtccaccccgaatactggaccaagagacatgtgtgggagtggctgcagttctgctgcgatcagtacaagctggatacaaactgcatctccttctgtaattttaatattagcggccttcagctctgcagtatgacacaggaggaatttgtggaggcggcgggcctgtgtggggagtacctgtacttcattctccagaatatcagaactcaggggtattcattcttcaatgacgcagaagagtccaaagcaaccatcaaggactatgccgatagcaactgcttaaagacaagtgggattaagagccaggactgccacagccacagcaggacaagtctccaaagctcccatctatgggaattcgtgcgggatctgttactgtcgcctgaggagaactgcgggattctggaatgggaggaccgggaacagggcatttttagggtggtgaagagcgaggccctggcaaaaatgtgggggcagagaaagaagaatgatcgcatgacctacgagaagctttccagggccctgagatattattataaaactggcatcctcgagagggtggatcggagactcgtctacaagttcggcaagaacgcccatggttggcaagaagataaactgtag

SEQ ID NO: 186230 - DNA, 483 bp, synthetic construct
  misc_feature 1..483: note = Description of Artificial Sequence: Synthetic coding sequence
  source 1..483: mol_type = other DNA
atgctggacagcgtgacccacagcaccttcctgcccaacgccagcttctgtgatcccctcatgtcatggacagacctcttctccaacgaagagtattaccccgcttttgaacatcagactgacgctgacagcaactgtctgaaaacatctggtatcaaatctcaagactgccacagccacagccgtacgtcgctgcagagcagccacctgtgggaatttgtgagagatcttttgctgagtccagaagaaaactgcgggatattggaatgggaggatcgggagcaaggaatttttcgagtagttaagagtgaggctctggctaaaatgtggggacagcgaaagaagaatgatcgaatgacttacgaaaagctgtctcgagcccttcgctattactataagactgggatcttggagcgtgtcgaccgtcggctggtgtacaaattcggtaagaacgctcacgggtggcaggaggacaagctatag

SEQ ID NO: 186231 - DNA, 1728 bp, synthetic construct
  misc_feature 1..1728: note = Description of Artificial Sequence: Synthetic coding sequence
  source 1..1728: mol_type = other DNA
atgttcggcatccaggacaccctgggccggggccccaccctgaaggagaagagtctgggagctgaaatggatagcgtcagatcttgggtccggaatgtaggagtcgtggatgcgaatgtggccgcccagtccggtgtggccctgagtagggcacacttcgagaagcagcctcctagtaacctccgcaagtcaaatttctttcattttgtacttgcactttatgaccgccagggccagcccgtagaaattgagcgcacagcatttgtcgatttcgttgagaacgataaggagcagggaaacgaaaaaaccaacaatgggacccactataagctccagctgctgtacagtaacggggtcagaacggagcaggatctctacgtgcgactgatagactcagtaaccaaacagccaatcgcttacgaaggacaaaacaagaatccggagatgtgcagagtcctcctcacccatgaggtgatgtgctcaagatgttgcgagaaaaagtcctgtggaaacagaaacgaaactcctagcgacccagtgataatcgaccgctttttcttaaagtttttcctgaagtgcaaccagaactgtctgaagaccgccggcaaccctcgagacatgcgccgttttcaggttgtcttaagcacgacagtgaatgtggacggccatgtcctcgcggtgagcgacaatatgtttgtacacaataacagcaaacacgggagaagagccagaagactggatccttctgaagccacaccatgtatcaaagccatcagtcctagcgagggatggactacgggcggggcaatggtcattattattggagacaatttcttcgatgggctgcaggtagttttcggcaccatgctcgtctggtcggagctgatcacgcctcatgcaattcgggtgcagaccccccctcgacatatcccaggagtagtcgaggtgactcttagctacaaatctaaacaattttgtaaaggggctccgggaaggttcatttataccgccctaaatgaaccaacgattgactacggcttccagcgacttcagaaggtgatcccccggcatcctggtgatccagagcgcctggctaaagaaatgctgctgaaacgcgccgcggatttggtggaggcactctatggtacgccccacaataatcaggacattattctcaaacgggcagcggacattgcggaagccctgtactcagtaccccggaatccgtcacagctcccggccttgagcagcagtccggcgcacagcgggatgatgggcatcaacagctatggcagccaacttggggtgtcaatttccgaatccacacaagggaacaaccagggctacatccggaacacgtcatcaataagtccacgtggttattcgagttcctccacgccgcaacagtcgaactactctactagctcgaactccatgaacgggtacagtaacgtgccgatggcaaacctgggtgtgccgggcagccccggattcttgaatgggtccccaacaggttctccttatggcatcatgtcctccagccctaccgtgggaagctcaagcacatccagtatcctgccgttcagctcaagtgtcttcccggccgtaaaacaaaagtccgccttcgcgccagtgatccggccccagggatctccctctccagcctgttctagcgggaacggcaatggattccgcgctatgaccggcctcgtggtgccccctatgtag

SEQ ID NO: 186232 - DNA, 795 bp, synthetic construct
  misc_feature 1..795: note = Description of Artificial Sequence: Synthetic coding sequence
  source 1..795: mol_type = other DNA
atggtgatcatcatcggcgacaacttcttcgacggcctgcaggtggtgttcggcactatgttagtgtggtcagagctcattacaccgcacgccatcagagttcagacaccccccagacatatcccaggggtggtggaagtcacgctctcatataagtctaagcagttctgcaagggcgccccaggaagattcatctacacagctttgaacgagccaaccatcgactacgggtttcagcgactgcagaaggtcattccaagacatcccggcgatccggagcggctagcaaaagagatgctgctgaaacgggcagcagatttggtggaagcgctctacgggactccccacaataatcaagatatcatcctcaaaagggctgcagacattgcagaggccctttattcggttccaagaaacccaagtcagcttcccgccctctcctcctccccagctcatagcggaatgatgggcattaatagctacggctcccagctgggtgtgagtattagtgagtctacccaggggaacaaccagggatacatccggaacacaagtagcattagccctcgcggctactctagtagtagcacccctcagcagtccaactacagcaccagctctaactcgatgaatggttattcgaatgtgccaatggctaatctcggcgtgcctggatcccctggattcctcaacggcagtcccactggatccccctatgggaccggactctggctcacttggttgctaaaggccttttggggaaagaaaagaatcgaaaccataccatttctgtag

SEQ ID NO: 186233 - DNA, 1791 bp, synthetic construct
  misc_feature 1..1791: note = Description of Artificial Sequence: Synthetic coding sequence
  source 1..1791: mol_type = other DNA
atgttcggcatccaggagaacatcccccggggcggcaccaccatgaaggaggagccactcggttccggaatgaatccagtgcgctcttggatgcacactgcaggagtggtggacgccaacactgcagcccagtctggggtcggtttggcgagggcacatttcgagaaacagcctcccagcaacctgagaaaatcaaactttttccacttcgtgctggctctgtacgacaggcagggccagccagtcgagatcgaacggacagccttcgtcgactttgtcgaaaaggagaaagagcccaataacgagaagaccaataacggaatccactacaagctgcagcttctctattccaatggcgtcaggaccgaacaggatctgtatgtgcggttaattgacagcatgactaagcaggccattgtgtacgaggggcaagacaagaatcccgaaatgtgccgcgtattactgacacatgaaattatgtgtagtcgctgttgcgacaaaaagtcttgtggcaaccgcaatgagacaccatccgatcctgtgattatagaccggttcttcctcaaattctttttgaagtgcaatcagaattgtcttaaaaacgccggaaatcctcgcgacatgagacgcttccaggtggtagtcagcaccaccgtgaatgtcgatgggcacgtgttggccgttagcgataacatgttcgtgcataataactcgaagcatggaaggagagctcgaaggctagatccatcagagggcacagctcccagctacctggagaacgctacaccatgcattaaggctataagtccctctgagggctggacaaccggcggggccacagttattatcattggtgataacttcttcgacggcctgcaggtggtgttcggtaccatgcttgtgtggtcggagctgatcacgcctcacgccatacgggtacaaacccctccccggcacataccaggtgtcgtcgaagtgaccttatcctacaagagtaagcaattctgcaaaggcgcacctggaaggtttgtctacacagctttgaatgaacctacaatcgattatggcttccagaggttacagaaggttatcccacggcatcctggcgatcctgagagactgcctaaagaggtccttctcaagagggcagccgatctcgtggaagcactctatggcatgccacacaacaatcaagaaataatcctgaaaagggcagccgatattgctgaagccctttattctgtaccaaggaaccacaaccagatacctaccctggggaacaaccccgcccatacagggatgatgggggtaaattccttcagcagccagctggctgtgaatgtgtccgaaacttctcaggccaatgaccaggttgggtactctcgcaatacgtcaagtgtaagcccaaggggctatgtcccatccagcactccccagcagtcaaattataatacggtgagcacctcgatgaacggctacgggtccggagccatggcatccttaggcgtacctggtagcccaggttttttgaacggaagctctgccaattccccctacggcattgttccatccagccccacgatggccgcctccagcgtgacccttccttcaaattgttccagcacgcacggaatcttcagcttttcccccgcaaacgttatttccgccgtgaaacagaaaagtgcgttcgccccagtagtgagaccccaggcatcacctcccccttcatgcacaagcgctaacggaaatggcctgcaggctatgtctggcctggtggtcccccctatgtag

SEQ ID NO: 186234 - DNA, 1656 bp, synthetic construct
  misc_feature 1..1656: note = Description of Artificial Sequence: Synthetic coding sequence
  source 1..1656: mol_type = other DNA
atgttcggcatccaggagaacatcccccggggcggcaccaccatgaaggaagagcccctgggtagcgggatgaatcccgtgcgaagctggatgcataccgcaggggtggtcgacgccaacacagccgcccagtctggtgtgggactggcgcgggcgcacttcgagaaacagccaccaagtaatttgcggaagagcaacttctttcactttgtgctggcactttatgaccgacagggtcagcccgtagagattgaaaggacagctttcgtggactttgtcgagaaagagaaggagcccaataatgagaaaacgaacaacggaattcactataaactgcaactgttgtacagcaacggtgtcaggaccgaacaggacctgtacgtgaggctaatcgattccatgacaaaacaggccatcgtatacgagggacaagacaaaaaccccgagatgtgccgagtgctacttacccacgagatcatgtgcagcaggtgctgcgacaaaaagtcatgcggaaataggaatgagacaccatcagatcccgtcatcatcgaccgcttcttcctgaagtttttccttaaatgtaaccaaaattgtctgaagaatgctgggaatccccgggacatgcgtaggtttcaagtagtggtctccacaaccgttaatgtggacggtcacgtgctcgctgtgagcgacaacatgttcgtccataacaactcaaagcatgggaggcgagcaaggcggctggatcctagtgaagctactccatgtatcaaagctatttctccatccgagggatggacaacagggggagccaccgttattattattggcgacaacttcttcgatggactgcaggtggtcttcggcactatgctggtgtggagcgaactgattacacctcacgctatccgtgtgcagacacccccccggcacattcccggggtggtggaggtgaccttatcctataagagcaagcagttttgtaagggggcccccggacgcttcgtatacaccgctctgaacgagcctacaattgactatgggtttcagaggctgcaaaaagtaattcctcggcatccaggcgatccagaaaggctcccaaaagaagtgctccttaagcgagccgctgatctggtagaggcactgtatggcatgccacacaacaatcaggagatcatcttgaaaagggccgccgatatagccgaggccctttactcagtgccccgaaatcacaatcagatccccacattgggtaataaccctgcacacaccgggatgatgggagtgaatagcttttctagccaacttgccgtcaacgtgagtgagacaagccaggccaatgaccaggtgggctactcccgaaacactagtagcgtatccccaagaggatacgtgcctagctctaccccacaacagagtaactacaatactgtatctacaagcatgaatggttatgggtccggtgccatggcctccctgggagttcccggcagccctggatttttgaatggcagtagtgcaaacagcccctacggcatgaagcaaaagtctgccttcgcgcccgtcgttcgccctcaggcgtctccgccgccatcttgcacaagcgccaatggcaatggactgcaggcgatgagtggactcgttgtgccacccatgtag

SEQ ID NO: 186235 - DNA, 576 bp, synthetic construct
  misc_feature 1..576: note = Description of Artificial Sequence: Synthetic coding sequence
  source 1..576: mol_type = other DNA
tgattcagcagccagctggccgtgaacgtgagcgagaccagccaggccaatgaccaggtcgggtatagccgcaatacctctagtgtgtcccctcggggctacgtgcccagtagtacccctcagcaatccaattataatactgtgtcaaccagtatgaatgggtatggcagcggagccatggccagccttggagtccccggatcacccggcttcttaaatgggagctccgccaatagcccctacgggattgttcccagcagcccaaccatggcagcaagctctgtaacccttcctagtaactgttcctccacacatgggatctttagcttttctcccgctaatgttatttcagctgtcaaacagaaaagcgcctttgcacccgttgtgcggcctcaggcgtccccccccccctcttgcacctctgcaaatggcaacgggctacagggctccctccttggcgccgaggatgtggcagccgagaagactaattggcctttctgtgaagtgggaggtatttttcactttgatgaactcatgctgaaaaaaggcacaggaaagttgtgcttagggtggtag

SEQ ID NO: 186236 - DNA, 1809 bp, synthetic construct
  misc_feature 1..1809: note = Description of Artificial Sequence: Synthetic coding sequence
  source 1..1809: mol_type = other DNA
atgttccccgcccaggacgccctgccccggagcggcctgaacctgaaagaggagccactactacccgccggcttgggcagtgtccgcagttggatgcagggggcggggatcttggacgcaagcaccgctgctcagtcaggggtaggcctcgccagggcacacttcgaaaaacagccacccagtaatctacgaaaatccaacttttttcatttcgtcctcgccatgtatgaccgacaaggccagcccgtggaagtggagaggacagcctttattgactttgtggaaaaggatcgtgagccaggcgcagagaaaaccaataacgggatacactaccgcctacgcttagtgtataacaacggactgcgcactgagcaggatctatatgtgcgccttattgactctatgagcaagcaagccattatttacgagggccaggacaagaatcccgaaatgtgtagagtgttactaactcatgaaattatgtgtagccggtgttgtgaccgaaaatcctgtgggaaccgcaacgaaactccaagcgatcccgtgatcattgataggtttttcctgaagttcttcctgaaatgcaaccaaaattgtttaaagaatgctggcaaccctagagatatgaggcggtttcaggtcgttgtttccaccacggtgtccgtggatggccacgtgcttgcagtatcagacaacatgtttgtgcataataacagcaagcatggtaggagggctcgcagactggaccctagtgaggcggccaccccgtgtatcaaagctatctcccccggggagggctggaccaccggcggcgcaaccgttatcgtcattggagataacttttttgatggactgcaggtggtattcgggaacgtgctggtctggagtgagctgattacacctcacgccatcagagttcagacccctccaaggcacattcctggtgtcgtcgaggtgaccctgtcttacaaaagtaagcaattctgtaagggctgtcccggtagatttgtttataccgctctaaacgagcctaccatagattatggatttcagaggctacaaaaggtcattcctcggcaccctggtgatccagaacggttaccgaaagaagtgttactcaagagagcagcagatctggcagaagcactctacggtgtccctggatcaaaccaggaactgctgttgaaacgtgccgctgatgtggccgaggccttgtatagcaccccgcgggcccccggtcctctggctcccctcgctccttcccacccacatccagccgtggtggggataaacgcatttagctcacccctcgccatcgccgttggagatgctacacccggtcccgagcctgggtacgctagatcatgcagtagtgcaagcccccgcggttttgccccctcacctggatcccagcaatcaggatacggcggagggctgggcgccggactgggaggatatggggctccaggggtggctgggctgggcgttccgggatcgccgtcatttctaaatggaagcactgccacgtcacccttcgccataatgcctagcagtcctccactagctgcggctagcagtatgtctctccctgctgctgctcccacaacatcagtgtttagcttctcccccgttaatatgatttcagctgtcaagcaacggagcgccttcgcgcctgtgcttagacctccgtccagccccccccaggcctgccctcgggcccacggagagggcctgcctgatcaatcgtttgaggacagtgacaagttccattctcccgcacgcggcttacaaggcctcgcttacagctag

SEQ ID NO: 186237 - DNA, 1797 bp, synthetic construct
  misc_feature 1..1797: note = Description of Artificial Sequence: Synthetic coding sequence
  source 1..1797: mol_type = other DNA
atggacgccctgccccggagcggcctgaacctgaaggaggagcccctattaccggccggcctgggaagtgttcgtagttggatgcagggagctggaatattagacgcgtcgacagccgcgcagtcaggcgtaggcttagccagagctcatttcgagaaacagcctcccagcaatctgcgcaagtcaaacttcttccacttcgtactcgccatgtatgatagacagggccagcctgtggaagtggaaagaaccgcattcattgacttcgtggaaaaggaccgggaacctggcgccgagaagactaataacggcatccactacagactccggttagtttacaacaatggacttcgaacagagcaggatctctacgtcaggctcatcgactctatgagcaagcaggcaatcatctatgagggccaggacaaaaaccctgaaatgtgccgagtgctcctgactcacgagattatgtgctcacgttgttgtgaccgcaagtcctgcggcaacaggaatgaaaccccatcagaccccgtcattatagatcgcttttttcttaaattcttcctcaaatgtaaccagaattgccttaagaatgcagggaatcctcgggatatgaggcgctttcaagtggtcgtgagtacgaccgtttccgtagacggccacgtgcttgcagtgtccgacaatatgttcgttcacaacaatagcaaacatgggagaagggcccgaaggcttgatccaagcgaggcagcgaccccgtgtatcaaggctatctctcctggggaaggctggacaaccggaggagcaactgtgatcgtgatcggcgacaattttttcgacggattgcaggtagtgtttggaaatgtgttagtgtggagcgagctcatcacacctcatgctatccgtgtgcagacaccacctcgacatatacctggcgttgtcgaggttacactctcatacaaatctaagcagttttgtaaaggttgtccaggtcgatttgtttacacagcactcaacgagccaactattgactatggtttccagcgcctgcagaaagtaatccccagacaccccggggatccagagcgcctccctaaggaagtgttactcaaacgagccgcagacctcgcggaagcgctgtatggagtgccgggatccaaccaggagcttctgctcaaacgggcggcggacgtggccgaagcactgtattctacccccagagccccgggacctttggcacccctcgctcccagccatccacacccagctgtagtcggcattaatgccttttcgagccctctcgcaattgctgtcggagacgccacacccggacccgagcccggctatgctcgctcctgcagctccgcaagtccacgcgggtttgcgccttctcccggaagtcagcaatctggttatggcgggggcttgggcgccgggctcggaggttacggagcccccggagtggccggcctcggtgtgcctggctccccttcctttctcaatggttcaacagcgacctccccttttgcaatcatgccctccagtccaccgttggcagctgccagctcaatgtcactgcctgcggctgctccaacgacatccgtgttttcattttcacctgtaaacatgattagcgcggtcaagcagcgctcagcttttgctccagtcctgcgccccccctctagtccgccccaggcatgtcccagggcccacggcgagggcctgcccgaccaatcttttgaggacagtgacaagttccactcccccgccagggggctacaaggattggcatactcgtag

SEQ ID NO: 186238 - DNA, 555 bp, synthetic construct
  misc_feature 1..555: note = Description of Artificial Sequence: Synthetic coding sequence
  source 1..555: mol_type = other DNA
cggggcagcgtgcagcacccccccgtggtgggcatcaacgccttctcttctcccctggccatagccgtgggcgatgctacaccaggccccgaacccgggtacgctcggtcctgctcgagtgccagtccccggggctttgctcccagtcccgggagtcagcagagcggatacggaggaggattgggcgcagggcttggggggtacggcgcccccggagttgcaggcctcggggtccctggcagcccatccttcctaaatggaagtaccgctacgagcccttttgcgattatgccatctagcccacccctcgccgctgcttcctccatgagcctgccagcagccgccccgactacatctgtcttttcattctccccagtgaacatgatcagtgcagtcaagcaacggtccgcgtttgcacccgtattacgcccaccatcaagcccaccacaagcctgcccaagggctcatggcgaaggtttgccggatcagtccttcgaggactctgataaattccactcccccgcccgtggcctgcaagggcttgcttactcatag

SEQ ID NO: 186239 - DNA, 1632 bp, synthetic construct
  misc_feature 1..1632: note = Description of Artificial Sequence: Synthetic coding sequence
  source 1..1632: mol_type = other DNA
atggccgccgccaaggccgagatgcagctgatgagccccctgcagatcagcgaccccttcggaagctttccccattcaccaaccatggataattaccccaaactcgaggaaatgatgctcctaagcaacggggccccccagttcttgggggctgctggagccccagaaggatccggaagcaattccagctctagcagcagcggagggggtggcggcggaggcggcgggagcaactcttcaagctctagtagcacattcaacccccaggctgacacgggcgagcaaccatatgagcatttgacagccgaaagcttcccagatataagcctcaataacgagaaagttctcgtggagacatcgtatccgtctcaaaccacgaggcttcccccgatcacatatactggcaggttttcattagagcccgctccaaatagcgggaacacgctttggccagaacctctattcagcttggtttctgggctggtgtcaatgacgaatccgcctgccagctcttccagcgcgccgtcacctgccgcttcatcggcttctgcctcccaatcacctcccttatcttgtgctgtgccatctaatgactcctctccgatttactccgccgctccgacgttccctaccccaaatactgatattttccccgagccacaaagtcaagcatttcctggcagcgcgggcaccgcactacagtatcccccccccgcgtacccagcagcgaagggcggctttcaagtgccaatgatccccgactatctgttcccgcagcagcagggggaccttggcctgggtacacccgatcagaagccattccaggggttggaatcaaggactcagcagcctagcctgacccccctgtctacaatcaaagcgttcgccactcagagcggttctcaagatttaaaggctctgaacacttcatatcaatctcagctgatcaagccctcaaggatgaggaagtatccaaatcggccaagcaagactcctccccacgaacgaccctatgcctgtcctgttgagtcctgtgaccggcgttttagtcgttccgatgaactaacgagacatatcaggattcataccggacaaaagcctttccaatgcagaatttgcatgcggaatttctctcgatctgatcatcttacaacgcacataagaactcatactggagagaagcctttcgcgtgcgacatctgcgggcgcaaattcgcccggtctgatgagagaaagcggcacaccaagatccatctgcggcagaaggataagaaggccgacaagtcagttgttgctagttccgctacttcttcactatccagttacccctctcccgtcgccacaagctatccatcccccgttaccacctcttatccaagtcccgccacaacatcttaccctagtcccgtccctacctcgtttagtagccctgggtctagcacatacccatctccagttcactccggattcccatcaccgtcagtggccactacatactcctctgtcccgcccgcctttcccgctcaagttagttcctttccaagcagtgctgtcaccaatagcttcagcgcttctactggactgagcgacatgacagccacatttagcccgagaacaatcgaaatctgctag

SEQ ID NO: 186240 - DNA, 603 bp, synthetic construct
  misc_feature 1..603: note = Description of Artificial Sequence: Synthetic coding sequence
  source 1..603: mol_type = other DNA
atggccgccgccaaggccgagatgcagctgatgagccccctgcagatttccgacccattcggaagtttcccccactcccccaccatggataactatcctaagctggaagagatgatgctactctccaatggcgccccacagtttcttggggcagcaggcgcccccgaaggaagcggatcaaattcaagttcatcctccagcggaggcgggggaggtggaggcggagggtcaaattcctcctccagctcatcaactttcaacccccaggctgacacgggcgagcagccttacgaacacctgacagccgagagcttccccgacattagcctcaataatgagaaggtgctagttgaaaccagttatcctagccagacaacgcgtctgccacctattacctataccgggcggttttcactagagcccgcgcctaatagtgggtttcctagtccaagtgtcgccacaacttatagttccgtgcctcccgccttccctgcacaggtgagcagctttccctctagcgctgtgaccaactccttttcggcatcaaccggtctgagtgacatgactgccacattcagtcccaggaccattgagatttgctag

SEQ ID NO: 186241 - DNA, 699 bp, synthetic construct
  misc_feature 1..699: note = Description of Artificial Sequence: Synthetic coding sequence
  source 1..699: mol_type = other DNA
atggccgccgccaaggccgagatgcagctgatgagccccctgcagatctcagatcctttcgggagctttcctcactcacccactatggacaactacccgaaattggaagaaatgatgttactaagcaacggcgccccccagtttctgggcgctgccggggcccccgagggtagcggatctaactcctcatcatcaagctcaggaggaggcggaggggggggcggaggctctaattcctcttcatcctcttcaacctttaaccctcaggccgatacaggtgagcagccttatgaacacctcaccgctgagtcattcccggacatcagcctgaataatgaaaaggttttggtcgagacctcctatcctagccagaccacgcggcttccgcccattacctatacaggaagatttagcctggagccggctcctaattccggcaacacactgtggccagaacctttgttctccctcgttagtggcttggtgagcatgaccaacccacccgctagcagttcgagcgctccaagtccagcagcctcttcggcctctgcatcccagtctccgcctctgagctgtgctgtgcccagtaatgattcttctcccatctactcagccgctccgacctttccaacccccaatacggatatctttcctgagactgcaatgagtaagttctttacttccatccagcggacctag

SEQ ID NO: 186242 - DNA, 1431 bp, synthetic construct
  misc_feature 1..1431: note = Description of Artificial Sequence: Synthetic coding sequence
  source 1..1431: mol_type = other DNA
atgatgaccgccaaggccgtggacaagatccccgtgaccctgagcggattcgtgcaccagctgtcggacaatatttaccccgtggaggatctggcggctacatccgtaaccatcttcccaaacgcagagctaggcggcccctttgaccagatgaatggcgtcgccggggacgggatgattaacattgatatgaccggagagaagcgctctcttgatttgccctaccccagctcctttgcacctgtgagcgcgccccggaatcagacgtttacctacatgggtaaattcagcattgacccacagtaccctggggcaagctgctatcctgaaggaattattaatatcgtcagtgctggcatcctgcaaggggtcacctctcccgcaagcactactgcctcatcttccgtgaccagcgccagtcctaatcctttggcgactgggccactcggcgtatgcaccatgtcccagacacagccggatctcgaccacctttactctccccccccacccccaccgccttatagtggttgtgccggcgacttataccaagatccttccgcctttctctccgccgccaccacaagtaccagtagctcactggcctatcccccgcctccctcttacccttcacccaaacctgctacagatcccggattatttcctatgatccccgattaccccggcttcttcccttcacaatgccagcgcgacctccacggcacagctgggcctgatcgcaagcccttcccatgccccctggacaccttgagggtgccacctccgttgacccccctgagcacgatcaggaactttacacttggcggaccttcggccggcgtcactggacctggcgcctccggcggcagtgaaggacctaggcttccaggcagcagctcggcggccgccgcagccgccgctgctgcagcttacaatccgcaccacctgcctttgcgtcctattctgaggcccagaaaatacccaaatagaccatcaaaaactccagtgcatgagagaccttacccatgccctgctgagggatgcgatagaaggttcagtcgatcagacgagttgactcggcacatcagaatccacactggacataagcctttccaatgtcggatttgcatgagaaacttttcacggagtgatcatttgactacccacattcggacccataccggggagaaacctttcgcgtgcgactactgcgggcgaaagtttgcccggtccgacgagcgaaagcggcacactaagatccacttacggcaaaaggaaagaaaatcctccgctccgtctgccagcgtcccagcaccatcaactgcatcatgttccggcggcgtacaacccggcggcaccctgtgttccagcaactccagcagcctggggggcggcccactggctccctgttcctctcgaacacggacaccttag

SEQ ID NO: 186243 - DNA, 1281 bp, synthetic construct
  misc_feature 1..1281: note = Description of Artificial Sequence: Synthetic coding sequence
  source 1..1281: mol_type = other DNA
atgaacggcgtggccggcgacggcatgatcaacatcgacatgaccggcgagaagcgttcccttgacctgccctacccatcttctttcgcaccagtcagtgcccccaggaaccagacttttacctacatgggcaaattctcaattgatcctcagtaccccggagcttcctgctaccccgagggaattataaatatagtgtcagcaggtatcctacagggggtcacctcccctgcctccaccacagcatcctcctctgttacctcggcatctccaaacccgttggccaccggacccctgggcgtttgtacaatgtcccagacccagcctgacttggatcacctctactcacctccgccacccccacccccatacagcggctgtgcgggggatctttatcaggatccaagtgccttcttgtccgccgcaactacctctacgtcaagctccctggcctacccacctcccccatcatatccttcccccaaacctgccactgaccctggactgttccctatgatacctgactatcctggcttctttccatcccagtgccagcgggacctgcatggcactgccggcccagatagaaaaccttttccttgtccccttgacacactgcgcgtgccacctcccctgactccactgagtactataagaaattttactcttggaggcccttcagctggtgtcactgggcctggtgcatccggcggaagtgaaggacctagacttcccggttccagctctgccgcagctgccgccgctgccgctgccgcatacaatccacatcacctgcctttacgacctatcctgcgccccagaaagtacccgaatcgccccagcaagactcccgtccatgagcgcccatatccatgtcctgccgaagggtgcgaccgcagattctctagatccgacgaattgaccagacatatccggatacacacaggacacaagccctttcagtgtcgcatttgtatgagaaatttttcacggagtgaccacttgaccacccatataaggacacacactggagagaagcccttcgcctgcgactattgcggcagaaagttcgcaagatctgacgagagaaaaagacacactaagatccacctcaggcagaaagagcggaaatcttccgccccctcagcgtctgtgcccgccccttctaccgcatcatgcagcgggggcgtccaaccaggcggcacgctgtgctccagcaattccagctcactgggtggtgggcctctggctccttgtagcagtaggacgaggacaccatag

SEQ ID NO: 186244 - DNA, 786 bp, synthetic construct
  misc_feature 1..786: note = Description of Artificial Sequence: Synthetic coding sequence
  source 1..786: mol_type = other DNA
atgcgggtgggcctgcccagcgaggccagcagctgcccctggagcgcgcggggacctcgtgatccccctgagcggaggcgctctgggttggcccatgtgctttcagacaatatctacccagtggaggatttggctgctacctctgtgacgatatttcctaacgccgagttgggaggcccatttgaccagatgaatggcgtcgccggcgacgggatgataaacattgacatgacaggtgaaaagcggagcctagatttaccgtacccatctagtttcgcgccggtgagtgcacccaggaatcaaacctttacatacatggggaaattttccatagacccccagtacccaggtgcctcatgctatccggaggggataatcaacattgtatctgccggcattctgcagggagtgacctctccagcaagcactactgcatcatctagcgtcaccagtgcttctcccaacccgctcgctaccggccccctgggggtgtgcacgatgtctcagacccaacccgatctcgaccatttatactcaccaccccctcccccccctccatattccggttgcgcgggcgatctgtaccaggatccgtctgcctttctgtcagcggcaactacgagcaccagctcaagtctagcatatccgcccccgcctagttacccatcccctaaacccgtggaagctgcccgggaccccggatgcctggttgctgcccagcagcagcagcagccaccacctccccctccaattacacacactacatgccattgtggccctttttag

SEQ ID NO: 186245 - DNA, 1431 bp, synthetic construct
  misc_feature 1..1431: note = Description of Artificial Sequence: Synthetic coding sequence
  source 1..1431: mol_type = other DNA
atgatgaccgccaaggccgtggacaagatccccgtgaccctgagcggttttgttcatcagctgtctgacaacatttaccccgtcgaagacctggccgcgacctccgttaccatcttcccgaacgccgagctggggggaccttttgatcaaatgaatggagttgccggagacggtatgattaacatcgacatgacaggcgagaagcgaagcttggatctgccctacccctcttcttttgcccccgtgtctgccccaaggaatcagactttcacctatatgggaaaattttccatcgacccgcagtacccaggcgcttcgtgctatccagagggaattattaatatcgtgtccgccggcattcttcagggtgtgacttctccagctagcaccactgcttcgtcaagcgtcacatctgccagcccaaatcccctcgccactggccccttgggtgtctgcaccatgtcgcagactcagcccgatctagaccacctctatagcccccctcctcctccgccaccttactcgggctgcgctggcgacttatatcaggatccttctgcgtttctcagcgctgccaccactagcacttctagtagcctcgcttatccacccccaccgagttacccatctccaaagcccgctacggaccccgggttattccccatgataccagattatcctggcttctttccaagtcagtgtcagcgagatctgcatggcactgccggacccgacagaaagcccttcccttgcccactcgacaccttgcgggtcccacctccattgacacccctttctactatcagaaatttcactctcggcggcccgtcagccggtgtgaccgggcccggagcctctggaggtagcgagggtccgcgcttgcccggatctagttcagccgcggctgccgcggccgctgccgcggcatacaacccgcatcacctgcccctgcggcctattttgaggcccaggaagtatccaaacagaccttcgaagacgcctgttcacgaacgcccatatccgtgccctgcggaggggtgtgatagacgcttctctagatccgacgaactgacccggcatatccggatccataccggacacaaaccgttccagtgtcggatctgtatgagaaacttctctcgtagtgaccacctgacaacgcacattagaacacacactggcgagaaaccattcgcctgtgattactgtgggaggaagtttgctagatctgatgaacgcaaacggcacaccaaaattcacctgcgccagaaggagcggaagagtagcgcgccgagcgcctcagtccccgctccatccaccgcttcgtgttctggcggggtacaacctggcgggaccctttgcagcagcaacagtagcagcctgggcggtggaccgctcgccccttgtagctccaggacaaggacaccatag

SEQ ID NO: 186246 - DNA, 1461 bp, synthetic construct
  misc_feature 1..1461: note = Description of Artificial Sequence: Synthetic coding sequence
  source 1..1461: mol_type = other DNA
atgctgcacctgagcgagttcagcgagcccgacgccctgctggtgaaatcaactgagggttgttgtgccgaaccaagcgctgaactcccaagactacctgctcgcgatgcacccgctgccacgggatatcctggggctggcgacttcctttcttgggctcttaacagttgcggggcctccggtgacctggctgacagttgctttctggagggcccagccccgacacccccgcctggcttgtcatattccggctcattcttcatccaagccgtacctgaacatcctcacgaccccgaagctttgttcaatctgatgagtgggatcttgggtttggctccgttcccaggccctgaggctgcagcctccaggtctcctctagacgccccattccctgccgggagtgacgctctgctgcccggcccacccgacctgtacagtcccgatcttggagcagcacctttccctgaagctttttgggaggcctccccttgtgcgggcgctccaagccagtgcctgtacgagcctcagctgagtccacctgacgtaaaacctggcttgcgcgccccgcccgcatcacccgcccttgacgcggtctcggcatttaagggcccctatgcaccatgggaactgctctccgtcggcgcccctggaaattgtggtagccaaggcgactaccaggctgcccccgaagctagatttcctgtgatcgggacgaagatagaggacctgctatcaatatcttgtcccgccgagcttcccgccgtgccagccaacagactttatccgtcgggtgcctatgatgctttccctctcgcaccaggtgacctgggagaaggagccgaagggctgcccggcctgctgacgccaccatctggcgagggtgggtcctctggcgacggcggggagtttctggcaagtacacaacctcaactaagtcctttgggactgcgttcggctgcggccgccgattttcccaagcccttggtcgcagatatccctggcagcagcggcgtggctgctccacctgtgcctcccccaccccccacacccttcccccaagccaaagcacgccgtaagggaagaaggggcggaaaatgcagcaccaggtgtttctgtccaagacctcacgccaaggcatttgcttgccccgtggagagttgtgttaggtcattcgcacggtctgatgaactcaacaggcatctgaggatccatactggccacaagccatttcaatgccgtatctgtctgcggaactttagtaggtcagaccacctcactacccacgtgcggacacatacaggtgagaagcccttcgcgtgcgatgtgtgcggcaggaggtttgcacggtctgatgaaaaaaaaaggcatagtaaggtccacctgaagcagaaagctagggccgaggagagactgaagggcttaggcttctactccctcgggctttccttcgccagtttgtag

SEQ ID NO: 186247 - DNA, 1770 bp, synthetic construct
  misc_feature 1..1770: note = Description of Artificial Sequence: Synthetic coding sequence
  source 1..1770: mol_type = other DNA
atggccgtggcccggggcgtgggcagccccgagcccgcccccccccaactctataagtggggaggctgtggtctcggagaacctggttcagcactcgagcggcgtggcgctgcagccagagggagatgcggacgggcacgagctcctaggctgcccgattcatttcccagaggggagtgtcctaaaccgggcgcccgagcaccaagaagtgtccggtgcggtgagcctctgccgccagcatcacccccaccagctagaccgcaggcccagcgcgcccggcctcgggcacctcatagccgacgcagagctatgctgcacctctcggaattttctgaacccgatgctctcttagtgaaaagcacagaaggctgttgcgctgagccatccgcggagcttccccgtttgccagctagagatgcccctgccgctaccggatatcctggcgctggcgattttctcagctgggctctgaactcctgcggagcttccggcgatctagccgattcatgtttcttggagggacccgcgcccacgcctccacctggcctgtcatatagtggcagctttttcatccaggccgttcctgagcatcctcatgatcctgaggctctcttcaatttgatgagcggcatcctggggctggcccccttccccggccctgaagctgccgcttccagatcccccctggatgccccattccctgccggatcagacgccttactgccaggtccccccgacctgtactccccagacctgggtgcggctcccttccctgaggcattttgggaggcaagcccgtgtgccggggctccctcccagtgcctgtatgagccccagttaagtccacctgatgtgaagccgggattacgcgcccccccagcctcccctgccctggacgccgtttccgcctttaaaggcccctacgcgccttgggagcttctgtccgttggcgccccaggaaactgcgggagtcagggagactaccaagctgcaccagaggcacgctttccagtgattggcacgaaaatcgaggacctcctgtccataagttgcccagcagaactgcccgccgtgccggccaatcgcctttatccatctggggcctatgatgcctttcccctggctccgggggacttgggggagggtgccgaagggctcccgggactcctcaccccccccagcggagagggcgggtcctccggggatggcggcgagtttctagccagtacacaaccccagctatcaccattaggcttacggagcgctgctgctgccgatttccctaagccactcgtggctgacattcctggctcatccggcgttgcggccccacccgtgcccccaccgcctccaactccttttcctcaggccaaggccagacggaaagggcgacgcggcggtaagtgtagtacacgatgtttctgtccacggccccacgccaaagcctttgcttgtcctgtcgaatcctgcgtaagatcctttgccaggagcgacgagttaaaccggcacctaaggatccacaccgggcacaaaccatttcagtgccgcatatgccttagaaacttttcgcggtctgatcatctgaccacccatgttaggactcataccggggagaaaccctttgcctgtgatgtgtgtggacgccggtttgcacgcagcgacgagaaaaaacgccattctaaagtgcatcttaaacagaaggctcgggccgaggaacgcctcaaaggcctcggcttctattctctcgggctgtccttcgcgagcctatag

SEQ ID NO: 186248 - DNA, 921 bp, synthetic construct
  misc_feature 1..921: note = Description of Artificial Sequence: Synthetic coding sequence
  source 1..921: mol_type = other DNA
atggacaccccccccctgagcgacagcgagagcgagagcgacgagtctttagtaactgacagagaactgcaggatgcttttagccggggtctcctcaagccaggattaaatgtggtgctagaaggccccaagaaagccgtgaacgacgtgaatgggctgaagcagtgtctggcagagtttaagagggatttagagtgggtcgagaggctggacgtcacgctgggcccagtgcccgagatcggcgggtccgaggcccctgcaccacagaacaaggaccagaaagcggtagaccccgaggatgattttcagcgagagatgagtttctataggcaggcccaggcagccgtgctcgccgttctgcctcgcttacaccagctgaaggtgccaacaaagcgacctacagactactttgcagaaatggctaagtccgaccttcagatgcagaagattagacaaaaattgcagaccaagcaggccgccatggagaggtcagagaaagccaagcagcttcgagctctgcggaagtacggcaagaaggttcagacagaggtgctccagaagcggcagcaggaaaaagctcatatgatgaatgctattaagaagtaccaaaagggatttagcgacaagctagattttctggagggggaccagaaaccattagcacagagaaagaaggcgggcgcgaaagggcagcagatgcgcaagggacccagtgccaaacgccggtacaaaaaccagaaattcggtttcgggggcaagaaaaagggcagtaaatggaatacgagggagagctatgatgatgtgtccagtttcagggctaaaacagcgcatggccggggcttgaaacgcccgggcaaaaagggcagcaataaacggcccgggaaaagaacacgtgaaaaaatgaagaaccggactcactag

SEQ ID NO: 186249 - DNA, 1086 bp, synthetic construct
  misc_feature 1..1086: note = Description of Artificial Sequence: Synthetic coding sequence
  source 1..1086: mol_type = other DNA
atgtaccccgaggccctgcccgtgggcatcctgagcaaccccgacacatttaaacgaaggtcaggaagctattccaatgataaaccagaggtgtggtttgccgccggatcagggagcccaaatcagaagttgagttcatcctgcgtgggccgcgcctgtggggagatggatactccccccctgagtgatagcgaatcagaatctgatgaatctttggtgaccgacagggaattgcaagacgcattctctagaggcctgttgaagcctggcctgaatgttgtactggaaggcccaaaaaaggccgtcaacgacgtgaatggactaaaacagtgcctcgccgagtttaagcgggatttggagtgggtcgagcggctggatgtgacactaggaccggtgccagagataggcggttctgaggccccagctccacagaacaaggatcagaaggctgtggatcctgaagacgattttcaacgcgagatgtccttttatagacaggcccaggccgccgtgcttgccgtactgccacgcttacatcagctgaaggtgcccacaaagcgaccaacagattattttgcagaaatggcgaaaagcgacttacagatgcagaaaatccgacagaaacttcagaccaagcaggctgccatggaacggtcagagaaagcgaaacagctccgcgctctaaggaaatacggtaaaaaagtgcaaaccgaagttctgcagaaaagacagcaggaaaaggcacatatgatgaacgccataaagaagtatcagaaaggattttcggataagctggactttctggaaggcgatcaaaaaccccttgcccaacgaaaaaaagcaggtgccaagggacagcagatgagaaagggaccctccgctaagcgcagatacaagaatcaaaagtttggctttggcggcaaaaaaaaaggctccaaatggaacaccagggagagttacgacgacgtctctagctttcgggctaagaccgcccacggtagaggccttaaacgtccaggaaagaaagggagcaataagcggcctggcaaacggacccgggagaagatgaaaaatcgtacccactag

SEQ ID NO: 186250 - DNA, 2448 bp, synthetic construct
  misc_feature 1..2448: note = Description of Artificial Sequence: Synthetic coding sequence
  source 1..2448: mol_type = other DNA
atggaggacggcttcagcagctacagcagcctgtacgacaccagcagcttactccagttttgcaatgacgactccgcctccgccgcctccagcatggaggttacagaccggatagcgtctctggaacaaagagtccagatgcaggaggatgatatccagcttttgaaatctgcccttgccgatgtagtcagaagactcaacattaccgaggaacaacaggcagtcttaaatcggaaagggcctactaaggcacggccactgatgcagaccttgcccctacggacaacggtgaacaacggaaccgtcctccctaagaagccaaccgggtctctgccgagtccatccggcgtcaggaaggagaccgcggtgccagcaacaaaaagcaacattaaaaggacttcatctagcgaacgtgtctcacctggtggtagacgagagagcaatggagacagtagagggaatcgtaacaggacgggctcaacctcttcgagctctagcggcaagaagaattctgagagcaagcccaaagagccggtgtttagcgcagaggagggatatgttaagatgttcctgagaggtagacctgtgaccatgtacatgcctaaggatcaagtggactcatactctctggaagctaaggtggaactgccgaccaaaagattgaaactggaatgggtgtacggttaccgcgggcgagactgtagaaataacctctacttgttgcccaccggtgaaactgtgtatttcattgcttccgtcgtcgtgctgtacaacgttgaggaacaactacagcggcactacgcgggccacaacgacgatgtgaaatgtttggctgtgcatcctgaccgcattacaattgccacaggccaggtggcgggcacgtctaaagatggtaagcaattaccaccacacgtaagaatttgggacagcgtgaccctcaatacacttcatgtgattggcataggattctttgatcgcgctgttacatgcatagctttttctaagtcaaacgggggtacaaatctgtgtgccgttgacgactctaacgatcacgtactgtcagtttgggactggcagaaggaggagaagttagccgacgtcaagtgttccaatgaagcagtgttcgctgccgatttccacccgactgacactaacatcattgtcacctgcggaaaatcccacttgtatttttggaccctggagggctcatcactgaataagaagcagggtctgttcgaaaagcaagagaagcccaaattcgtcctgtgtgttaccttttccgaaaatggcgacaccatcactggtgactcgtctggaaacatactggtgtggggcaaaggaaccaatcggatctcatatgctgtccagggagcccatgagggcggaatcttcgcactgtgtatgctgagggacgggacacttgtgtctggaggaggcaaagatagaaagcttatcagctggagcggcaactaccagaagttacgtaagactgagatccctgaacagttcgggccaatccggacagtggctgagggcaagggtgacgtaatcctgatcgggaccacacgaaatttcgtcctgcagggcacactatccggcgactttacacctatcactcagggccataccgatgagctctggggtttggccatccatgcttctaagtctcagttcctcacttgtggacacgataaacatgccacgctgtgggacgcagttggccatcggcctgtttgggacaagattattgaggacccggcccagagcagtggcttccacccatccggaagcgttgtggcggttggaacccttaccggcaggtggttcgtattcgacacagagaccaaggatctggtgacagtgcacactgacggaaacgagcagcttagtgtgatgagatattcacccgacgggaacttcctggcaatagggtcccatgataactgtatctatatctatggtgtgagcgacaatgggagaaaatatacccgggtgggtaaatgcagcgggcactcctcattcatcactcacttggattggagcgtgaactctcagtttttagttagcaactcaggcgactatgagattctatattgggtgccttctgcttgtaagcaggttgtctctgtcgagaccacgagggacatcgaatgggcaacctatacttgtaccctgggcttccacgtgtttggtgtgtggccggaggggagcgatggcactgatataaacgcggtgtgcagggcacatgagaaaaaactgttatctaccggagatgattttggcaaggtccatcttttctcctacccatgctcccagttccgagccccttcacacatatacggaggccactcaagccacgtcactaatgtcgatttcctgtgtgaggactctcatctgatctccacaggtggtaaggatacatcaatcatgcagtggcgagttatatag

SEQ ID NO: 186251 - DNA, 2505 bp, synthetic construct
  misc_feature 1..2505: note = Description of Artificial Sequence: Synthetic coding sequence
  source 1..2505: mol_type = other DNA
atggaggacggcttcagcagctacagcagcctgtacgacaccagctccttattacaattttgcaacgatgactccgctagcgccgcatcatctatggaagtcacagacagaatcgctagtctagagcaaagggtgcaaatgcaggaagatgatatccaacttctgaagtctgcactggctgacgttgttagacgcctgaacataacagaggagcagcaggcagtgctgaatcgtaaaggccctacaaaggctcggcccctgatgcagactctccctcttaggaccactgtcaacaacggaacggtcctgcctaaaaagcctaccgggagcctccctagcccttctggtgttcgcaaggagacagctgtgccggccactaaaagactcaacagaagcgtttccctcttgaatgcttgcaagctgaacagaagtacaccgtcaaatatcaaacgtacctccagctccgagcgagtaagcccaggcggacgccgtgaaagcaacggggactctaggggaaacagaaatagaaccggatcaacatccagctcctcttcaggaaaaaagaacagcgagagtaaaccaaaagagcccgtgttcagcgccgaggagggctatgttaagatgttcctacgcggacggccggtgaccatgtatatgcccaaagaccaggtggatagctactcactggaggctaaagtagaactgccgaccaagcgcctcaaactggaatgggtatacggctatcggggtagggactgtagaaacaacctatatctacttccaacaggggaaacagtgtattttatcgcctccgtagtagtgctatataacgtggaggagcaactgcagaggcactatgctgggcataatgacgacgtcaagtgcctggctgtccaccctgacagaattacaatcgctacaggccaggtcgccggcacgtctaaggacggaaagcaactgcctccacatgtgcggatttgggattctgtaacactcaatacgctgcacgtcatcgggattggcttctttgatagagcggtgacctgtatcgcattctcaaagagtaatggcgggacaaatttatgcgcagtcgacgattcaaatgatcatgttctctctgtctgggactggcagaaggaagagaagctcgccgatgtgaaatgttccaacgaggcggtatttgcagcagactttcacccaactgacaccaacatcatcgtcacttgtggaaagtcacatctgtatttctggacattagagggcagctccttgaataagaaacagggcttgttcgagaagcaggagaaacccaagttcgttctgtgtgtcaccttttccgagaatggcgatactattaccggcgactctagcggtaacatcctggtctgggggaaaggcactaatcgaatctcttatgccgtccagggagcgcatgagggtggcatctttgcactctgcatgctgcgggacggcactctcgtttcagggggaggtaaggacagaaaactaatctcctggtcaggtaactatcaaaagttgagaaagacggagatcccggagcagtttggaccaatccgcacggtggctgagggaaaaggcgacgtgattctcattggaaccaccagaaatttcgttctacaggggactctgtctggtgattttacaccaattacacagggtcatacagatgagctttgggggctcgccatccatgcaagcaagtcacaatttctgacttgtggccatgataaacacgctactctatgggacgcagtggggcaccgcccggtgtgggataagatcatcgaagatccagctcagagcagtggtttccaccctagtggatctgtagttgctgtggggacattgacaggacgctggttcgtgtttgacacggagaccaaagacttggtgacggttcacacggatgggaacgagcagctctccgtcatgcgatattcacctgacggaaacttcctggcgatcggctctcacgacaactgcatctatatttacggggtctctgataacggccggaaatatacacgggtcgggaagtgctcaggacattcatcctttatcacccacctcgactggagcgttaacagccagttcctcgtgtccaattccggcgactacgaaatcctctattgggtccctagcgcctgtaaacaagttgtcagtgtggagacaactcgagatatagaatgggctacctatacatgtacgctgggcttccatgtgttcggcgtttggcccgagggcagcgatggaactgatatcaatgccgtgtgtcgtgcacacgagaagaaattgctcagcactggcgatgacttcggtaaggtgcacctcttctcctatccatgctcccagtttcgcgcaccctctcacatctacggaggacactctagccacgtgacaaatgtcgattttctatgtgaagatagccacctgataagcactggcggaaaagataccagcatcatgcaatggcgagtcatctag

SEQ ID NO: 186252 - DNA, 2505 bp, synthetic construct
  misc_feature 1..2505: note = Description of Artificial Sequence: Synthetic coding sequence
  source 1..2505: mol_type = other DNA
atggaggacggcttcagcagctacagcagcctgtacgacaccagctcactcctccagttttgcaatgacgacagcgcaagcgccgcctctagcatggaggtcactgacaggattgcgagcctcgagcagagagtgcagatgcaggaggatgacattcaactgttgaaatctgcgcttgccgacgtggtacgccgtctgaatattacagaagagcagcaggcagtactgaaccgaaaggggcccaccaaagcacgaccactcatgcagacccttccactccggacaaccgtgaataatggaacagtgctcccgaaaaagcccactgggtcgttgcccagtccatcaggcgtcaggaaggagacagcagtgccagccaccaagaggttgaacaggtctgtctcgctgctgaatgcttgtaaactgaatcggtctactccatccaatataaaaagaacaagcagttctgaacgtgtaagcccggggggtcggagggagagcaatggtgattcccggggcaaccgtaacagaaccggctctacgagctcaagctcatcaggcaagaaaaactccgagtccaaacccaaggaaccggtcttctcagcagaggaagggtatgtcaagatgtttttgaggggtaggccagtgactatgtacatgccaaaggaccaggtagactcgtattccctggaggctaaggtggagctgcctacgaagcgtctcaagctagagtgggtttacggatacagaggtagagactgtaggaacaacctatacctcctgcccacgggcgagactgtctatttcatcgcaagcgtggtcgtgctgtacaacgtcgaggagcagctgcagcgacattatgccggtcataatgacgacgtgaaatgcctggcggttcacccggaccgcattacgatcgcaacaggccaagtggctggcacctctaaagacggcaaacaacttcccccccacgtgaggatctgggactccgtgactctaaacacccttcatgtgatcggtatagggtttttcgaccgcgccgtgacctgtatcgcttttagcaagtctaacggtggaaccaacctgtgcgccgtcgacgactctaatgatcatgtactcagtgtttgggattggcagaaagaagagaagttagccgatgttaaatgtagcaacgaagcagtgttcgccgcagatttccatccaactgacacaaacatcatagtcacttgcggaaagagtcacctgtacttttggacattggaaggtagctctcttaataagaagcaggggctgttcgagaagcaggagaagcccaaatttgtgctttgcgtgacgttcagtgaaaacggagacacgataacaggtgactcctccggcaacatacttgtgtggggaaaggggaccaatcgcattagttacgcagtgcagggcgctcacgagggcggcatctttgctctgtgtatgttgagagacgggaccctggtatctggcggcgggaaagatcgtaaactgatcagctggtctggaaattaccagaagctgagaaagacggagattcctgaacagtttggccctatccgaacagttgcagagggtaagggcgacgtcatcttgatcggcactacacggaactttgttctgcaggggacgctgagtggggatttcaccccaattacccagggccacacagatgagctgtgggggttggccatccatgcttctaagagccaatttctcacatgcggccatgacaaacacgctacactgtgggacgctgtgggacatcgtccagtctgggacaaaatcatcgaggatcctgctcaatcatccggtttccaccctagcgggtcagtggtcgccgtgggcacacttaccggtagatggtttgttttcgacacggaaactaaggatctggtcacagtgcatactgacggaaacgagcagctgagcgttatgagatatagcccagatgggaatttcctggcgattggctcccacgataactgcatctacatatacggcgtgtctgataacgggcgcaagtacacacgggtaggaaagtgctctgggcactcttcttttattacacacctggactggagcgtcaattcccagttcctggtgtcgaactctggggactacgaaatcctctattgggtgccgtcagcttgcaagcaggttgtgtcggtagagacaacgcgcgatattgagtgggctacctacacgtgcacgctgggattccatgtttttggcgtctggcctgaaggctcagacggaactgatatcaacgcagtttgccgagcccacgagaaaaagttactgagtacgggcgacgattttggcaaagtacatctgttttcttacccgtgttctcagtttagagctccttcccatatctatggcggacactcctcacatgtgaccaacgttgattttctgtgtgaagacagccacttgatttccacgggaggaaaggataccagcatcatgcagtggcgagtaatttag

SEQ ID NO: 186253 - DNA, 2946 bp, synthetic construct
  misc_feature 1..2946: note = Description of Artificial Sequence: Synthetic coding sequence
  source 1..2946: mol_type = other DNA
atggacggcttcgccggcagcctggacgacagcatcagcgccgccagcactagtgacgttcaagaccgtctttccgcactagagtccagagtacagcagcaggaggatgaaataactgtcctgaaggctgcactagctgatgtgctcaggaggctggccatttcggaagaccacgtagcatccgtgaaaaagtcggtaagttcgaagggccagccttcacccagggctgtgattcccatgagctgtataacgaatggctccggcgccaatcgcaagccctctcataccagcgctgtgtcgattgctggaaaggaaaccctcagttccgcagctaaatccggcacagaaaagaagaaggaaaaaccgcagggacaacgggaaaaaaaggaagaatcccacagcaatgaccagtcaccacagataagagcatcaccttcacctcagccctctagccagccgctgcaaattcaccgccaaactcccgagtccaagaacgctacacccactaagtctatcaaacggccatctcccgctgagaagtctcacaattcatgggagaactcagatgattcccgtaacaaactctctaagattccatccactcctaagcttatccccaaggtcacaaaaaccgccgacaagcataaagacgtgatcattaaccaggagggcgaatacatcaaaatgtttatgagaggccgtcccattactatgttcatccccagcgacgtggacaactacgatgacattcgtacagaacttccaccagaaaagctgaaactggagtgggcctacggttaccgggggaaggattgtcgtgccaatgtatatctgctgcctaccgggaagatcgtgtattttatcgctagcgtggtggtcctgttcaattacgaagagaggacacagaggcactaccttgggcacacagattgcgtgaaatgcttggccattcaccctgataaaatcagaattgccacaggccagatcgcaggagttgataaggatggacggcctcttcaaccacatgtgagggtctgggacagcgtgactctctcgactctgcagatcatcggtctgggaaccttcgaacgcggagttgggtgtctagatttctctaaggcggattccggcgtgcacctctgtatcatcgacgactctaacgagcatatgctgacggtatgggattggcagaaaaaggccaagggggcagagatcaaaacaacaaacgaggtggtcttagctgtggagtttcacccaaccgacgccaacactatcataacttgtggcaagtctcacatcttcttttggacatggagtggcaattcactcacccggaaacagggaatcttcggaaagtatgaaaaacccaagttcgtccagtgtctcgcctttttaggcaacggtgatgtgctaacgggagattccggcggtgtgatgctaatttggtcaaaaaccactgttgagcccacgccgggtaaaggacccaagggggtctatcagatctcaaaacagatcaaggcccatgatggttccgtgtttacattgtgtcagatgcgcaacggaatgctgcttaccggcggcgggaaggatagaaagatcattctgtgggatcatgatttgaatccagagagggaaatagaggtgccagatcaatatggcaccatccgagccgtcgccgaggggaaagctgatcagtttctggttggcacgagtcgtaacttcattttacgaggaacattcaatgatgggtttcagattgaagtgcagggtcacacagacgaattatggggactggccacccacccatttaaggacttactgcttacctgtgcccaggacagacaggtttgtctgtggaacagtatggaacatcggctggagtggactagacttgttgatgaaccggggcactgcgccgatttccacccctcaggcactgttgtggcgatcggcactcatagtgggcggtggttcgtgttagatgccgagaccagggacctcgtgtccatacacacagacgggaatgagcagctttctgttatgaggtactctattgacggtacatttctcgctgtgggatctcatgataatttcatctatctctatgtcgtttccgaaaatggccggaaatactcacgatacggccggtgcaccggacatagctcctacataactcatctggactggagccccgataataaatacattatgtctaacagcggagactacgagattctgtattgggacattccaaacggatgtaagctcattagaaacaggtctgattgcaaggacatagactggacaacctacacatgtgtgcttgggttccaggtctttggggtctggccagaggggagcgacggcacggatatcaacgcgctagtgcggtcccataatcgcaaggttatagccgtagctgacgatttttgcaaagttcatctatttcagtatccttgctcgaaggccaaagctccatctcataagtacagcgcccacagttcccatgtgacaaatgtctcttttactcataatgacagtcacctgatcagcacagggggcaaggatatgtctataattcagtggaagctggtggaaaaactctctcttccacagaacgagacggtcgctgataccacattaacaaaggctcctgtctcaagcactgaaagcgtgattcagtcaaataccccaacgccaccgccatcccagcccttgaacgagacagccgaggaggaaagtaggatttcgagctccccaacactattagaaaacagtctagagcagacagtagagccaagcgaggatcactctgaggaggaatctgaggaggggtccggggacctgggcgagcccctctatgaggagccttgcaatgagatttccaaggagcaggcgaaggccaccctgttggaggaccagcaggatccctctcctagttcttag

SEQ ID NO: 186254 - DNA, 738 bp, synthetic construct
  misc_feature 1..738: note = Description of Artificial Sequence: Synthetic coding sequence
  source 1..738: mol_type = other DNA
atgagcaacagcggcgactacgagatcctgtactgggacatccccaatggttgcaagttgattcgcaatcgatctgactgtaaagatattgactggaccacttacacatgcgtgcttggatttcaggtgtttggagtttggcccgagggctcagacggcaccgatattaacgccctagttcggtctcacaaccggaaggtgatcgccgtggctgacgacttctgtaaggtgcacctcttccagtacccatgctccaaggctaaagcccccagtcacaagtattcagcccactcaagccatgtcacaaatgtctctttcacacacaacgattctcaccttataagcaccggcggaaaggacatgagcattattcagtggaagctggtggaaaaactgtcgttgccacaaaacgaaactgtcgcagacacaaccctgaccaaggcaccggtcagctccactgaatccgtgatccagtccaacactccaacaccaccccctagccagcctttgaatgaaaccgcagaggaagagagccggatctccagtagccctactcttctcgaaaattcactcgaacagacagtcgaacctagcgaagatcattcagaagaagagagtgaggagggcagcggcgacctcggagaacccctctacgaagagccctgcaatgaaatttcaaaggagcaagcgaaggcaaccctccttgaggaccagcaggatccctccccttcctcatag

SEQ ID NO: 186255 - DNA, 2772 bp, synthetic construct
  misc_feature 1..2772: note = Description of Artificial Sequence: Synthetic coding sequence
  source 1..2772: mol_type = other DNA
atggacggcttcgccggcagcctggacgacagcatcagcgccgcctcaacatcagatgtgcaggatcgccttagcgccctggagagccgagtgcagcaacaagaagatgagattactgtgctaaaggctgccttggctgacgtgcttaggcgacttgctattagcgaggaccatgttgcgtctgtgaaaaagagtgtgtcttcaaaaggacagccaagcccacgagccgttattcccatgagttgcattacaaacggcagcggagcaaacaggaagccttcgcatacgtccgcagtgtctatcgccgggaaagaaactttgtcatccgctgcaaaatcaattaagaggcctagccctgcagagaaatcacacaacagctgggagaacagtgatgactctcggaacaagttaagcaagattccatctactccaaaactaattcccaaagttaccaaaacggccgacaaacataaagacgtgatcatcaatcaagagggcgagtacatcaagatgttcatgcgagggcgcccaatcacgatgttcatcccaagtgatgtagacaactacgatgacatccgcactgagctccccccggagaagctgaaattggagtgggcttacggataccgggggaaggactgcagggccaatgtgtacctgttgccaactgggaaaattgtgtactttattgcatcggttgtagtcctgttcaactacgaagaaagaactcagcgtcattacttgggccatactgactgcgtgaaatgccttgctattcaccccgataaaatcagaatcgcgacaggacaaatcgcaggggtggataaagacggaagacctctgcagcctcatgtccgagtgtgggattccgtaacattgtcaaccctccagatcattggcctgggcacattcgagcgcggggtgggatgcctggacttttccaaagcagatagcggagtgcacctgtgcatcattgatgatagtaacgagcatatgctcacagtatgggactggcagaaaaaagccaaaggcgccgaaatcaagactaccaacgaagtggtgttagcagtagagttccatcccactgatgccaatactataatcacctgtggtaagagccatatcttcttctggacatggagcggtaattcactgacacggaaacaaggtatctttggtaaatatgagaagccaaaattcgtgcagtgcctggcctttctgggtaatggagacgtcctaacgggggacagtggcggcgtgatgttgatctggagtaaaacaacggtcgagccaaccccgggaaaaggtccgaaaggcgtctatcagatcagcaagcaaattaaagctcacgatgggagtgtgttcacactgtgccagatgcggaacgggatgcttctgaccggtggcggcaaagacaggaagatcattctgtgggatcatgatctgaatccagagcgggaaatcgaagttcctgaccagtatggtaccattcgtgcagtcgcagaggggaaagcagaccagttcctggtgggaacctcgagaaactttatcttgcgcggaaccttcaatgatggcttccagatcgaggtgcagggccacactgacgaactttggggcctcgctacacacccatttaaagatttgctgctgacttgcgcccaggacaggcaggtttgtctgtggaacagtatggagcacagactcgaatggaccaggctggtcgatgagcccggacattgcgcagactttcatccatccgggacagtggtagccattggcacccactccggcaggtggtttgtgttggacgccgaaaccagagatttggtgtccatccacacggacggaaatgaacagcttagtgtcatgaggtacagcatcgacggtacattcctagctgtgggtagtcatgacaacttcatctatctgtacgtggtgtccgagaacgggcggaagtactcacggtatggcaggtgtactggccattcctcatacatcactcacctggactggtcccctgacaacaaatacattatgtcaaactctggagactacgagatcctgtattgggatatccccaacgggtgcaagctcatcagaaaccgatcagattgcaaagatattgattggactacctacacctgtgtcctggggttccaggtgtttggcgtatggccagaagggtctgatggaaccgacataaacgcactggttcgcagtcacaatcgtaaagtgatagcggttgcggatgacttctgcaaggtgcatctgttccagtacccatgctccaaggccaaggccccttcgcataagtactcagctcatagtagccacgtgacaaacgtctcatttacacacaatgattctcacttgattagcacgggaggtaaagatatgagcatcattcagtggaagttagtcgagaagctgtcccttcctcagaacgagaccgtggcagatacgaccctgaccaaggcacccgtgagctccacagagtccgtgatccagagtaatacccccacgccgcctccatctcaaccactgaatgaaactgctgaagaggagtcgaggatcagctcttccccgacgctcctcgagaattcactggaacagaccgtggaaccatccgaggatcactctgaggaggagagtgaagaagggtccggtgacctgggcgaaccactgtatgaggagccgtgcaacgaaatcagcaaagagcaggctaaagctaccctgctggaagaccaacaggatcctagcccatctagttag

SEQ ID NO: 186256 - DNA, 780 bp, synthetic construct
  misc_feature 1..780: note = Description of Artificial Sequence: Synthetic coding sequence
  source 1..780: mol_type = other DNA
atgctgctgcggagctggttcggcaacaaggacttccaggccctgccaatcctagctaggctgccatctatgccaaccgatatggagcatacgggacactacttgcatctcgctttcctgatgactactgtattctccttatcaccaggcaccaaagcaaactacactcgcttatgggctaattccaccagcagttgggatagcgtgatacagaataagaccggacggaatcaaaacgagaacattaacacaaaccccatcactcccgaagtcgattacaaaggtaactcaacaaacatgccggaaaccagccacatcgtggccctgacaagcaagtcagaacaagaactgtatatccccagtgtggtgtccaattcaccatctaccgtgcagagtattgagaacacatccaagagtcacggggagatctttaaaaaagacgtttgcgctgagaataacaataatatggccatgctgatttgcctgatcatcattgccgtactgttcctgatttgtactttcctcttcttgtctactgtggtcctggccaataaggtgagttcactgagacgcagtaaacaagtgggtaagcgacagccacgatccaacggagatttcctggcctccgggctctggccagctgagtctgacacgtggaagaggaccaagcagctgacagggcccaatctggtgatgcagagcacaggcgtactgacggcgaccagagagagaaaggacgaggaaggaacggagaagctaacaaacaaacagattgggtag

SEQ ID NO: 186257 - DNA, 711 bp, synthetic construct
  misc_feature 1..711: note = Description of Artificial Sequence: Synthetic coding sequence
  source 1..711: mol_type = other DNA
atgcccaccgacatggagcacaccggccactacctgcacctggcctttctgatgaccacggtgttttcactgtcgcccggcactaaggccaactacacgaggctgtgggctaactccacatcctcgtgggactccgtgattcagaacaaaaccgggcgcaaccaaaatgagaacatcaacactaatcctatcacgccggaagtcgactataaaggaaatagcaccaacatgccagagacctcacatattgtggccttgacgtccaaaagcgagcaggagctgtacatcccctctgttgttagcaattctccaagcactgtacagtcaattgaaaacaccagcaaatcccatggcgaaatcttcaagaaggatgtttgcgccgagaacaacaataatatggcgatgctgatttgtctgattatcatcgctgtgctgtttctaatctgcacattcctttttctgtcgacagttgtgctggccaataaggtctctagccttagaagatctaaacaggttggaaagcgtcaaccacgctcgaatggggatttcctagctagcggactctggcctgctgagtcagacacgtggaaaagaaccaagcagcttaccggacctaaccttgtcatgcaatccaccggggttctcacagccacccgcgagcggaaagatgaggaaggcacagagaaactgacaaataaacaaatcgggtag

SEQ ID NO: 186258 - DNA, 711 bp, synthetic construct
  misc_feature 1..711: note = Description of Artificial Sequence: Synthetic coding sequence
  source 1..711: mol_type = other DNA
atgcccaccgacatggagcacaccggccactacctgcacctggccttcctcatgaccaccgtgttcagtctgagccctgggactaaggcaaactacaccagactatgggccaacagtacaagtagctgggactcagtgatacagaataaaactggtaggaatcagaatgaaaacatcaatactaatcctattactcctgaggtggactataagggtaactctacgaatatgccggagaccagtcatattgtcgctctcacctctaagtccgagcaggaactgtatattccctctgttgtgtccaactccccatcaacagtacagtccatcgaaaacacaagcaaatcacacggcgaaattttcaagaaagatgtctgtgccgaaaataacaataacatggcaatgctgatctgcctcatcataattgccgtccttttcctgatttgcacattcctatttctcagcaccgtagtgcttgcgaacaaggtttcatcgctgcgtagaagtaaacaggtcggtaagagacagcctcggagtaatggggacttcctagcaagcggactgtggcctgctgaatccgacacgtggaagcgaaccaagcagctgacaggccccaacctggtgatgcagtctactggcgtcctgactgcaactcgggaaagaaaagacgaagagggcactgagaaattgaccaataaacagattggctag

SEQ ID NO: 186259 - DNA, 699 bp, synthetic construct
  misc_feature 1..699: note = Description of Artificial Sequence: Synthetic coding sequence
  source 1..699: mol_type = other DNA
atggagcacaccggccactacctgcacctggccttcctgatgaccacggttttcagcttgtcaccaggcaccaaggccaattatactagactttgggcgaattctactagttcttgggactcagtgatccagaataagactggtagaaatcagaacgagaacatcaatacaaatcccatcacacccgaagtcgactacaaaggcaacagcaccaatatgccagagacttcccacatcgtcgcattgacttcaaagtctgaacaggaactttacatcccgagcgtcgtttcgaatagtccctctactgtgcagtcaatcgaaaatacatccaagtcacatggcgagatctttaaaaaggacgtatgcgccgaaaataacaacaacatggccatgttgatctgcctcatcatcatcgccgtgctcttccttatctgcaccttcctcttccttagcacagtggtcctagcaaataaagtctccagtcttcgtcgctcaaagcaggttggtaaaaggcaaccgcgcagtaatggcgatttcctggcgtcaggcttatggcctgcggaaagtgacacttggaaaagaactaagcaactgacgggacccaatctcgtcatgcaaagcaccggggttctcacggcaacacgggagcggaaggacgaggaaggtacagagaaactcactaataagcagatagggtag

SEQ ID NO: 186260 - DNA, 1347 bp, synthetic construct
  misc_feature 1..1347: note = Description of Artificial Sequence: Synthetic coding sequence
  source 1..1347: mol_type = other DNA
atggaccccaagtacttcatcctgatcctgttctgcggccacctgaacaatactttcttctctaaaaccgagaccatcacaaccgaaaaacagagccaacctaccctgttcaccagctcaatgtcccaggttctggcaaattcccagaataccaccggtaatcctctggggcagccgactcagttcagcgacaccttctcaggccaatcgatctcccccgctaaagtcacagcaggccaaccaacacctgcagtttataccagcagcgaaaaacccgaggcacacacgtccgctgggcagccgctcgcctataatactaagcagccaacacccatcgccaatacctccagccagcaggccgtgtttacgtccgcccgccagcttccgtctgctcggaccagtactacccaacctccaaaaagttttgtctacacatttacccagcagtcatcttcagtccaaatcccaagcagaaaacagattacggtgcataatcctagcactcagcccaccagcaccgtaaaaaattctcctaggagcactccaggctttattctggatactaccagtaacaaacagactccacagaaaaataattataactcgattgccgccatcttaatcggagtcctgctgaccagtatgcttgtcgcgattatcatcatcgtgttatggaagtgcctcaggaagcctgtgctcaatgaccagaattgggcaggcaggtctccgttcgctgacggggagacccctgatatctgcatggacaacattcgtgagaatgaaatcagcacgaagagaacatccataatctctctgactccatggaagccatctaaatcaacccttctggcggatgatctcgaaattaagctcttcgaatcttccgaaaacatagaggactctaacaacccaaagaccgaaaagatcaaggatcaggtaaatggtacttcagaggacagtgctgacggttccaccgtcggtactgctgtaagtagttctgacgacgcggatctgcctcctcccccccccctcttagaccttgagggccaggaatcaaatcagtcagataaacccacgatgacaatcgtatcaccgcttcctaatgactctactagcctgcctcccagtctcgactgcttgaaccaggattgtggagaccataaaagcgaaatcatacaatccttcccaccacttgatagccttaacctgcccttacctccagtggattttatgaaaaaccaagaagactcaaacttggagattcaatgccaggagttctccatcccacctaattccgaccaggacttgaacgaatctctgccacctcccccagccgagctcctctag

SEQ ID NO: 186261 - DNA, 1392 bp, synthetic construct
  misc_feature 1..1392: note = Description of Artificial Sequence: Synthetic coding sequence
  source 1..1392: mol_type = other DNA
atgctgttccggtacgccgagaagatcacccggaagtacagcgagatggatcccaaatatttcattctcattcttttctgtggccacttaaacaacaccttcttcagtaagaccgagaccatcactactgaaaagcagtcccaacccaccctgttcaccagcagtatgagccaggtcctcgctaactcacaaaataccacaggaaaccctctgggccagccgacccaattttccgacacattttccgggcaaagcattagcccggccaaagtaaccgccggtcaacctactcccgccgtctacaccagctctgaaaaacccgaggctcatacttccgcaggacagccccttgcatataataccaagcagcctacacccatcgctaatacatcaagccagcaggcagttttcacatccgctcgccaactccctagcgcccgtactagcaccacccagccgccaaagtcctttgtttacactttcacgcagcagtcctcctcggtgcaaattccttcaaggaaacagattactgtgcataaccccagcacccagcctaccagtacagttaagaattcgccaagatcaacacccggatttatactcgatactactagtaataagcagacccctcagaagaacaattacaacagcattgcagctattctaatcggagtgctgctcacttcaatgttggtcgctatcataattattgtgctgtggaaatgcctcaggaagcccgtgctaaacgatcagaattgggccggaagatccccattcgccgatggcgaaacccctgatatatgtatggataacattagagaaaatgaaattagcacaaaaagaacaagcatcatatcactgacgccctggaaaccctccaagtccacgctcctcgcggatgacctcgaaatcaagctgtttgagtcgagcgagaatatagaagatagcaataatcccaaaacggaaaaaattaaagaccaggtgaacggtacatcagaagattcagcggatggatcgaccgtaggcaccgccgtctccagcagtgatgacgccgacttgccaccaccaccacccctactggacttagaggggcaggagtctaaccagtctgacaagccaactatgaccatcgtgtctccactgcccaatgatagcacatcactccctccgagcttagattgccttaaccaggattgtggcgaccataagtccgaaatcattcaaagtttcccgcccctcgactccctaaatttacccctccccccagtagatttcatgaagaaccaggaagatagcaatcttgagatccagtgccaggagttttcaatcccacccaacagtgatcaggatctgaatgagagtttgccaccaccaccggccgagctactttag

SEQ ID NO: 186262 - DNA, 924 bp, synthetic construct
  misc_feature 1..924: note = Description of Artificial Sequence: Synthetic coding sequence
  source 1..924: mol_type = other DNA
atgaaccaggccgagctgatgcagctggacatggagggcatgctgcagcatttccagaaggtgatcccccaccagtttgacggggttcctgataaactgattcaagccgcataccaggtgaaatataatagcaagaagatgaagaagttggagaaggagtatacaaccataaaaaccaaagaaatggaagagcaagtcgagatcaaaaggctccgcaccgaaaataggttgctcaagcagagaatcgagacactggaaaaagagtccgccagcttagcagatcgtctgatccagggccaagtaacacgtgctcaggaagcggaggagaattacctgatcaaacgggagttggcgaccattaagcaacaatctgacgaggctagtgccaagcttgagcaggccgagaataccatacgcaagctccagcaccaacagcaatggcacaaatgctcgtccaactacaatgaggactttgtcttacagcttgaaaaggaactcgtgcaggccaggctgtccgaggcagagtcccagtgtgcccttaaagaaatgcaggataaagtgctggatattgagaaaagaaataattccttacccgacgagaacaatatagccagattacaagaagagctgatcgcggtcaaacttcgcgaggctgaggcaattatggggctaaaagagcttagacagcaggttaaagatctcgaggagcactggcaacgacacctcgcacgcaccaccgggcggtggaaggaccccccaaaaaaaaacgccatgaatgagcttcaggatgagctcatgaccattcggctgcgggaggcggaaacacaagcggagatacgcgagatcaaacaacggatgatggaaatggagacacagtcaggcacctgtggccccttactgaagataattttcttcaacgcgtag

SEQ ID NO: 186263 - DNA, 2433 bp, synthetic construct
  misc_feature 1..2433: note = Description of Artificial Sequence: Synthetic coding sequence
  source 1..2433: mol_type = other DNA
atggtgaccaacaagatgaccgccgccttccggaaccccagcggcaagcaggtcgctacagataaagtagccgaaaaattgagttctacattgtcttgggtgaaaaacaccgtctctcacacagtctcccaaatggctagccaggtcgccagcccctccacctcattgcacaccacctcctcttcaaccacactttctaccccggctctctctccttctagccctagccagctgtcgcccgacgatctcgagctcctggcaaaacttgaagagcagaaccgactgctcgaaactgactccaagagcctgagaagcgtgaacgggtcaaggcggaatagcggctcctctctcgtgagtagcagcagcgccagtagtaacctgtctcatctggaggaggatagctggattttgtggggcaggatagtgaacgaatgggaggacgtgcgcaagaaaaaagagaagcaggtgaaagagttggtacacaaaggaataccccatcacttccgggctatcgtctggcaattactctgctccgcacagtctatgcctatcaaggatcagtactccgaacttctgaaaatgactagcccgtgcgaaaagctaatccggagagatatcgctcgcacctacccggagcacaatttctttaaagaaaaggacagcctggggcaagaagtgctcttcaacgtgatgaaagcctactccctggtggatagggaggtgggatactgccaggggtcagcctttatagtgggactgctgcttatgcagatgccagaggaagaagctttttgtgtgttcgtgaaactcatgcaggactatagattacgcgagctgtttaagccaagcatggcagagctcggtctctgcatgtaccaattcgagtgcatgatccaagagcatctgccagaattattcgtgcactttcaaagccagtccttccacacgagcatgtacgccagtagctggttcctcactatattcctgacaacatttcccctgccaatcgccacacggatctttgatatctttatgtccgagggtctcgagattgtgttcagggtcgggttagctctactgcaaatgaaccaggctgaactcatgcaattagatatggagggcatgctgcagcacttccaaaaggtgatcccacaccagttcgacggagttcccgataaactcatccaagcggcctatcaggtgaaatataattccaaaaagatgaagaaattggagaaagagtacacaaccataaaaacaaaggaaatggaagagcaagtcgaaattaagaggctgagaactgaaaatagactgctcaaacaacggatagaaactctggagaaacataagtgctctagcaattataacgaggacttcgtgctccaactcgaaaaagaactggttcaggcccggctatccgaggcagagtcacaatgcgccttgaaagaaatgcaagataaggtgctggacatcgaaaagagaaataatagcctgcctgatgaaaacaacatcgctagactgcaagaagaactcattgccgttaagcttagggaggccgaagctattatgggattgaaggagttgagacagcaagtcaaagacttggaggaacactggcagcggcatcttgctcgtaccaccggccggtggaaagatccacctaagaagaacgccatgaatgaactgcaggatgaactcatgacgattagactgcgggaagccgagacacaggcagaaattagagagatcaagcagaggatgatggagatggagacgcagaatcaaattaattcaaatcacctacgccgcgccgagcaagaagtgatatccctgcaggagaaggtgcaatacctcagcgcacagaataaggggcttctgacacagctgagtgaggccaagcggaaacaagccgagattgagtgtaaaaataaagaggaagtgatggcggtgcgactccgggaagccgacagcattgcggccgtagcagaactgaggcaacatatcgccgaactggaaatccaaaaagaagaaggtaagctgcagggtcaactgaataagtcagattctaatcaatacataggggagctgaaagaccagatcgctgagctgaatcacgaacttagatgtctaaaggggcagagaggcttttcaggccagccaccttttgacgggatccacatcgttaaccacctgatcggagacgacgaatcattccactccagcgacgaggacttcattgataactccctgcaagaaacgggcgtgggattcccgctacacggcaagtccggatcaatgtcactcgatcccgctgtggcagatggctccgaaagtgagactgaagacagcgttctggagacgcgggagtcaaaccaggtggtgcaaaaggagagaccaccaaggaggcgggagtcatattcaacaaccgtctag

SEQ ID NO: 186264 - DNA, 2433 bp, synthetic construct
  misc_feature 1..2433: note = Description of Artificial Sequence: Synthetic coding sequence
  source 1..2433: mol_type = other DNA
atggtgaccaacaagatgaccgccgccttccggaaccccagcggcaagcaggtggccactgacaaagttgcggaaaaactctcttcaactctctcatgggtcaaaaacaccgtatctcacactgtcagtcagatggcttcacaggtggcaagtcccagtacttccctccatactacgtctagttccaccactctatcaactccggccctgagcccatctagccctagtcagctcagcccagacgacctggagctgctcgctaagttagaagagcagaatcgcttactcgagacagatagcaaatccttgagaagtgttaacggctccaggcgcaatagcggaagctctctggtgagctcctccagtgcctcaagcaacctctcgcatttagaggaagactcttggatcctctggggcaggatcgtcaacgaatgggaggatgttaggaagaagaaagagaaacaggtcaaagagttggtgcacaaagggattccacaccacttccgcgccattgtgtggcaactgctgtgctcagcacagtctatgccaattaaggaccaatacagcgagctacttaagatgacatccccctgcgaaaagctgataagaagggacatcgcccgcacataccctgaacacaatttttttaaggagaaagatagcctcgggcaggaggtgctgtttaacgttatgaaagcctacagcctggtcgaccgagaagtgggatattgtcaggggagcgcttttatagtcggactgcttctcatgcagatgccggaggaggaggcgttctgtgtgtttgtgaaactgatgcaggattacaggctgagggaattgtttaagccaagtatggccgagcttggtctctgtatgtaccagtttgagtgtatgattcaggagcatctgccagaattgtttgtccatttccaatcccagtcatttcacactagcatgtacgcttcctcatggttcctcactatatttcttactacctttcccttgccaatcgcaacacgaattttcgacatctttatgagtgaaggactcgaaattgttttcagggtgggccttgccctgctccagatgaatcaggcagagctgatgcagctcgacatggaagggatgctccaacacttccagaaagtcatacctcaccaatttgacggagtgcctgataagctgattcaagccgcttaccaggtcaagtacaacagtaagaagatgaaaaagctagagaaagaatatacaaccataaagacaaaggagatggaagaacaagttgaaatcaaacgcctgcgcaccgaaaacagactgttgaagcagcgcatagagaccttggagaaacataaatgcagttctaattataacgaggattttgtcctccaactggagaaagagctcgtacaggctcggttatctgaagctgagtcccagtgcgcactcaaagaaatgcaggataaagtccttgacatagaaaaacggaataactcgctgcctgacgagaataatattgcccgcctgcaagaggaattaattgccgttaaactgagggaggccgaagctatcatgggcttaaaagagctgcggcagcaggttaaggacctcgaggaacactggcagagacaccttgcacgtaccacgggccggtggaaagaccccccaaaaaaaaacgctatgaacgagctgcaggacgagctcatgacgattcgcctacgggaagctgagactcaagccgaaattcgggagattaagcagcgaatgatggaaatggaaacccaaaatcagatcaactcgaaccaccttagaagggccgaacaggaggttattagcttgcaggaaaaggttcagtatctgtccgcccagaataaaggactgctgacccaactgagcgaggccaagcggaagcaagcggaaatagaatgtaagaacaaggaggaggtgatggccgtcaggttgcgggaagcggatagcatcgccgcagtggccgagcttcggcagcacattgcggagctggaaatccagaaggaagaagggaaactgcagggacagctcaacaagagcgacagtaaccagtatatcggtgagttaaaagaccagattgctgagctcaatcatgaattgcggtgcctgaagggccagagaggcttttctggtcagcctccattcgacggcattcacatcgttaatcacctgatcggtgatgacgaatcctttcattcatctgacgaggatttcatcgataattctctgcaggagactggtgttggcttccctctgcacgggaaatctgggagcatgtcactcgatccagctgtggctgacggatcagaaagcgagacagaagatagtgtgctggagactagagaatctaatcaggtggtgcaaaaagagcggcccccccgtcggcgtgagtcctattcaactaccgtttag

SEQ ID NO: 186265 - DNA, 2466 bp, synthetic construct
  misc_feature 1..2466: note = Description of Artificial Sequence: Synthetic coding sequence
  source 1..2466: mol_type = other DNA
atggtgaccaacaagatgaccgccgccttccggaaccccagcggcaaacaggtggcaaccgataaagtggccgaaaagctgagctctactctgagctgggttaagaacacagttagtcataccgtgagtcagatggccagccaggtcgcatcccccagcactagtctgcacactactagttcctcaactacccttagtactccagcgttaagcccgagcagcccgtcacagctgtccccagacgatttggagcttctcgcaaaactggaggagcagaacagattactcgaaacagactccaaatccctccgcagcgtaaatgggtcacgtagaaactctggatcaagcctggttagtagctcttcagctagtagcaacctgagtcacctcgaggaggacagctggatcctgtgggggaggattgtaaatgaatgggaagatgtgagaaaaaagaaggaaaaacaagtgaaggaactggtacataagggaatccctcaccactttagagccatagtatggcagctactgtgctctgcacagtctatgcccataaaggaccaatactccgagttgctcaaaatgacaagtccatgcgagaaattgatcaggagagatatcgccaggacataccctgagcacaacttctttaaggagaaggacagcttaggccaggaagttttgttcaacgtcatgaaagcgtactcccttgttgatcgcgaagtcggttactgccagggctctgcgtttatcgtgggactgctattaatgcagatgcccgaagaggaggccttttgcgtctttgttaagttgatgcaggactaccggctgcgcgagctgttcaagccctctatggccgagctgggcttgtgtatgtaccagttcgaatgcatgatccaagagcatttgccagagctgttcgttcatttccaaagtcagtcattccacacatccatgtatgcaagttcatggtttttgaccatctttctcactacttttccactgcccattgccacccggattttcgatatctttatgtccgaaggcctggagatagttttcagagtaggcctagccctgttgcaaatgaaccaagcagagctgatgcagctggatatggaggggatgcttcagcacttccagaaggtgatcccgcatcagtttgacggtgtgcccgacaaattaatacaggcggcttaccaggttaaatacaactccaaaaagatgaaaaaattggagaaggaatataccacaattaagaccaaagaaatggaagagcaggttgagatcaagagactgagaactgaaaataggctgctgaagcagcgcatagaaacactggaaaaggaatcggcgtccctggctgatcgattgatccagcataaatgttctagcaattataacgaggactttgtgctgcagctagaaaaagaactcgtgcaggcacgcctgtctgaagccgaaagtcagtgcgcgttgaaagaaatgcaggataaggtgctggacatcgagaagcgcaataactccctccctgacgagaataatattgccaggttgcaagaagagcttattgccgtgaaactgcgcgaggctgaggccattatggggcttaaggagctgcgacagcaggttaaggacctcgaggagcattggcagagacatctggcgaggacgaccggaaggtggaaggacccccccaagaaaaatgccatgaatgagctgcaggatgagctaatgaccatccggctgcgtgaagcagaaacccaggccgagatcagggagattaagcaacgaatgatggagatggaaacacagaaccaaatcaactctaaccacctgcgcagagcggaacaggaagtaatttccctgcaggagaaggtgcagtacctgtccgcccagaataagggtttgttaacccaactgtcggaagcgaagcgtaaacaggctgagatagagtgtaaaaacaaggaggaagtcatggcggtccggctgcgtgaggccgatagcatcgccgctgtggctgaattgagacagcacatcgccgaattagaaatccaaaaagaggagggcaagctgcaaggacaattgaataagtccgactctaaccagtacatcggtgaactgaaagaccagattgcagaattgaaccatgagctacgctgcctgaagggacagcgaggtttttccgggcagccgccgttcgatgggatacatatagtgaatcacctgataggcgatgatgaatcattccatagctccgacgaagacttcattgataactccctccaggagactggcgtaggttttccccttcatggtaagagtgggtctatgtcactggaccctgctgtggccgacggcagcgagtcagagactgaagactccgtgctggagaccagagaaagcaatcaggtggttcagaaggaaagaccgcctaggcgccgggagagctatagcacaacagtatag

SEQ ID NO: 186266 - DNA, 891 bp, synthetic construct
  misc_feature 1..891: note = Description of Artificial Sequence: Synthetic coding sequence
  source 1..891: mol_type = other DNA
atgagctgggtgcaggccaccctgctggcccggggcctgtgccgggcctgggggggcacctgcggagctgctctgaccggcacttctatttcgcaagtgcctcgccggctgccacgcggcttgcactgtagtgcggcagcccactccagcgagcagtccttggtccccagccctcccgaaccacggcagcggcctacaaaggcattggttcccttcgaagatctcttcggccaggcacccgggggagaaagggacaaggccagcttcctacagacagttcaaaagtttgccgagcactctgttagaaagcggggtcacattgacttcatttacctggctctgcggaagatgagagaatatggtgtcgaaagggaccttgctgtgtataatcagctcttgaacatctttcctaaggaggtgtttcggccacggaatattatacaaagaatcttcgttcactacccgcgccaacaagaatgtggcatcgcggtgctcgagcagatggaaaatcatggcgtgatgccaaataaagagaccgagttcctgttgatacagattttcggccgcaagagctacccaatgctgaagttggtacgtctgaaactttggttcccacggtttatgaatgtgaatcctttccccgtgcccagagatctgccacaagatcccgtcgagctggccatgttcggacttaggcatatggagcctgatctgagcgcccgggtaacaatatatcaggttcccctcccgaaagactccactggggcagcagaccctccacaacctcacatagtgggatcaggtcgcgacgccggaggagtggagcccctgctgcccgacgccgcagggccaggtgtgtgcgaagagtggctggggcagcttagggtgtag

SEQ ID NO: 186267 - DNA, 1296 bp, synthetic construct
  misc_feature 1..1296: note = Description of Artificial Sequence: Synthetic coding sequence
  source 1..1296: mol_type = other DNA
atgagctgggtgcaggccaccctgctggcccggggcctgtgccgggcgtggggtggtacctgtggagccgctctgactggcacatccattagccaggtgcccagacggttgcctcgcgggttgcactgctcggctgcagctcactcatctgaacagtctctcgttccaagcccgcccgagccccgccagagaccgaccaaggctcttgtccccttcgaagatctgttcggacaagctccaggaggtgagcgggacaaagcttctttcctgcagaccgtgcagaaattcgcagagcactcagtgagaaagcgtggccacatcgacttcatctatctggcgttaagaaagatgagggagtacggcgttgagagagacctagctgtctataatcaactgttaaatatttttccaaaggaagtcttccggcctagaaacataatccagcggatcttcgttcattatcctagacaacaggagtgtggaatcgccgtgctggaacaaatggaaaaccacggggttatgcctaacaaagaaacagaattcctgttgatccagatctttggacgtaagagctatcccatgctcaaactggtcaggctaaagttatggtttccaagattcatgaatgtgaacccatttccagtaccacgggaccttccccaggacccagtcgaattggccatgttcgggctgcggcacatggaaccagatctgtccgcgagggtgaccatataccaggtacccctgccgaaggattctaccggcgcagccgatccgccccagccacatattgttgggatccagagccccgaccagcaagccgctctcgctagacacaaccccgctaggcccgtgtttgtcgagggacctttcagtctttggctgcgaaataaatgtgtgtattatcatatcctacgggccgacctgctccccccagaggagcgagaagtcgaggagacccccgaagaatggaacttgtactatcccatgcagttggatcttgagtacgtcagaagcggctgggacaattacgaatttgatattaacgaggtggaggagggcccagtatttgctatgtgtatggccggagcccacgaccaagctacaatggctaagtggatccaggggctacaggagaccaatcctactctggcacagattccggtggtctttcgattggccggaagcacgagggagctgcagacttcctcagcaggccttgaagaacccccattacctgaggaccaccaggaggaggatgacaacctgcagcggcagcagcaaggtcagagttag

SEQ ID NO: 186268 - DNA, 654 bp, synthetic construct
  misc_feature 1..654: note = Description of Artificial Sequence: Synthetic coding sequence
  source 1..654: mol_type = other DNA
atgagctgggtgcaggccaccctgctggcccggggcctgtgccgggcctggggggggacgtgtggagccgccctcactggcactagcatttcgcaggtgcccctgccaaaagattctacaggcgccgccgaccccccgcagccacacatcgttggcattcagtcccccgaccaacaggctgcgctagctcgacataaccctgctcggcctgtctttgtcgagggacctttcagcctatggctgaggaataagtgtgtctattatcacatcctacgcgcggacctcctgccaccggaggagcgtgaagtcgaagaaacccccgaggaatggaacctttactaccctatgcagttagatctggagtatgttcgcagtgggtgggataactacgagtttgacattaacgaggttgaggagggtcccgtgttcgccatgtgtatggccggggcccacgatcaagcgacaatggccaaatggattcagggcttgcaggagacaaatcctacattggctcagatccctgtcgtcttcaggttagcaggcagtacaagggagctccagaccagctctgccggcctggaggaaccccccttgccagaggatcatcaagaagaggatgacaacttgcaaagacagcaacagggacagagctag

SEQ ID NO: 186269 - DNA, 891 bp, synthetic construct
  misc_feature 1..891: note = Description of Artificial Sequence: Synthetic coding sequence
  source 1..891: mol_type = other DNA
atgagctgggtgcaggccaccctgctggcccggggcctgtgccgggcttggggagggacttgcggcgccgctctgacaggaacttccatatcacaggtgcctcggagactgcccaggggcctgcactgcagcgctgcagcccatagctctgaacaaagcctggtcccaagtcctccagaaccacgccagcgaccgaccaaggctctcgttccgttcgaagacctgtttgggcaggccccgggtggcgaaagagataaggccagtttcctgcaaactgttcaaaaattcgcggagcattccgtgcggaagcgcggccacatcgatttcatctatctggccctcagaaaaatgagggagtatggagtagaaagagatctcgctgtttacaaccagctcctgaacatttttccgaaagaggtgtttcgtccccggaatataatccagcgaatcttcgtgcactacccccgccagcaagaatgcgggattgcagttctggagcaaatggagaaccacggggtgatgccgaacaaggaaactgaattcttgctcattcagattttcggtcgtaaaagctatcctatgctcaagctcgtacgccttaaactttggttccccagatttatgaatgtgaatccgttccccgtccctagagacttgcctcaggatccagtggagcttgccatgtttggattgcgacacatggagccagacctcagtgccagggtgactatctaccaggtcccccttcccaaggactcgaccggggctgctgatccccctcagcctcatatcgttgagctaacttgctgcccaaggcggcgaggaaagtggaagaggcgtcggcggtctggtaccagcactactagatgcagctggacatggtcgatgtag

SEQ ID NO: 186270 - DNA, 1770 bp, synthetic construct
  misc_feature 1..1770: note = Description of Artificial Sequence: Synthetic coding sequence
  source 1..1770: mol_type = other DNA
atgagcgtgagcgtgcacgagaaccggaagagccgggccagcagcggcagcattaatatctatctcttccacaagtcctcctatgccgatagcgtgctcacacacttaaacttactgcgccagcagcgcctcttcactgatgtgttgttgcatgcaggaaatcgcactttcccctgtcaccgcgccgtgctggcggcttgttcccgatactttgaggctatgttttcgggtgggctgaaagagagccaggattccgaagtgaatttcgacaacagtatacacccagaagtgctggagctgctccttgattatgcctattccagcagagtaatcatcaacgaagagaatgccgaatcactgctcgaggctggtgatatgctagagttccaagacattcgtgacgcttgcgcagagtttttggagaagaatctgcacccaaccaattgcctgggaatgttgctgttgagtgatgctcatcagtgcaccaaactgtacgagttatcgtggcgcatgtgtctgagcaactttcagacgattcgcaagaatgaggattttctgcagctgccacaggatatggtagtccagctgctgagttctgaggaactcgaaaccgaagatgaacgactcgtgtacgagtccgccattaactggatctcttacgacctaaaaaagaggtattgttacctgcccgaactgcttcagaccgttcgcctggcactcctaccagcaatttacttgatggagaatgtggccatggaagagcttatcacaaagcagcgcaagagtaaggagatcgtcgaagaggccatcaggtgcaagctgaaaatattacaaaacgacggtgtggtgaccagcttatgtgctaggccacggaagacaggccacgctctcttcctgctgggaggccagacgttcatgtgcgacaaactgtacctggtcgaccaaaaagccaaggaaatcattcccaaggctgacatcccgagcccccgcaaagaattctccgcctgtgcaataggctgtaaggtgtatataacggggggtcggggatcagagaacggcgtgtccaaggacgtttgggtctacgatactcttcatgaagagtggagcaaggctgctcctatgctggtcgcccgttttgggcacggctcagctgagctgaagcattgcttatacgtggttggcggccacacagccgcgactggttgtctgcccgcgtcaccaagcgtgtccctcaagcaggtcgagcattacgaccctacaatcaacaaatggaccatggtcgcgcccctccgcgagggtgtctctaacgcggctgttgtcagtgcaaaactgaaactgtttgcgttcgggggaaccagcgtgtcacacgacaagctgccgaaggtgcagtgctacgatcaatgcgagaacaggtggacagtccccgccacctgtccacagccctggaggtatacggctgcagcagtgcttggtaatcagattttcattatgggaggcgacaccgaattcagcgcgtgcagtgcgtacaagttcaatagcgaaacctaccagtggaccaaagtcggagatgtgactgccaagcgcatgagctgccacgcagtggcgtcaggaaataaactgtatgttgtgggcggctatttcggcattcagcggtgcaagacactcgattgctatgacccgaccctggatgtgtggaatagtatcacaacagtgccctactccctcatcccaacggccttcgtgagtacttggaagcacttgcccagctag

SEQ ID NO: 186271 - DNA, 153 bp, synthetic construct
  misc_feature 1..153: note = Description of Artificial Sequence: Synthetic coding sequence
  source 1..153: mol_type = other DNA
atgagcgtgagcgtgcacgagaaccggaagagccgggccagcagcgggagcataaatatctatttgttccacaagtccagctacgctgattctgtcctgacccatttaaatctgctgaggcagcaacgcttgttcacagacgtcttactttag

SEQ ID NO: 186272 - DNA, 15 bp, synthetic construct
  misc_feature 1..15: note = Description of Artificial Sequence: Synthetic coding sequence
  source 1..15: mol_type = other DNA
atgagcgtgagctag

SEQ ID NO: 186273 - DNA, 1770 bp, synthetic construct
  misc_feature 1..1770: note = Description of Artificial Sequence: Synthetic coding sequence
  source 1..1770: mol_type = other DNA
atgagcgtgagcgtgcacgagaaccggaagagccgggccagcagcggcagcattaatatctacctgttccacaaatcgagctatgcagactcagtccttactcatttgaatctgcttagacagcagcgactgtttacagacgtgctgctccatgccggcaaccgcacctttccatgccaccgggcggtgttggccgcctgttccaggtatttcgaagctatgttctcggggggacttaaggaaagccaagattctgaagttaatttcgacaacagtatccaccctgaagtgctggagcttctgctcgattacgcttactcatcacgagtgatcatcaacgaggagaacgccgagtccctgttggaggcaggagatatgctggaattccaggacatcagagacgcttgcgcagagttcctggaaaagaacctgcaccccaccaattgtcttggcatgctgctgctgtccgacgctcaccaatgcacaaaactgtacgagttgtcttggagaatgtgtctgtcaaactttcagacaatacggaagaacgaagattttttgcaattaccccaggacatggtggtgcagctactcagttcagaagagctggagactgaggacgagagactcgtgtacgaaagtgccatcaattggatctcctacgatctgaaaaagaggtattgttatctgcccgagttgctgcagacagttagattggcactgttgcccgctatctacctgatggagaacgtggccatggaggagctcatcaccaagcaacgaaagtctaaggagatcgtcgaggaggccattaggtgcaagttaaagattcttcagaacgacggtgtggttacatctctgtgcgcccgcccgcgcaaaacaggtcatgccttgttcttgctaggaggacagacctttatgtgcgacaaactgtacctcgtggaccaaaaggccaaagagatcatccctaaagccgatatccctagcccacggaaggaattcagtgcctgcgccattggttgcaaggtctatatcactggggggcgggggagcgagaacggcgtatctaaggacgtatgggtatacgacactttgcatgaggaatggtccaaggctgctcctatgctcgtggcccgcttcggccacggctctgctgagctcaagcactgcctgtatgtggtcggaggccatacggccgccacgggatgtttgccagccagcccaagtgtgtctctgaagcaggtagagcattacgatccaactattaataaatggaccatggtggccccactgagagaaggggtgtccaatgccgccgtagtgagcgccaaactcaagctttttgcttttgggggcacctctgtgagccatgacaaattgcctaaggttcaatgttatgaccagtgcgagaaccgttggaccgttccagccacttgcccgcaaccctggcggtacacagctgcagccgttctggggaatcagatcttcattatggggggagacactgaattttccgcctgttcagcgtataagtttaattcagagacctaccagtggacaaaagtgggcgacgtcaccgccaagcgcatgtcttgccacgctgttgcctcagggaataagttgtatgtagtcggaggctacttcgggattcagagatgcaagaccctggactgctatgatccgactctcgatgtgtggaactccataactactgtcccttactcattgattcccacggcgttcgtgtccacgtggaaacatctccccagctag

SEQ ID NO: 186274 - DNA, 1551 bp, synthetic construct
  misc_feature 1..1551: note = Description of Artificial Sequence: Synthetic coding sequence
  source 1..1551: mol_type = other DNA
atgttcagcggcggcctgaaggagagccaggacagcgaggtgaacttcgacaacagtattcatcctgaagtcctagaacttttgctagattatgcttacagctctagggtcatcatcaatgaggaaaacgcagaatccctgttggaagccggcgacatgctggagtttcaagatatcagagacgcctgtgcagagtttctggaaaagaatcttcacccgaccaactgcctcggtatgcttctgctcagtgacgcccaccagtgcacaaaactgtatgagctctcctggcgcatgtgcttgtccaacttccagactataaggaagaacgaagacttcctgcaactcccacaggatatggtggttcagctgctgagcagcgaggaactggagaccgaagatgaacggcttgtctacgaaagcgcgatcaactggatcagctatgacttgaagaagcgctattgctatctgcccgaactcctacagactgttaggctcgcactattgcccgcgatatacttgatggagaacgtcgctatggaggagctgatcactaaacagaggaagtccaaggagattgtcgaggaggccatacgctgtaagctgaagatcttacagaatgatggagtggtcacaagtctgtgcgcacgtcctcggaagacaggccacgctctgttcctgttgggaggacagacattcatgtgcgacaagctgtacctggtggaccagaaagcaaaggagataatccctaaggctgatattccaagcccacgcaaagagttttctgcctgtgctatcgggtgtaaggtttacatcactgggggccgcggcagtgaaaacggtgtctccaaagatgtctgggtgtatgatactctgcatgaggagtggagtaaagccgccccaatgctcgtggctaggttcggtcacgggagtgcagagcttaagcactgcctgtacgtcgtgggcggccacaccgctgctacaggatgcctgcctgcttcgccatccgtaagtctgaagcaagtggaacactatgatcctaccatcaataagtggaccatggtcgctccactccgggaaggcgtaagcaacgccgcggttgtcagtgcgaaactcaagttatttgccttcggcggaacatcggtctcacatgacaaactgcccaaggtgcaatgctatgatcagtgcgaaaaccgatggaccgtgccagcaacgtgtccccagccttggaggtatactgccgccgccgtgcttggcaatcagatttttatcatgggcggtgacacagaattctctgcgtgttccgcttacaagttcaactccgagacctaccagtggacgaaagttggagacgtcacagccaaaagaatgagctgccacgccgtcgcttccggcaacaagctgtacgtggtggggggatactttggaatacaaaggtgcaaaaccctcgactgttatgatcctaccctagacgtgtggaacagcattactactgttccgtactctctgatacctactgcattcgtgtcaacttggaaacatcttccctcatag

SEQ ID NO: 186275 - DNA, 1932 bp, synthetic construct
  misc_feature 1..1932: note = Description of Artificial Sequence: Synthetic coding sequence
  source 1..1932: mol_type = other DNA
atggtggacgccggcggcgtggagaacatcacccagctgccccaggagctgccccagatgatggcagcagcggccgacggcctgggcagtatagcaattgacacaacacagttgaacatgtctgtaacagaccccacagcctgggcaactgccatgaacaacttgggcatggtgcccgtgggactgccgggccagcagctggtctccgactctatttgtgttccagggttcgacccatccctgaacatgatgacaggcatcacaccaatcaatcctatgattcctgggctggggctggtgccacctcctcctccaactgaggtggctgtcgtgaaagagattattcattgtaagagttgcacccttttcccgcaaaacccaaatctgccaccaccgtccacaagagagcgacccccgggctgcaagacagtgtttgtggggggattaccggaaaatgcaaccgaggagattatccaggaggtgttcgagcagtgtggcgacatcactgccatccgcaaatccaaaaagaatttctgccatattagattcgcagaggaatttatggtggacaaagccatttatctctctggctaccggatgcggttgggaagctccactgataagaaggattccggtcggctgcatgtcgactttgcccaggccagggatgatttttacgaatgggagtgtaagcaacgaatgcgggcccgagaggaacgccatcggcgcaaacttgaggaggaccggctgaggcctccaagccccccagctatcatgcactatagtgagcatgaggcagcgttgttggccgagaagctgaaggatgatagtaaattttccgaggccattacagtgctgctgtcatggattgagaggggggaagtgaaccgccgatctgccaaccagttttactcaatggtgcagagcgcaaactctcacgtccggcggctgatgaacgaaaaggctacacacgaacaggaaatggaagaggcgaaggagaatttcaagaatgccctcaccggtatccttacccagttcgaacaaattgtggcggtgttcaatgcctctacgaggcaaaaggcgtgggaccattttagtaaggcccagcgcaagaatatcgacatttggaggaaacattcagaggaactgcgtaatgctcagtcagaacaactcatgggcatccgtagggaagaggaaatggaaatgtcagacgacgagaactgcgactctcccaccaagaagatgagagtggatgagagtgcattagcagctcaggcatatgcacttaaggaggaaaacgacagcctccgctggcagctggatgcttaccgaaacgaagtagaactactaaaacaggagaaagagcagctatttagaactgaggagaacctgacgaaggatcaacagctccagttcttacagcagaccatgcaagggatgcagcaacagctcctcaccatacaggaggaactcaacaacaagaagtctgaactagagcaggcgaaagaggagcaatcccatacacaggctctgcttaaagtcttgcaggaacaactcaagggaactaaagagctggtagaaactaatgggcattcacatgaggacagtaacgagataaacgtgctcacagtggctctggttaatcaggacagagagaataatatcgagaagaggtcacagggcctcaagtctgagaaagaagctctgcttattggaattatcagcacatttctgcatgtgcaccccttcggggctaacattgagtacttatggagttacatgcagcagctagactccaagatttctgctaacgagatcgaaatgctactgatgcggttaccccgtatgttcaagcaggagttcacgggcgttggagctaccctggaaaagcggtggaaactctgcgcctttgaaggaattaagaccacctag

SEQ ID NO: 186276 - DNA, 1932 bp, synthetic construct
  misc_feature 1..1932: note = Description of Artificial Sequence: Synthetic coding sequence
  source 1..1932: mol_type = other DNA
atggtggacgccggcggcgtggagaacatcacccagctgccccaggagctgccgcaaatgatggcagcagccgccgacggcctggggtccatagcaattgataccactcaattgaatatgtccgtcactgacccgacagcctgggcaaccgctatgaataaccttggaatggttccagtcggtctgccggggcagcagttggtgtcagattccatatgcgtccccggcttcgacccgtccctgaatatgatgacagggatcacaccaataaatccaatgatccccggcctcggcctggtaccacctcctccccctactgaggtagccgtcgtgaaggagatcattcattgcaaatcttgcaccttgtttccccagaatccgaacttgcccccccccagcaccagggagcggcctcctggctgtaagactgtttttgtcggcgggctgccagagaatgccacggaggagattattcaggaagtctttgagcagtgcggagatataacggccatcaggaaaagcaaaaagaacttttgccacatccgcttcgctgaggagttcatggtcgacaaagcaatctatctttcaggctataggatgcgcctcggttcttccacagataagaaggacagcggcagattgcatgtggacttcgctcaggccagggatgatttctacgagtgggaatgtaagcagaggatgcgtgctcgcgaagagaggcaccggaggaagctggaggaggacagactgcgtcctcccagtccacccgccatcatgcactactccgagcacgaggctgcattgctcgcagaaaagctgaaggacgattctaagtttagcgaagccattactgtgctgctatcttggatcgagcggggtgaagtgaaccgtcgatccgccaaccagttttactctatggtacagtcagccaattctcatgtgcggcgcctgatgaacgagaaagcaacacacgagcaggaaatggaggaggccaaggagaatttcaaaaacgccttgactggcattctgacccagtttgagcagattgttgctgtttttaatgccagtaccaggcagaaagcttgggaccacttctctaaggcgcaacgaaaaaacattgacatctggaggaagcattccgaggagctccgcaacgcgcaatctgagcagctgatgggaattaggcgagaggaggagatggaaatgtccgacgatgagaattgcgacagccctacaaagaagatgagggtggacgagtcagcgctagccgctcaggcttacgctctcaaggaggaaaacgacagtctcagatggcagctggatgcatatagaaacgaagtcgaattacttaagcaggaaaaggagcagctgttccggactgaggaaaatctcactaaagaccaacagctgcagtttctccagcagaccatgcagggcatgcaacagcaacttttgacaatacaggaagagctgaataacaagaagagcgaattggaacaggccaaggaagaacagagtcacacacaggctctcctaaaggttctgcaagagcaactgaaggggaccaaggagttggtggaaaccaatggacatagtcatgaagacagtaatgaaatcaatgttcttaccgtcgccctcgtcaaccaggatcgggaaaacaacatagagaaaaggtcccaagggctcaaatctgaaaaagaagcactgctgatcggtatcatctctactttcctgcatgttcatccctttggagccaacatagagtatctctggtcttatatgcagcagttggatagcaaaattagtgccaacgagatcgagatgctgttgatgagactgcccagaatgttcaaacaggagtttacgggagtcggcgcgacattggagaagcggtggaagttgtgtgccttcgaggggatcaagacaacctag

SEQ ID NO: 186277 - DNA, 708 bp, synthetic construct
  misc_feature 1..708: note = Description of Artificial Sequence: Synthetic coding sequence
  source 1..708: mol_type = other DNA
atggtggacaaggccatctacctgagcggctaccggatgcggctggggtccagcacagataagaaagattcgggcaggctccacgtggacttcgcccaagccagggatgacttctacgagtgggaatgtaagcaacggatgcgggcacgggaagagaggcaccggcgaaagttggaagaggatcgactgcggcccccgagtccacccgcgattatgcattattctgaacatgaggccgctcttctggctgagaaactgaaggacgactcgaagttctcagaagctatcaccgtcctgctcagttggatcgaacggggcgaggtgaatagaaggagcgccaatcagttttacagtatggtccagtccgccaattctcatgtgaggaggctcatgaatgaaaaggccactcatgagcaggaaatggaagaggccaaagagaactttaaaaacgctctaacagggatcctgacccagtttgaacagatagtggcagtttttaatgccagcacccgccagaaggcctgggaccacttttctaaggcacaaaggaagaacatcgatatctggagaaagcattcagaagagctacgcaacgcccagagtgagcagttgatggggatccgaagggaggaagagatggaaatgtcagacgacgagaactgtgactcaccgactaaaaaaatgagggtggatgagagtggagcatag

SEQ ID NO: 186278 - DNA, 1833 bp, synthetic construct
  misc_feature 1..1833: note = Description of Artificial Sequence: Synthetic coding sequence
  source 1..1833: mol_type = other DNA
atgcagcgggacttccggtggctgtgggtgtacgagatcggctacgccgccgataattccagaacactgaacgtggatagcacggcaatgactctgcctatgtccgatcctacagcctgggcaactgctatgaataacctgggcatggctcccttaggtatcgccggtcagcccatcctccctgacttcgatcccgccttgggaatgatgacgggtatccctcctatcacgcctatgatgccaggcctcggcattgttccacctccgattcctcctgacatgccggtagttaaagaaatcatccattgcaagtcctgtactttgtttccgccaaacccaaacctgcctcctccagccacaagagaacgcccaccagggtgcaagaccgtctttgttggcgggcttcctgagaatggcacagaacaaatcatcgtggaggtctttgaacaatgcggcgagatcatcgcgattaggaagtccaagaagaatttttgccatatacgattcgcggaagagtacatggttgataaggccctgtacctaagtggctatcgcattcggctggggtcttcgactgataagaaagatacaggacgattgcatgttgacttcgcccaggccagagacgacctttatgaatgggaatgcaaacagagaatgctggctagagaagagcggcatcggaggcgaatggaagaggagcgcctcagaccaccttctcccccccccgtggtacactattcagatcacgaatgctctatagtggcagagaagctgaaggatgactctaagttctctgaggccgtgcaaacccttcttacatggatcgagcgcggcgaggtgaatcgcagatctgctaataatttctattcgatgattcagtccgctaacagccacgtccggcgcctggtgaacgaaaaagccgcccatgaaaaggacatggaggaggccaaagagaagtttaaacaagccctatccgggatcctcatccagtttgagcagattgtggcagtgtaccatagcgcctccaagcaaaaggcctgggatcacttcactaaggcccagcggaaaaacatcagtgtttggtgcaagcaagccgaggagatcaggaacattcacaatgatgaactcatgggtatacgcagagaagaagaaatggaaatgtcagatgatgagatcgaggaaatgacagaaacgaaggagaccgaagaaagcgccctcgtcagtcaagctgaggccctgaaagaggagaacgattcgcttagatggcagctggatgcctataggaacgaagttgagttgctaaagcaagaacaaggaaaagttcacagggaagacgacccaaataaggagcagcaattgaagctactccagcaagcactacaggggatgcagcagcatctcttaaaggtgcaggaggagtacaaaaagaaagaagcggaactcgaaaagctgaaagatgacaaactgcaggtcgagaagatgctggagaacctgaaagagaaagagagctgtgcgagtaggctttgtgctagtaaccaggatagcgaatacccacttgagaagaccatgaatagcagtccgattaagtccgaacgcgaggctttactggtcgggattatctctactttcctgcatgtgcacccctttggagcctcaatcgaatatatctgtagctacctccacagacttgacaataagatttgcacttccgatgttgagtgtttaatgggccgactccagcacaccttcaaacaggagatgacaggcgtgggcgcatccttggaaaaaaggtggaagttctgtggctttgagggcttaaagctaacctag

SEQ ID NO: 186279 - DNA, 1917 bp, synthetic construct
  misc_feature 1..1917: note = Description of Artificial Sequence: Synthetic coding sequence
  source 1..1917: mol_type = other DNA
ctgcccttcgaccccgccaacaacaacgagcccctgcagttcggctcggcaagtggtcccttggttaccgaagggctgatcgagaatggcggcgagtcttccaaaaaaaggaagaggacgaatacccccagtgcagacaattcacgcaccctgaacgttgactccacggcaatgacgctccctatgagcgatccaaccgcgtgggccaccgctatgaataatctggggatggcgccactgggcatcgctgggcaaccaatcctccctgactttgaccccgctttgggaatgatgacaggcatcccaccaataacaccaatgatgccaggcttagggattgtacctccgcccatcccacctgacatgcctgtggtaaaagaaattatccactgcaaaagctgtaccttgtttcctcccaatccaaacctgcccccgcccgccacccgtgagcgcccccctggctgtaaaacagtgtttgttggagggctccctgagaatggtactgaacaaatcattgtcgaggtgtttgagcaatgcggggaaatcattgcgatccggaaatcaaagaagaacttttgtcacattagattcgccgaggaatacatggttgacaaggctctgtacctgtctgggtatcggattaggttggggtcaagcactgacaagaaagacacggggcggctgcacgtcgatttcgctcaagctcgagacgatctgtatgagtgggagtgtaagcagagaatgctcgctcgcgaggagaggcatcggcgaaggatggaggaagagcgtttaaggcccccaagccctcctccagtggtccactacagcgaccatgagtgctccatcgtcgctgaaaagctgaaagacgatagtaaattttctgaagccgttcagactttgcttacctggatagaacgcggcgaagttaataggcgctcggccaacaatttttacagcatgatccagagcgctaatagccatgtgcggcgacttgtgaacgagaaggccgcccacgaaaaggacatggaggaggccaaagagaagtttaagcaggctctgtcaggcattctgatccagttcgaacagatcgtagccgtgtaccatagcgccagcaaacagaaggcctgggatcactttaccaaagctcagcgtaagaacatttctgtgtggtgtaagcaggctgaggagattagaaacatacataatgatgagctgatggggatccgacgggaggaggaaatggagatgagcgatgatgagattgaagaaatgaccgaaacaaaagaaactgaagaaagcgctctcgtttctcaggccgaggctctaaaagaggaaaacgacagtctcagatggcagctggatgcataccgcaatgaagtggagctcttgaagcaggagcagggtaaggtacaccgggaagatgaccctaacaaagaacagcagttgaaactgttgcagcaggctctgcaggggatgcagcagcatctcctaaaggttcaggaggaatacaagaagaaggaggcagagcttgaaaaactgaaagatgacaagttgcaagtggaaaagatgctcgagaaccttaaggaaaaggaatcgtgcgcaagtcggctctgcgcgagcaaccaagactctgaatatcccttggagaaaactatgaacagcagcccgattaagtctgagcgggaggctctgctggtagggattatctccacctttctgcacgtgcacccatttggcgcaagtattgaatatatctgtagctatcttcacagactggacaacaaaatatgtacttcagatgttgagtgtctaatggggcgtctccagcataccttcaaacaggagatgaccggagtgggcgcttctctagaaaaacgatggaaattttgtgggttcgaaggattgaaacttacgtag

SEQ ID NO: 186280 - DNA, 1833 bp, synthetic construct
  misc_feature 1..1833: note = Description of Artificial Sequence: Synthetic coding sequence
  source 1..1833: mol_type = other DNA
atgcagcgggacttccggtggctgtgggtgtacgagatcggctacgccgccgataatagccgcaccctcaacgttgatagtactgccatgacattgcctatgtcggaccctacagcctgggctaccgcgatgaacaacctgggtatggccccactcggcattgccggccagcccattctccccgattttgatccagcacttgggatgatgactggtatcccacccatcacccccatgatgcctgggttgggtatcgtgccgccccccattccccctgacatgcccgtggtgaaagaaatcattcattgtaagtcgtgtaccttatttcctccaaacccaaaccttccaccacctgcaacaagagagagacctccaggctgcaagacagtttttgtggggggattgcccgaaaacggcactgagcagatcatcgttgaggtctttgagcaatgtggggagattatagccatccggaaatcaaaaaaaaacttttgtcacattaggttcgctgaagagtatatggtagacaaagctctgtacctttctggttaccgcatcaggctggggtcaagcaccgataagaaggacacagggaggcttcatgtggacttcgcccaggctagagacgatctctacgagtgggagtgcaagcaacggatgttggctagagaagagcgtcacagacgaaggatggaagaggaaagactccgaccgccatccccaccgcctgtagtgcattactccgatcacgagtgctccatagtcgcggagaaactgaaagacgatagtaagttctcagaggctgtccagacactgctcacctggatcgagcgcggtgaagtgaaccggcgcagcgcgaacaacttctacagtatgatccagtcagccaacagccacgtgcggcggctggtgaatgaaaaagccgcgcatgaaaaggacatggaggaggcaaaggagaagttcaaacaggctctctccggcatcctcattcagttcgagcaaattgtggctgtatatcactcagcttctaaacagaaggcctgggaccacttcactaaagcgcagcggaaaaacatctcagtgtggtgcaagcaggccgaggagatcagaaacattcacaatgatgagctgatgggtatcagaagggaagaggaaatggagatgagtgatgatgaaatagaagaaatgacagagactaaggagaccgaggaaagcgctcttgtgagccaggccgaagccttgaaagaggaaaacgactcgctacggtggcagctggatgcttatagaaacgaggtggagttactaaagcaggagcaggggaaagtgcatagggaagatgaccctaataaggagcaacagctgaaactcctccaacaggccttacaggggatgcaacagcatttgctgaaagtgcaagaggagtataagaaaaaagaggcagagctggaaaagctgaaggacgataaattgcaggtggagaagatgttagaaaaccttaaagaaaaggagagttgcgctagcaggctttgcgccagcaaccaggatagcgaatatccactggaaaagacgatgaactccagcccaattaagagtgaaagagaagcactgctggttggcatcatcagcactttcctccacgtgcatccatttggggccagtattgaatacatctgctcatacctgcaccggcttgacaataagatatgtacctctgatgtggaatgtcttatgggtcgcctgcagcacacctttaagcaggaaatgacaggagtgggggcgagccttgagaagagatggaaattctgcggattcgagggccttaagctgacatag

SEQ ID NO: 186281 - DNA, 1746 bp, synthetic construct
  misc_feature 1..1746: note = Description of Artificial Sequence: Synthetic coding sequence
  source 1..1746: mol_type = other DNA
atgaccctgcccatgagcgaccccaccgcctgggccaccgccatgaataatctggggatggcgcctctgggcattgcgggccagccaattttaccagacttcgatcccgctttgggaatgatgaccggcatcccacccattacaccaatgatgccaggactagggatcgttccaccccccatcccacccgacatgccagtcgtcaaggaaattattcactgcaaatcgtgtacactgttcccacccaaccccaatctcccccctccagctaccagagaacggcctcccggttgtaaaacagtgtttgtaggcggtctgcccgagaatggcaccgaacaaatcattgtggaggtattcgagcagtgtggcgaaatcatcgcgattcggaaaagtaaaaaaaacttctgccacatacgtttcgcagaagagtacatggttgataaggcactgtacctgagcggatacagaatcaggctgggatccagcactgacaagaaagacactggccggcttcatgtcgacttcgcgcaggcgagagacgacctatatgagtgggaatgcaaacaacggatgttggcgcgtgaagaaagacacagaagacggatggaagaggaaagactccgcccaccttcgccacctcccgtagtccattatagcgatcacgaatgcagtatcgtagccgaaaaattgaaagacgattcgaagttcagcgaggccgttcagaccttattgacctggatagaacgaggcgaggtgaatagaaggtctgcaaacaatttttacagtatgattcagagcgctaacagtcacgttcgtcgcctggtcaacgagaaagctgcacatgagaaagacatggaagaggctaaagagaagttcaagcaggcactttcgggaattcttatccagttcgagcaaatcgtcgctgtatatcattccgcgtcaaaacagaaggcatgggatcactttaccaaggctcagcggaagaatatttcagtgtggtgcaaacaggcggaggaaattcgaaatatccataatgacgagctgatgggcatacgccgggaggaagaaatggagatgagcgatgatgaaattgaagagatgaccgaaactaaggagacagaagaaagcgctttggtgtctcaggctgaagccctgaaggaagaaaatgactcacttcgatggcagctcgacgcttatcggaatgaagtcgagctgctgaagcaggagcaggggaaagtccacagagaagatgacccgaataaggaacagcagttaaaactcctacagcaggcactacagggtatgcagcagcacttgctgaaggtgcaggaagagtacaaaaagaaggaggctgaactggagaaactgaaggacgacaagctgcaagttgagaagatgctggaaaatctcaaagaaaaagaatcttgtgctagccgcctttgcgcaagcaatcaggattctgagtatcctcttgagaaaaccatgaactccagtcctatcaaatccgaacgcgaggctctactagtgggaatcattagcacctttctgcatgtccaccctttcggcgcctccatagaatacatttgcagctacttgcatagactggacaacaaaatctgtacgagtgacgttgagtgtcttatggggaggctccagcatacatttaaacaggaaatgacaggggtcggcgcttccctggagaagagatggaagttctgcggattcgaaggtctgaaactgacttag

SEQ ID NO: 186282 - DNA, 1746 bp, synthetic construct
  misc_feature 1..1746: note = Description of Artificial Sequence: Synthetic coding sequence
  source 1..1746: mol_type = other DNA
atgaccctgcccatgagcgaccccaccgcctgggccaccgccatgaataatctgggcatggcccccctgggcatcgcgggacagcctattttgccagacttcgatcccgcgttaggcatgatgactggcataccacctatcacgccgatgatgcctggtctcggcatcgtccctccgccgattcccccagacatgccagttgtgaaagagatcatacactgcaaatcctgcacattgtttcctccaaaccctaaccttccacctccagctactcgggagaggccccccgggtgcaaaaccgtgttcgtcggcggcctgcctgagaatggtactgaacagattatcgtggaagtctttgaacagtgtggcgaaatcattgccattcggaagagtaagaagaacttctgtcatattagattcgccgaggaatacatggtggacaaggctttgtatctctcaggatatcgaatccgtttgggctcatctacagataagaaggacaccggccggttacacgtcgatttcgctcaggctcgcgacgatttgtatgagtgggaatgtaaacaacgcatgctcgcacgggaggagcggcacagaagacgaatggaagaagaacgcctgcgcccgcccagtcctccacccgtggtgcactatagtgaccacgaatgcagcattgtggcagagaagctcaaggacgactctaagtttagcgaggctgtccagacgctgttgacctggattgaacgcggagaagtaaacagacgctcagcaaataatttttactccatgattcagtcggcgaactcacatgtccgccgattagttaatgaaaaggcagctcatgagaaggacatggaggaggccaaggagaaatttaagcaagccctctcaggaatcctgatccagttcgagcagatagtggctgtgtatcatagtgccagcaaacagaaggcatgggatcacttcaccaaagcccagcgaaagaacatctctgtgtggtgtaagcaggccgaggaaatacgcaatatccataacgatgagttaatgggcatcaggcgcgaagaagaaatggagatgagcgacgacgagattgaagaaatgactgagaccaaggaaactgaggaatccgcattggttagccaggccgaggccctgaaggaagaaaacgactctctgcggtggcagctggacgcttaccgcaacgaggttgagctgctgaagcaggagcagggcaaggttcacagggaagatgaccctaataaagaacagcagctcaagctactccaacaggcacttcagggcatgcagcaacacctgttgaaggtccaggaggagtataagaaaaaagaggcagaactggaaaaacttaaggatgataaactccaggtagagaagatgctggaaaacttaaaggaaaaggagtcatgtgcttcaaggctctgcgcatcaaatcaggactcagagtaccccctggaaaagaccatgaattcatccccaattaaatccgagagagaagcccttctggtgggcatcatatccaccttcctacacgtgcatcctttcggtgctagcatcgagtacatttgcagctacctgcacagactggacaataagatatgtacctccgacgtggaatgtctaatgggtagactgcagcacacttttaagcaggagatgaccggcgtgggggcttcattggaaaagcggtggaagttctgcggctttgagggactgaaacttacctag

SEQ ID NO: 186283 - DNA, 1131 bp, synthetic construct
  misc_feature 1..1131: note = Description of Artificial Sequence: Synthetic coding sequence
  source 1..1131: mol_type = other DNA
atgaccctgcccatgagcgaccccaccgcctgggccaccgccatgaataatctgggaatggcgcctctggggattgctggccagccgattttgcccgacttcgaccccgcactcggaatgatgacaggaattccacccataacgcccatgatgccagggctgggtattgtccctcctcctatccccccggatatgccagtcgtaaaggaaatcatccactgcaagtcgtgtacactgtttcctcctaacccaaacctcccgccacccgcaacccgcgaacgcccaccggggtgtaaaaccgtgtttgtcgggggattaccagagaatggaactgaacaaattattgtggaggtatttgaacaatgtggagagatcatcgctatccgtaagtccaagaagaatttctgccatattcgctttgcagaagaatacatggttgacaaggcactctacctcagcgggtacaggataaggttgggaagctcaacagacaagaaggacaccggtcgacttcacgtggacttcgcccaggccagggacgacttgtacgaatgggagtgtaagcagcgaatgctagcccgggaggaaaggcacagaaggcggatggaggaggagcgccttagacccccttcccccccgccagtggtccattattcagaccacgagtgttcgatcgttgcagagaaactaaaggacgattcaaagttctccgaggctgtgcaaactttactgacatggatagaacgaggcgaagtaaacagacgcagtgccaacaatttctactccatgattcaatccgcaaacagccacgttcggagactggtcaacgagaaggctgcacacgaaaaagatatggaggaggccaaagaaaaatttaagcaggccctgagcggcatcttgattcagttcgagcagattgttgcagtgtatcacagcgcatccaaacagaaggcatgggatcactttactaaagcccagcggaagaatatttccgtttggtgtaaacaagcagaagaaattcgtaacattcacaatgatgagctgatgggcattaggcgggaggaagagatggagatgtccgatgatgagatcgaagagatgactgaaactaaagagacggaagaaagctag

SEQ ID NO: 186284 - DNA, 1407 bp, synthetic construct
  misc_feature 1..1407: note = Description of Artificial Sequence: Synthetic coding sequence
  source 1..1407: mol_type = other DNA
atgaccctgcccatgagcgaccccaccgcctgggccaccgccatgaataacctcggcatggcgcccctcgggattgctggtcagccgatacttccggatttcgaccctgctttgggtatgatgacaggaataccgcccatcacccccatgatgccaggactcggcatagtccccccaccaatccctccggatatgccagtggtaaaggagattatccactgtaaatcttgtaccctgtttccacctaacccaaatctgcctccccccgctacgagggaaaggcctcctggttgtaagactgtgtttgtgggcggcttaccagagaacggtactgaacagatcatagtcgaagtgttcgagcaatgtggggagattattgctatccggaaatccaaaaaaaatttttgccacatccggtttgctgaagagtatatggtcgacaaagctctgtacctgtccgggtaccggattcggcttggttccagcactgataagaaggatacagggagactccacgtagactttgcacaggcgagagacgacctgtatgaatgggaatgcaagcaaaggatgctcgctcgcgaagagcggcataggagacgcatggaagaggaaaggctccgtccacccagtcctcccccagtcgtacattacagtgaccatgagtgttctatagttgcagagaagctcaaagacgacagcaagttttctgaggccgttcagactcttctgacttggattgagcggggtgaggtgaaccgcaggtccgcgaataatttctactctatgatccagagtgcgaacagccacgtcaggcggcttgtgaacgagaaggcagcccacgagaaggacatggaggaagctaaggaaaaattcaagcaggccctgagcggcattctcatccagttcgagcagattgtggccgtgtatcattccgcttccaaacaaaaggcctgggatcactttacaaaagcccaaaggaaaaatatcagtgtgtggtgcaagcaggcggaggagatcagaaatatccataatgatgagctgatgggcatcagacgcgaagaagaaatggagatgtcagatgacgagatagaagagatgactgaaactaaggagaccgaggaaagcgcgctggtgtcccaggcagaggcactgaaagaagagaacgactccttgcgttggcagctagacgcataccgcaatgaagtggaactactgaagcaggagcagggtaaagtgcaccgcgaggacgatcctaataaagagcaacagctgaagctgcttcagcaggctcttcagggtatgcaacaacacttgctcaaagtgcaagaggagtacaagaagaaggaggctgagctggagaagttgaaagatgataaattgcaagtggagaagatgaaaaaatag

SEQ ID NO: 186285 - DNA, 1119 bp, synthetic construct
  misc_feature 1..1119: note = Description of Artificial Sequence: Synthetic coding sequence
  source 1..1119: mol_type = other DNA
atggagagcgaggagctggccgaccgggtgctggacgtggtggagcgaagtctctctaattacccgttcgactttcaaggagccagaatcataactgggcaggaagaaggggcctacggatggattacgatcaattatctgttgggcaagttttcccagaaaacccggtggttcagcattgtgccctacgaaaccaacaaccaagagactttcggggccctcgacctaggtggggccagcactcaagtaacgttcgtgccgcagaaccagacaatcgagtccccggacaacgctctgcagtttcgattgtacgggaaagactacaacgtgtacacccattcttttctgtgctacggaaaagaccaggcactctggcaaaaactggctaaggatattcaggttgcttcaaacgagatcctgagggacccttgttttcacccgggatacaagaaagtggtgaacgtgtctgacctgtataagaccccatgcactaaacggtttgaaatgacgctgccttttcagcagtttgagatacagggtatcgggaactatcagcagtgtcaccaatcaatcctggagctttttaatacgagctactgcccatattcacagtgcgccttcaacggcatcttcctgccgccgcttcagggagacttcggtgccttctctgccttttattttgtcatgaaatttctaaacctgacatccgagaaagtttctcaagaaaaagtgacagagatgatgaaaaaattttgcgctcagccctgggaagaaatcaaaacctcttatgccggcgtcaaggagaaatacctgtccgaatactgtttctcgggcacatacatcctgtcccttctactccaggggtaccactttacagccgacagttgggagcacatccacttcatcggaaaaatccagggttccgacgcaggttggactctgggatatatgcttaatctaacgaatatgatccccgccgaacagcctctttctaccccgttgagccactcgacctatgtttttttgatggtgctcttttccctcgtcctgttcacagtggccatcataggtctactaatctttcataaaccatcgtacttctggaaggatatggtatag

SEQ ID NO: 186286 - DNA, 1533 bp, synthetic construct
  misc_feature 1..1533: note = Description of Artificial Sequence: Synthetic coding sequence
  source 1..1533: mol_type = other DNA
atggaggacaccaaggagagcaacgtgaagaccttctgcagcaagaatattctggccatcctggggttctcaagcattatcgcagtcattgccctgcttgctgttgggctgacccagaacaaagccctgcctgaaaatgtgaagtacggaatcgttctggacgctgggtcctcacatacttcgctgtatatatacaagtggcccgccgaaaaggaaaatgataccggtgtggtacaccaggtggaggaatgccgcgtgaagggccccggcatatccaagtttgtgcaaaaagtgaacgaaattgggatctacctgaccgactgtatggaacgagctcgagaggtgattcccaggagccagcaccaggagacccccgtttatctgggtgccacggcaggaatgcggcttctgaggatggagtctgaagagcttgccgatagggtgttggatgttgtcgagcgctccctaagtaactacccctttgactttcaaggagcacgaattattacagggcaggaggagggcgcctacggttggatcactattaactatctgttaggcaaattcagtcagaaaaccagatggttttcaatcgtgccatacgaaaccaataaccaggaaaccttcggggccctggaccttgggggcgccagtacgcaggtgaccttcgttcctcagaatcagacgattgaaagtccggacaacgctctccagttccgtttatacggcaaagactacaatgtgtatacccatagtttcctctgttacggaaaggaccaagcgctgtggcaaaagctagcaaaagatatccaggtagcaagtaacgagatcctccgggacccctgtttccaccctggctataaaaaagtcgtcaatgttagtgatctttataaaacaccgtgcaccaaacggttcgagatgaccctgccattccagcagttcgagattcagggaattggtaactaccaacagtgccatcaatccatattagagctgtttaacacttcatactgcccttactctcagtgtgccttcaacggcatttttttgcctccgctgcaaggggactttggcgcttttagtgcattttattttgtgatgaaattcctgaatctcaccagtgaaaaggtgagccaagaaaaagttacggaaatgatgaagaagttttgtgcacagccctgggaggaaatcaaaacctcctatgccggcgttaaggagaagtacctgagcgaatactgcttttccgggacctacattcttagcttactgcttcaagggtatcacttcaccgccgatagttgggagcatattcattttattggaaaaatccaggggagcgacgcagggtggactctggggtacatgttgaacctgactaatatgattcccgcggagcagccactgtctacccctctgtcacatagtacatacgtgttcctcatggtgctctttagcctggtcctatttaccgtcgcaattatcggattgcttatcttccacaaaccctcttatttttggaaggatatggtctag

SEQ ID NO: 186287 - DNA, 921 bp, synthetic construct
  misc_feature 1..921: note = Description of Artificial Sequence: Synthetic coding sequence
  source 1..921: mol_type = other DNA
atgaagggcaccaaggacctgaccagccagcagaaggagagcaacgtgaaaactttctgttccaaaaatatcttagccattctaggcttctcaagcattattgctgtcatagctttattggcagttggcttgacccagaacaaggcactgccggagaacgtcaaatacggcatcgtcctggatgccgggagctcgcacacctcactgtacatttataagtggcccgcagagaaggagaatgacaccggcgtcgtgcatcaggtggaggagtgtagagttaagggaccgggcatctctaagttcgtgcagaaagtgaacgaaatcggtatatacctgaccgactgtatggaacgggcaagagaggtgatacctcgttcccaacaccaggagactcctgtgtacctcggagcaacggccggcatgcgattgctgagaatggaaagtgaggaactggcagatcgggtcctcgacgtggtggagagatccctgtcgaattatccctttgattttcagggagcccgcataattaccggacaggaggagggtgcctacggatggatcacaatcaattacctactagggaaattcagccagaagacgaggtggttcagtattgtcccctatgagacaaacaatcaggagacattcggggctttggatctcggaggagccagcacccaagtgacttttgtaccgcagaatcagacaattgagtctcctgataatgccttacagttccgtttgtatggtaaagactataacgtctatacccactcattcctgtgttatggcaaggaccaagctctctggcaaaagctggccaaggacattcaggcttctatcactcagtctcgtccagccccctttacaagcgccccccccgcgcctacaagctgttgcttcctgttccaaattcagtag

SEQ ID NO: 186288 - DNA, 1569 bp, synthetic construct
  misc_feature 1..1569: note = Description of Artificial Sequence: Synthetic coding sequence
  source 1..1569: mol_type = other DNA
atgggccgggaggagctgttcctgaccttcagcttcagcagcggctttcaggagtcaaatgtcaaaacattttgcagcaagaatatcctggctatactgggtttttcctccatcatcgctgtgattgcccttctggctgttggcttgacccaaaataaagccctcccagaaaacgttaaatatgggatagtcctggacgcaggaagtagtcacacctccttatatatttataaatggccagcagagaaagagaatgacacgggggtagtgcatcaggtggaagagtgccgcgtgaagggtccagggatttctaaatttgtgcaaaaggttaacgaaataggtatctacctgaccgactgtatggagcgagcccgcgaggtgatccccaggagtcagcatcaggaaacaccagtgtatcttggggcaacagcgggaatgcggctacttcggatggagagcgaggagctcgctgacagagtgctcgatgtggtcgagcgctcgttgtctaactacccttttgacttccagggagcacgcatcattacaggccaggaagaaggagcatacgggtggatcaccatcaattatcttctgggcaagttttctcagaaaactagatggttcagcattgttccctatgagaccaacaaccaggaaacatttggggcgttagacctaggaggagccagcacgcaagtgacctttgttccacagaatcagaccatcgaaagtccagataacgcgttacagttccggctgtatggaaaggattataacgtgtacacccattctttcttgtgctatgggaaagatcaggctttatggcagaagctggctaaggatatacaggtcgccagtaatgagatcctgagagatccatgcttccacccggggtataaaaaggtggtcaacgtctccgacctgtacaaaaccccttgtaccaagcggtttgagatgaccctcccatttcagcagtttgagattcagggaatcggcaattaccagcagtgtcatcagtccatattagagctatttaatacatcgtattgtccctactcccagtgcgccttcaacggcattttcctgcctccccttcaaggcgactttggggctttctctgcattttacttcgttatgaagttcttgaacctaacctcagaaaaggtgtcacaggagaaggtcacagaaatgatgaagaagttttgcgcccagccatgggaggaaattaagaccagttatgccggcgtaaaagagaagtatctctctgagtattgcttctccggtacatatatcctcagcctgttactccaggggtatcactttactgcagactcctgggagcacatccatttcattggcaaaatccaggggtccgacgccggctggactctaggatacatgttgaacctcacgaacatgatccctgctgagcaacccctctctactccattgagccacagcacctacgtcttcctcatggtgctcttcagcctcgtgttattcacggtcgctattattggactcctgatcttccataagccaagctatttttggaaggatatggtgtag

SEQ ID NO: 186289 - DNA, 1554 bp, synthetic construct
  misc_feature 1..1554: note = Description of Artificial Sequence: Synthetic coding sequence
  source 1..1554: mol_type = other DNA
atgaagggcaccaaggacctgaccagccagcagaaggagagcaacgttaaaacattctgttcaaagaacattttagctattctgggtttttcctcaataattgcagtcatcgccctgctcgccgtcggcctgacgcaaaacaaggccctgcctgaaaacgtcaagtacggcatcgtgttggacgccggctcgtcacatacatcactctacatatataagtggcccgcagagaaggagaacgacactggggtcgtacaccaggtcgaagagtgtagggtcaagggacccgggatatccaagttcgtgcaaaaggtaaacgagataggcatttatctgaccgactgtatggaacgggcccgcgaggttataccccggagccaacaccaagaaactcctgtttacctgggcgccaccgccggcatgaggctcctcagaatggagtcggaagagctggctgatagggtcctcgacgttgttgagagatctctctcaaactatccctttgacttccagggggccagaattatcactggacaagaggagggtgcctacggctggattactatcaactacctgctcggaaagttttcacaaaaaacccgttggttttctatagtcccgtatgaaaccaataatcaggagacctttggcgcgctggacctcgggggagcctcaacacaggtgacgttcgtgccgcaaaaccaaaccattgaatcccccgataatgctcttcagtttaggctttacggcaaggattataatgtgtatacacacagcttcttgtgttacggcaaggaccaggccttgtggcagaagctggcgaaagatatccaggtggcatccaatgagattctgcgcgatccttgtttccaccccgggtacaagaaagtcgtgaatgtatcagatctctataagacgccctgcactaagcgatttgaaatgactttaccttttcagcagtttgagattcagggcattggtaattaccagcagtgtcatcaaagcattctggagctgttcaatacatcttattgcccttactcacagtgtgccttcaacgggatctttttgccccccctacagggagactttggagcattttccgcgttctacttcgttatgaagttcttgaatctcaccagtgagaaggttagtcaggagaaggtgacggaaatgatgaaaaagttttgcgcacagccctgggaagaaataaagacctcctatgctggcgttaaagagaagtaccttagcgagtattgtttttccggtacttatatacttagcctgctgctgcagggataccattttaccgctgattcctgggagcacattcactttattgggaagatccagggctcagatgcaggatggaccctcggatacatgctgaatttgacgaacatgattccggcagaacaaccactgagtacccctttgtcccatagcacttatgtctttctgatggtgcttttcagccttgtcctgttcaccgtggccattattggactgctaatttttcacaagccttcgtacttctggaaagacatggtgtag

SEQ ID NO: 186290 - DNA, 1119 bp, synthetic construct
  misc_feature 1..1119: note = Description of Artificial Sequence: Synthetic coding sequence
  source 1..1119: mol_type = other DNA
atggagagcgaggagctggccgaccgggtgctggacgtggtggagcgttcgctctctaactatccattcgacttccagggcgccagaataattacaggtcaggaggagggtgcttacggctggatcactattaattaccttctaggcaaattctcccagaaaacccgctggttcagcatcgtcccatacgagaccaataatcaggagacgttcggggctctggacctgggaggcgcctcaacacaggtcacctttgttcctcagaaccagacgatcgaatcgcctgacaatgccctgcaattccgtctatacggaaaagactataacgtatatactcactcctttctgtgttacggcaaggatcaggccctctggcagaagctggccaaggacattcaggtggcctcgaatgaaatcctgagagatccgtgctttcaccccgggtataagaaggtggtgaatgtgtccgacttgtataaaaccccctgtaccaaaaggtttgagatgaccctacccttccagcagttcgagattcaagggataggcaactaccaacagtgccaccagagcatactggagttattcaacactagttattgtccatatagtcagtgtgcatttaacggcatttttttgccacccttgcagggggattttggcgccttctccgccttttacttcgttatgaaattcctcaatctaactagtgagaaggtcagccaggagaaggtaaccgaaatgatgaaaaagttctgcgctcaaccatgggaggagatcaaaacatcatatgccggagtgaaagaaaagtacctaagtgagtattgcttttccggtacatacatccttagcctgttattgcaaggataccacttcaccgccgactcatgggagcacattcacttcattgggaagatccaaggttccgatgctggttggacactggggtatatgctcaacctgacaaacatgatcccggcagaacaacctctatctaccccactgtctcattccacatacgtttttctcatggtcttgttctctctagtactctttaccgtcgccatcattggcctgctgattttccacaaaccctcctacttctggaaagacatggtatag

SEQ ID NO: 186291 - DNA, 1209 bp, synthetic construct
  misc_feature 1..1209: note = Description of Artificial Sequence: Synthetic coding sequence
  source 1..1209: mol_type = other DNA
atggagcgggcccgggaggtgatcccccggagccagcaccaggagactccagtctatctaggggcaactgccggaatgagacttctgagaatggaaagcgaggagctggctgacagggttctggatgtagtcgagcgaagtttaagcaactaccctttcgacttccaaggggcacgaatcatcacgggacaggaggagggggcttacggatggattactatcaactacctcttggggaagttttctcagaaaactaggtggtttagtattgtgccgtacgagacaaacaatcaggaaacattcggcgctctcgacctgggcggcgcctctacccaggtcacttttgtcccccaaaatcagacaattgaaagccccgataacgccttgcaattccgattgtacggaaaggattacaatgtttatactcactcttttctctgctatgggaaggatcaggccttgtggcaaaaattggcgaaggacatccaggtagcatctaatgaaatcctgcgagatccttgctttcatcccggatacaaaaaagtggtcaacgttagtgatttgtacaaaacaccatgcactaagcgcttcgaaatgacactgccctttcagcagttcgagatacagggaattggaaactaccagcagtgccaccagtcaatcttggaactgtttaacacctcatactgcccctattctcagtgcgcctttaacggtattttcctgcctcctctgcagggcgattttggggcattctcagctttttactttgtgatgaagtttcttaatctgactagtgagaaggtgtcccaggaaaaggtgaccgaaatgatgaagaaattttgtgcacagccttgggaggaaatcaagacatcatatgccggagtaaaagagaagtatctgtcagagtattgcttttcaggaacatatatcctaagccttctgctgcaagggtatcatttcactgcagactcttgggaacacatccactttatcggcaagatccagggcagcgatgctgggtggactctcggctacatgttgaacctgacaaacatgattcctgcagaacaacccctgagcactcctctgtcacattccacctatgtatttttgatggtgttgttttcactggttctcttcaccgtggcaataatagggctgctgatctttcataagccttcttacttctggaaagatatggtgtag

SEQ ID NO: 186292 - DNA, 1419 bp, synthetic construct
  misc_feature 1..1419: note = Description of Artificial Sequence: Synthetic coding sequence
  source 1..1419: mol_type = other DNA
atggccggcaaggtgcggagcctgctgccccccctgctgctggccgctgccgggctggctgggcttttgcttctgtgtgtgccaaccagagacgtgcgcgagccaccggccctcaagtatggcattgtgctagacgcaggctcctctcacacaagcatgttcatttacaaatggcccgcagataaggagaatgataccggcatagttggacaacactcaagctgcgatgttccaggaggggggatttctagctacgccgataaccctagcggcgcctctcaatcattagtcgggtgtttagaacaagcgttacaggacgtgccaaaggaacgccacgccggcacccccctctacctaggggccactgccgggatgaggctacttaacctgacaaacccagaagctagtacctccgtgctcatggcggtgacccacacactgacccagtacccttttgactttagaggggctaggattctgtcaggacaggaggaaggggtgttcgggtgggtgacagcgaattatcttttggagaattttattaaatatggatgggtgggccgctggttcaggccgagaaaagggactctgggtgctatggatctggggggcgcatcgacccagattactttcgaaactacctctcccgccgaagatcgcgcgtccgaagtgcagcttcatctgtatggacagcactatcgggtttacacacattcgttcctatgttatggccgggaccaggtcctccagcggttgttagccagcgccctgcagacgcatggcttccacccctgctggccccgcgggttctctacacaggtgctgctcggcgacgtttaccaatccccatgcactatggctcagagaccacaaaacttcaatagttcagctagggtcagtctaagtgggtcctcagacccccacctttgccgggacttggttagcggtctgttctctttttccagttgtccattctcaagatgttccttcaacggcgtctttcagccacccgtggccggaaatttcgtcgccttctccgcttttttctacactgtggactttttaaggaccagtatgggactgcctgtggctacgttgcagcagcttgaggcggctgccgtaaatgtctgtaaccagacttgggctcagcaactcctgagccggggttatgggttcgatgaaagggccttcggcggagtcatttttcagaagaaagccgccgacaccgcagtggggtgggcactaggctatatgctgaatctgaccaacttgatcccggcagatccccctgggcttagaaagggcacagattttagctcatgggtcgttctgctcctcttgtttgcatcggccttgctggccgcactggtgctgctgctgcgacaggtgcacagcgcaaagctgcctagcaccatatag

SEQ ID NO: 186293 - DNA, 1488 bp, synthetic construct
  misc_feature 1..1488: note = Description of Artificial Sequence: Synthetic coding sequence
  source 1..1488: mol_type = other DNA
atggccggcaaggtgcggagcctgctgccccccctgctgctggccgcagcagggcttgccggcttattgctgctgtgcgtccctactcgggacgtgcgagagcccccagctctgaagtatggaattgtcctagacgctggatcctcgcacacatcaatgttcatttacaagtggcccgcagacaaggaaaatgacactggcatcgttggccaacatagctcatgtgacgtgccgggtggtggaatcagctcatacgcagataatcctagtggggccagccagtcgctggtcggctgcttggagcaagcactgcaggatgtgcccaaggagcgccatgccggtacacccctgtacctgggggcaacagccggaatgcggctgctcaacctgactaaccccgaagcgtccacgtcagttctcatggcagtaactcacaccctgactcagtacccgtttgactttcgaggggcccgtatcttgtccggacaagaggagggcgtctttggctgggtgaccgcgaactatttgctcgagaacttcatcaaatacggttgggtcggcagatggttccgccctagaaagggcacattaggcgccatggacctggggggcgcttccacccagatcacattcgagaccacatcgcccgcggaagacagagctagcgaggtacagctgcatctttacggccaacattatcgcgtttatacccatagcttcctgtgttatgggagggatcaggtgctgcagaggctcctcgcctcagctctgcaaacccacggtttccacccttgttggcctcggggcttcagtactcaggtgctcctgggtgatgtttaccagtcaccttgtactatggcacaaagaccccagaatttcaattcttccgctagagtgtcattatctggaagcagcgatccacacctgtgcagagatctggtgtccgggctgtttagcttctcaagttgcccattctcccgttgcagtttcaacggcgtattccagcctcctgtggccggtaactttgtggctttttctgctttcttctatacagtcgatttccttcggacatctatgggacttccagtagcaaccctacagcagttggaagctgccgctgtgaatgtgtgtaaccagacttgggcacaactacaagctagagtgccaggtcagcgggcccgtctcgcagattattgtgctggggccatgtttgttcagcaattactcagtaggggctacggattcgatgagcgggcctttggcggcgttatcttccagaagaaggccgccgatacagctgttggctgggccctcggctatatgttgaacctgactaatctcattccagccgaccctcctggtttgagaaaggggacagacttttcctcatgggtggtgctacttctcttgtttgccagtgcactgctggccgccctcgtacttttactccgtcaagtccacagtgccaagctgccgagtactatctag

SEQ ID NO: 186294 - DNA, 1590 bp, synthetic construct
  misc_feature 1..1590: note = Description of Artificial Sequence: Synthetic coding sequence
  source 1..1590: mol_type = other DNA
atgttcaccgtgctgacccggcagccctgcgagcaggccggcctgaaggccctgtatcgcacccctacaatcatcgcgctggtggtgttactggtgtctatcgtggtcttggtgtcaataactgtgattcaaatccacaagcaagaagtactgccccccggcctgaagtacgggatcgtgctggatgccggcagttcccgaacaacggtatatgtttatcagtggccggcagagaaagaaaacaacaccggggtggtgagccagaccttcaaatgcagtgtgaagggatccggcattagttcatacggtaataaccctcaggacgttccccgtgcattcgaggagtgtatgcaaaaggtgaaggggcaggtgccttctcatttacatggcagtacaccaattcaccttggtgccacagcgggaatgcgtctgctgcgcctccaaaacgagaccgctgctaacgaagtcctggaaagcattcaaagctactttaagagtcagcccttcgacttccggggagctcagatcatctccggccaagaggaaggagtgtacgggtggattacggccaactacttgatgggcaacttcttagagaagaacctgtggcacatgtgggtgcacccgcacggcgtcgagacgaccggagcactcgacctgggcggggcatccactcagattagcttcgtggcgggtgaaaaaatggacctcaatacttctgacataatgcaggtgtccctgtacggctatgtgtacacattatatacacatagcttccagtgctacggccgaaacgaggctgagaaaaaatttcttgcgatgctcttgcagaactcccccaccaaaaaccacctcaccaacccttgctatccaagagattattcaatttcttttaccatgggtcatgtctttgattcactgtgtaccgtggaccaaagacccgagtcctataacccaaatgatgtgattacattcgagggtaccggagacccaagtctgtgcaaggaaaaagtggcctctatctttgactttaaagcatgccatgatcaggaaacttgttctttcgatggggtgtaccagcccaagataaaaggtccttttgtggcttttgccggcttttactacacagccagcgcactgaacctcagcggatcctttagtttggacaccttcaatagcagcacatggaacttttgcagtcagaactggtcgcagctgccgctgctcctgcccaaattcgacgaggtttacgcacggtcctattgcttttccgctaattatatctaccatttgtttgtgaatggctacaagtttaccgaagagacctggccccaaattcacttcgaaaaagaagtcggcaactcaagcatagcatggtccctgggatacatgctgagcctgaccaaccaaatccctgccgagtccccattgataaggctgcctatcgaacccccggtatttgtaggcactctggcctttttcactgctgccgcactgctctgcctagcgttcctcgcatacctgtgtagcgcaacaaggcgaaagagacattctgaacacgcctttgatcacgcggtggacagtgactag

SEQ ID NO: 186295 - DNA, 1590 bp, synthetic construct
  misc_feature 1..1590: note = Description of Artificial Sequence: Synthetic coding sequence
  source 1..1590: mol_type = other DNA
atgttcaccgtgctgacccggcagccctgcgagcaggccggcctgaaagccttgtatcgcactcccaccataattgcattggttgtcctcctggtgagcatcgtagtgttagtgagtatcaccgtcattcagattcataaacaagaggtattacctccaggactgaagtacgggatagttttggacgctggttctagtaggacaacagtgtatgtgtaccagtggccagcagagaaggagaataacactggagtggtgtcacagacctttaagtgctcggtgaagggatccggcataagctcctatggtaacaacccccaggatgtaccccgggcgtttgaggagtgcatgcagaaggtgaaagggcaggtgcctagccaccttcacggatccacccccatccacctgggcgccaccgccggtatgcgcttacttcgactgcagaacgagacggccgccaacgaagtgttggagtcaattcagtcgtatttcaaaagccagcccttcgactttaggggtgcccaaatcatctcagggcaggaggagggagtgtatggatggatcaccgccaactatctcatgggcaactttttggagaagaacttgtggcacatgtgggttcacccacatggggttgagactaccggtgcgctagacctggggggagctagtacacagatatcctttgttgctggcgaaaaaatggatctcaacacgtcagatattatgcaagttagcctgtacgggtacgtgtacactttatatacgcacagcttccaatgctatggtcggaacgaggcagaaaagaaatttctggcgatgctcttgcaaaattcaccgaccaagaatcacctgaccaacccctgctatcccagagactactctatctcattcaccatgggacatgtgttcgactctctgtgtactgtcgaccagaggcctgagtcttataatccgaacgatgtgattacattcgagggaactggtgatccaagcctatgcaaggagaaagtggccagcattttcgactttaaagcttgtcatgaccaggaaacgtgttcatttgacggagtgtaccaacctaaaattaagggtccgtttgtggcatttgctgggttttactataccgcttctgcgctgaacctctccgggtctttcagccttgacaccttcaacagcagcacttggaacttctgttcccaaaactggagccagctgccactcctgctgcccaagttcgacgaggtgtatgcgcggtcctattgcttttctgccaactatatttaccatctgtttgtaaacggctataagttcaccgaggaaacttggccacaaattcattttgaaaaggaggtgggcaattccagcattgcatggagcttgggctatatgctctccctcacaaaccaaatacctgcggaatcaccactgatccgcttaccaatagaacccccagtcttcgttggaaccttggcctttttcaccgccgctgcactcctctgtctggcgttcctggcttacctctgttctgccacgagacggaagagacattccgagcacgcattcgaccacgctgtggactccgactag

SEQ ID NO: 186296 - DNA, 1287 bp, synthetic construct
  misc_feature 1..1287: note = Description of Artificial Sequence: Synthetic coding sequence
  source 1..1287: mol_type = other DNA
atggccaccagctggggcaccgtgttcttcatgctggtggtgagctgcgtgtgttctgcagtcagtcaccggaatcaacagacttggttcgagggcatttttttgtcatcaatgtgtcccatcaacgtgtccgcatccactttatacggtataatgtttgatgctggttctacagggacacgcattcacgtttacacattcgtgcagaaaatgcccggccaattgcctattttggaaggcgaggtcttcgacagtgtgaagcccggtctatcagcattcgtcgatcagcccaagcagggagccgagactgtccaaggactgttggaggtggcaaaagactcaattccacgaagccattggaagaaaactccagtagtgctcaaagctactgcaggactgcgactcctccccgaacataaagcgaaagctttattatttgaggtgaaggagatctttaggaaaagcccatttttggtccccaagggctcggtgagcattatggacgggagtgatgagggcattctggcatgggtcacagtcaactttctcaccggacagttgcatggccatcggcaggaaaccgttggcaccctggatctgggcggtgcctccacccagattacgttcctgcctcagtttgaaaagactcttgagcagacgcccagaggctacttgacctctttcgagatgtttaattccacatataaattgtacacccattcctatctcggattcggtctcaaggccgcgcggctggcaacactgggagctctcgagaccgagggcaccgatggccacacatttaggtcagcttgcctgcccagatggttggaggccgaatggatctttggcggcgtcaagtaccagtatggggggaaccaggaaggagaagtgggcttcgagccatgttatgccgaggtactgagggtggtaaggggcaaactccatcagcctgaggaggtccagcgaggcagtttctacgccttttcctactactatgacagggctgtagataccgacatgatagactacgagaaggggggaattctgaaggtcgaagacttcgagcgcaaggcgcgggaagtttgtgataatttggagaacttcacatcaggctcaccatttctgtgcatggatctcagttacatcacagccctgctcaaagacggttttggatttgccgactccaccgtcctgcagctgacgaagaaagtgaacaacatagagaccggttgggcattgggggctaccttccacctgctgcagtcactaggtatctcccactag

SEQ ID NO: 186297 - DNA, 1404 bp, synthetic construct
  misc_feature 1..1404: note = Description of Artificial Sequence: Synthetic coding sequence
  source 1..1404: mol_type = other DNA
atgcagccccagcacggcccctggcagacccggatgcggaagatctccaatcatggctcacttagagtggccaaggtggcctaccccttaggactgtgcgtgggggtctttatttatgttgcctacattaagtggcatcgagccaccgcaacccaggccttcttctcaattaccagagccgccccgggtgcccgctggggccagcaggcccattctccacttggcacggcagctgacggacacgaagtcttctatggcataatgtttgatgcgggatcgactggcacgcgggtccacgtgtttcagttcacaaggcctcctcgcgagacgcctacgctcactcacgagaccttcaaagctcttaaacccgggttatccgcatatgccgatgatgtcgagaaatctgcacaggggatccgtgaattactcgatgtggctaaacaagatatcccttttgacttttggaaagccacaccgctcgtgctgaaggcgacggctggtcttagactcctgccgggcgaaaaggctcagaagctcttgcagaaggtcaagaaggtcttcaaggcatctccctttcttgttggcgacgattgtgtgagcattatgaacggcacagatgaaggggtcagtgcttggattactattaatttcctgactggaagcttgaaaaccccggggggatccagcgtcggtatgctcgacctggggggtggctctacacagattgcttttttacctcgggtcgaagggactctgcaggcttctccccccggatacctcaccgcgttgcggatgtttaatcgtacatacaagctgtacagctattcctacctcgggttgggacttatgtccgccaggttggccatactgggcggcgttgaaggccaacctgctaaagatggcaaggaactcgtatctccgtgcctgagcccaagctttaaaggcgagtgggagcacgccgaagtgacataccgcgttagtgggcagaaggccgcagcctctctccatgagctatgtgccgctcgagttagcgaggtcctccagaaccgcgtgcatagaacagaggaggtcaagcatgtcgacttctacgcgttcagttattattatgacttagcagcgggtgttgggctgatagatgctgagaaaggaggcagcctggttgtgggggactttgagatcgctgcaaaatacgtatgccgcaccttggagacacagccacagagtagccctttctcctgtatggacctgacgtatgtgtccctgcttctacaggagtttggtttcccccgctctaaagtgctcaaacttacacgaaagatcgataatgtagaaaccagttgggcattaggtgccattttccactatatagatagcctcaaccggcaaaagagtcctgcgagctag

SEQ ID NO: 186298 - DNA, 1452 bp, synthetic construct
  misc_feature 1..1452: note = Description of Artificial Sequence: Synthetic coding sequence
  source 1..1452: mol_type = other DNA
atgaagaagggcatccggtacgagaccagccggaagaccagctacatattccagccacagcacggcccgtggcagacccggatgagaaaaatttcgaatcacggatcattacgggtggctaaggtcgcctacccccttggcctgtgcgtcggcgtattcatttacgtggcatatattaagtggcacagggccaccgcaacacaggcattcttcagtattacacgtgctgcccctggagctcgatgggggcagcaggcacactccccactgggcacagccgccgacggacacgaagtcttctacggcatcatgttcgatgccggttccacgggcacaagagttcacgtgtttcaatttaccagaccacctcgagagaccccaacactcactcacgagacctttaaagctctgaagcctggtttgagcgcttacgccgatgatgtggaaaagagtgcccaggggatccgagaactattggatgtggccaagcaagatattccattcgatttctggaaggccacgcccctcgtgttaaaggccaccgccggcctccgtttgttgccaggtgaaaaggcacaaaaactgctacagaaggtgaaaaaggtgtttaaggccagtccattcctcgtgggcgacgactgtgtaagcatcatgaacggaactgacgagggcgtgtcggcttggattacaataaactttctcactggtagtctgaagacccctgggggctcatccgtaggtatgttggacttgggcggtggatctacgcaaatcgctttcttgccccgcgtggaaggcaccctacaggctagtccgccaggttatctaactgctttgcggatgtttaatcgtacttataaattgtactcatactcatatctcggtttagggctgatgtccgctaggctcgccattttaggcggtgtggagggacaacctgccaaggacggcaaggaactggtatcaccttgcttaagtccctcttttaagggagaatgggaacatgccgaggttacttacagagtaagtggccagaaagctgcggcctccctgcatgagctgtgcgctgctagggtatccgaagtgctgcagaatagagtgcacaggactgaagaagtaaagcacgttgacttctacgccttcagctactactacgatctagcggcgggagtgggcttaattgacgctgagaagggaggctctcttgtggttggagacttcgagatcgccgcgaaatatgtatgtcgtacattagaaactcagccgcagagtagcccgttttcctgcatggacttgacttacgtttctctgctcctccaagagtttggcttccctcgtagcaaggttctaaagttaactaggaagatagataacgtggagactagctgggccttgggcgctatttttcactacatagattccctgaaccggcagaagtcacccgcttcatag

SEQ ID NO: 186299 - DNA, 1104 bp, synthetic construct
  misc_feature 1..1104: note = Description of Artificial Sequence: Synthetic coding sequence
  source 1..1104: mol_type = other DNA
atgttcgacgccggcagcaccggcacccgggtgcacgtgttccagtttacacgaccacccagagaaactcctacattaacgcatgagacttttaaggcgctaaagcccggcctatctgcctacgccgacgatgtcgagaagtcggctcaggggatacgggagctgctggatgtcgcaaaacaggatatacccttcgatttttggaaagcaactcctctggtactcaaggccaccgccggcttgcgcctgttgcccggcgagaaggcgcagaaactgctccagaaggtgaagaaggtattcaaggcctctccgttcctcgtgggtgacgattgcgtttcaatcatgaatggcaccgatgaaggagtatccgcatggataacaattaatttcctgactggcagtctcaagaccccaggaggctcttccgtcggcatgctggatctggggggcggatctacccaaatcgcatttctcccacgcgtcgaagggactctgcaggcaagcccccctggctacctcaccgccttacggatgttcaatagaacctataagctctattcctatagctaccttggattgggcctgatgtcagcacgcctcgcaattttagggggggtggaggggcagccagctaaagatggcaaggagttggtctcgccgtgtctttccccctcgttcaagggcgagtgggagcacgcggaagttacgtatagagtgtccgggcaaaaagcagcagcgtccctccacgagctatgtgccgcccgagtatcagaagtccttcagaatcgagttcataggacggaggaagttaagcacgttgacttttacgccttttcttactattatgacttagctgcgggcgtcgggctgatcgacgcggagaagggcggctctcttgtggtgggggacttcgaaattgccgcaaaatacggcggatctcacctggagcgagagggcacttgtctgatcccctccgtatctgaccctggcgacactgcggctgaacagccgctcctgatgcatggtccccacctgaggcaaccagccacgccaggcgtgagactttctcaggaacagagcgccgaggcgcactccgagaactag

SEQ ID NO: 186300 - DNA, 1455 bp, synthetic construct
  misc_feature 1..1455: note = Description of Artificial Sequence: Synthetic coding sequence
  source 1..1455: mol_type = other DNA
atgaagaagggcatccggtacgagaccagccggaagaccagctacatattccagcaaccacaacacggcccgtggcagacccggatgcggaagatcagcaaccacggatctctccgggtggctaaggtggcatacccacttgggttgtgcgtgggagtgttcatttacgtcgcctatatcaagtggcacagagcaactgctacacaagctttttttagtatcacgcgagcagctccaggtgccagatggggccagcaagcccactcgccactgggtacagctgccgatggccacgaagtcttctacggcatcatgtttgacgccggctctacaggaacccgagtacatgtgtttcagtttacacggccaccccgggaaactccaacacttacacatgaaacctttaaagctcttaagcctggactcagcgcctatgccgatgatgtggagaaatccgctcagggtatcagggaactgctcgacgtggccaaacaagatatcccatttgacttttggaaagcaactcccctcgtgctgaaagccactgccgggcttcgcctcttgcccggggaaaaggcccagaaactcctccaaaaagtgaaaaaagtattcaaagcttcaccattcctcgtgggcgacgactgtgtaagcattatgaatggcacagatgaaggcgtgagcgcttggattactattaactttttaacagggagtctgaagacacccggcggatcatcagtcggtatgctcgacttagggggaggctccacccagattgcattccttccacgcgtggaaggcaccctccaagcctctcctccgggctacctgacagccctgaggatgttcaatagaacttacaaactttactcctattcatatttggggctgggacttatgagcgcccgacttgctattctcggcggggtcgaaggacagccagccaaggacggcaaagaactggtatcgccctgtcttagcccatcattcaagggggagtgggaacacgccgaagttacttatagggtttctggtcagaaggcagcggcttcactgcatgagctgtgtgccgctcgcgtgtcagaggtcctgcagaacagggtgcacaggacagaggaagtcaagcacgttgacttctatgcattttcttactactatgacctggccgctggagtagggttaattgacgcggaaaaaggaggaagcctcgtcgtgggggattttgaaattgcggccaagtacgtgtgcaggactcttgagactcagccacagagctcccccttttcctgcatggatctcacctacgtgtcccttctacttcaagagttcggtttcccaaggagcaaagttttaaaacttacaaggaagattgataacgtggaaacgtcctgggcgctgggtgccattttccattacattgactcattgaatcgccagaaatctccggcctcttag

SEQ ID NO: 186301 - DNA, 888 bp, synthetic construct
  misc_feature 1..888: note = Description of Artificial Sequence: Synthetic coding sequence
  source 1..888: mol_type = other DNA
tgagtgctgaaggccaccgccggcctgcggctgctgcccggcgagaaagcccagaagttgctgcagaaggtgaaaaaggttttcaaagcttccccttttctggtaggcgatgactgtgttagcatcatgaacgggacggacgagggagtctcagcatggataaccataaatttcctgacagggtccttaaaaacccccgggggatcaagtgtcggaatgctggacctgggaggtggttccacccagatcgccttcctgccacgggtagagggcacactccaggcatcgccacctggatacctgaccgccttacgcatgttcaaccgcacatacaagctatactcatatagttacctgggactggggctcatgagcgcgcgactcgctattctgggaggcgtcgagggtcagccggctaaggacgggaaggaattagtctctccttgcctcagcccctcttttaaaggagaatgggagcacgccgaagtcacttaccgggtgtctggccagaaagccgccgccagtcttcacgaactctgtgctgccagggtgtccgaagtacttcagaaccgtgtgcaccggacagaagaggtaaaacacgtggatttttatgctttcagctactattatgatctggcggctggcgtcggtcttatcgatgccgagaaaggaggctcactggtcgttggcgatttcgaaatcgcagctaagtacggagggtcccacctggaaagggaagggacctgccttattccctcggtgagtgaccccggagacacagcagccgagcaacccttgctcatgcatggaccccatcttcgccagcccgccacacccggagtcagactctctcaggaacaatccgctgaggcacattctgaaaattag

SEQ ID NO: 186302 - DNA, 681 bp, synthetic construct
  misc_feature 1..681: note = Description of Artificial Sequence: Synthetic coding sequence
  source 1..681: mol_type = other DNA
atgccccagcacggcccctggcagacccggatgcggaagatcagcaaccatggaagtttgcgggttgcaaaggtggcctatccgctcgggctctgtgtaggagtgttcatttatgtggcctatatcaaatggcatcgggccaccgctacccaggcttttttcagtatcactcgcgcagcccccggagcccgctggggtcagcaggcacattcacctctaggtacggcagcagatgggcacgaagtgttctacggtattatgtttgacgccgggagcactgggaccagggtgcacgtatttcagtttacccgtcctcctcgggaaacacccactctgacccatgagaccttcaaggctctgaaacccgggcttagcgcatacgcggatgacgtggaaaaagttaagaaagtgttcaaggcaagcccatttttagttggggacgattgcgtgagtattatgaatggcaccgacgagggggtgtcagcctggatcacaataaatttcttgacagggagcctaaagacccctggaggatcatctgtcggtatgttggacttgggaggtggatccacccagatcgctttcctgccacgcgtggagggaacacttcaggcatctccacctggctatctgactgcacttcgcatgttcaacaggacttacaagctatatagctattag

SEQ ID NO: 186303 - DNA, 588 bp, synthetic construct
  misc_feature 1..588: note = Description of Artificial Sequence: Synthetic coding sequence
  source 1..588: mol_type = other DNA
atgcagccccagcacggcccctggcagacccggatgcggaagatcagcaaccacggaagcctgcgcgtcgcaaaagtggcttacccactggggctatgcgtgggggtgttcatttatgtggcatatatcaagtggcatcgggcaactgccacgcaagccttttttagcataactcgggcagccccaggtgctcgctggggccaacaagctcacagccctctgggcactgctgccgacgggcacgaggtgttttacggcatcatgttcgatgcaggaagcacgggcactagggtgcacgtgttccagtttaccaggcctcctagagaaacccctaccctcacccatgaaaccttcaaagctctgaaacccgggctctcggcctacgccgatgacgtcgaaaaggtcaaaaaagtcttcaaggcctcaccgtttctggtgggcgacgactgcgttagcatcatgaatggtactgatgagggtgtgagtgcctggattacaatcaactttctgacgggctcgctcaagactcctgggggcagctcagttggaatgttggatcttggaggggggtctactcagatcgcctag

SEQ ID NO: 186304 - DNA, 903 bp, synthetic construct
  misc_feature 1..903: note = Description of Artificial Sequence: Synthetic coding sequence
  source 1..903: mol_type = other DNA
atgaagaagggcatccggtacgagaccagccggaagaccagctacatatttcagcaacctcagcatggaccttggcagaccaggatgaggaagatttccaaccatggcagtctgcgtgtggccaaggtggcctacccgctagggttgtgcgtcggagtgttcatttacgtggcctatatcaagtggcatagggcgactgccacccaggcattctttagcattacccgagccgcaccaggggctcgatggggtcagcaggcccactcacccctgggaacagccgcagacggacacgaggttttctacggaatcatgttcgatgctgggtcaaccggcacgcgcgttcacgtttttcaatttactaggccaccccgggagacacccactctgactcatgagacctttaaagctctgaaaccggggttgtccgcctacgccgatgatgtggagaaggtgaaaaaggtgttcaaggcttcccccttccttgtgggagacgattgtgtaagtatcatgaacggaacagacgagggggtatcggcttggattacgatcaacttcctgactggttctctcaagacacccggcgggagcagcgtggggatgctcgatctcggaggtggcagcactcagatagcctttttgcccagagtggaaggtactctgcaggcttctccgcccggttacctaactgcactgaggatgtttaatagaacatacaaactatacagctacagctatctaggactaggcctgatgagcgcccgcctggctatcctgggcggcgtggaaggtcagcctgcaaaagacggaaaggaactcgtatctccctgtctctcccccagttttaagggtgaatgggagcacgccgaggttacttatagggtttctgggcagaaggcttag

SEQ ID NO: 186305 - DNA, 453 bp, synthetic construct
  misc_feature 1..453: note = Description of Artificial Sequence: Synthetic coding sequence
  source 1..453: mol_type = other DNA
tgacccggccggggcagccccaaggaccggctgccccccgccccccgcaaaagagctctcgtcagcgttggggtggccgagcgtgccgtgcacgagaccccaacactgacacacgagactttcaaagccctcaagccaggactgtctgcttacgctgatgacgttgaaaaagtcaagaaagtgttcaaagcctccccatttttggtgggagatgactgtgtgtcgatcatgaatggcactgatgaaggtgtctcagcatggataactataaactttctgaccggaagtttgaagacaccaggagggtcctcagtcggcatgctggatctcggcggtggttcaacccaaatcgcgtttttacccagagttgaaggcactcttcaagcgtccccacctggttacctgaccgcccttcggatgtttaaccgcacatataaactgtattcctactag

SEQ ID NO: 186306 - DNA, 1314 bp, synthetic construct
  misc_feature 1..1314: note = Description of Artificial Sequence: Synthetic coding sequence
  source 1..1314: mol_type = other DNA
atgaagaagggcatccggtacgagaccagccggaagaccagctacatttttcagcaaccacagcacggaccctggcagactcgtatgcgaaagatctcaaaccacgggagtttaagggtcgccaaggtggcgtatcctttaggactgtgtgtgggcgtatttatctatgtagcttacattaagtggcatcgcgctacagctacacaggcattcttcagcatcacacgtgctgcacccggagctaggtggggtcagcaggcccacagtccactagggaccgccgcagacgggcacgaggtgttctatggaattatgtttgacgcggggtcaaccggaacgagggttcacgtatttcaatttacccgccccccccgagagacgcccaccctaacgcacgagacctttaaagctctcaagccagggcttagcgcttatgctgatgatgtggagaaaagtgctcaaggtattagagagcttctcgatgtcgccaaacaggatatccctttcgatttttggaaggcaacacccctcgtgttaaaagctacggccggactcaggctactgcctggggagaaagcccagaagctgctgcagaaagtaaagaaagtgttcaaggctagccccttcctcgtgggggatgactgtgtctccatcatgaatgggaccgatgaaggggtaagcgcttggattacgattaattttcttaccggttcattgaagacccccggaggtagtagcgtcggcatgctggatctgggcgggggttctacccagatcgccttcttgcctagggttgaaggaactctgcaggcatccccacccggttatctgactgccctccgcatgtttaaccgaacctacaagctgtactcatattcctacctcggcctcggattgatgtctgctcgtctggctatccttgggggggtggaagggcaaccggcagcttcgttgcatgaattgtgtgccgcacgcgtttctgaggtgctccaaaatagggttcatcggacagaagaagtcaaacacgtggacttctacgcattttcatattactacgacctggcagcaggagtgggactcatcgatgctgagaaaggtggatccctggttgttggagacttcgagatcgccgccaaatacgggggcagtcacttagagagggagggaacgtgtctgataccaagtgtaagtgaccctggcgataccgccgccgaacaaccattgctgatgcatggtcctcatttacggcagccggccacacctggcgttaggctgtctcaggaacagtccgcagaagctcactccgaaaactag

SEQ ID NO: 186307 - DNA, 945 bp, synthetic construct
  misc_feature 1..945: note = Description of Artificial Sequence: Synthetic coding sequence
  source 1..945: mol_type = other DNA
tgaaaccggggcgtggtgagccggggctggcggcccggctggcggagacccgggagaggctcaccaaaagatcgactgcccccagctcctaggaagcgggcgctggtttcagtcggcgttgccgagcgtgctgttcatgaaacccccactctcacacacgagacattcaaagcactgaagccaggcctcagtgcatatgccgacgacgtggaaaaaagtgcacaaggcatacgcgaactgctggacgtagctaagcaggatatcccgttcgacttctggaaggcaaccccactcgttctgaaagccactgcagggctgcgactcctcccaggggaaaaggcccagaaacttctgcagaaggtgaaaaaggttttcaaggcctctcccttcctagtaggcgacgattgtgtcagcattatgaacggaacggacgagggagtgagtgcctggatcaccattaatttccttactggcagtttgaagacacccggcggatcatctgttggaatgctggatctgggagggggcagcactcagatagcgtttctgcctcgcgtcgaaggtaccctgcaggcttccccccctggctacctgactgccttacgaatgttcaatcgcacttataaactgtattcgtactcgtacctgggacttggcctcatgtctgctcgtctcgccatcctgggtggcgtggaaggccagcctgccaaggatggaaaggagcttgtctccccctgcctgtcaccttctttcaagggcgaatgggagcatgctgaggtgacgtaccgcgtgagtgggcagaaggcagctgcctcactgcatgaactctgcgctgcccgtgtttctgaggtgctgcagaatcgtgttcaccgtactgaagaagtcaagcacgtagacttctacgccttcagctactattatgacttggccgccggagtggggtag

SEQ ID NO: 186308 - DNA, 567 bp, synthetic construct
  misc_feature 1..567: note = Description of Artificial Sequence: Synthetic coding sequence
  source 1..567: mol_type = other DNA
atgaagaagggcatccggtacgagaccagccggaagaccagctacatttttcaaccgcagcacggcccttggcagactcgcatgcgcaaaatttcaaaccacggatctctcagagttgctaaggtagcttatcccctgggcctctgtgtcggtgttttcatttatgttgcctatatcaaatggcaccgggcgacagctacccaggccttctttagcattaccagagctgctccaggagcacggtggggacagcaggcccactctccattgggcactgccgcggacggccatgaggtgttttacggtattatgttcgatgcagggtcgaccggtactagggtccacgtctttcagtttacaaggccaccaagggagacccccaccctgacccatgaaacctttaaggcgctaaagccaggcctgtccgcctatgccgacgacgtggaaaagtctgcccagggaatcagggaacttctcgatgtggccaagcaggacatcccatttgacttctggaaggccactccactcgtcttgaaggcaaccgcagggcttcgtctgctcccttag

SEQ ID NO: 186309 - DNA, 891 bp, synthetic construct
  misc_feature 1..891: note = Description of Artificial Sequence: Synthetic coding sequence
  source 1..891: mol_type = other DNA
atgccccagcacggcccctggcagacccggatgcggaagatcagcaatcatggcagcctgcgggtggctaaggtggcctatcctctgggcctgtgtgtgggagtgttcatctacgttgcttacatcaaatggcacagagcaactgctactcaggccttcttctctatcacaagggccgccccaggcgctcggtgggggcaacaggctcacagcccacttggaactgcagcagacggtcatgaagtattttacggtattatgttcgacgctggtagtactggaactcgcgtgcacgtcttccagttcaccaggcctccccgagagacccctactctgactcatgaaacattcaaggcactcaagcctggcctgtctgcctacgcagatgatgttgagaaaagtgcccagggtattagggaactgctggacgtggccaagcaggacatccccttcgatttctggaaggctacaccactcgttttaaaggccactgccgggttgaggctgctgcccggcgagaaggctcagaaactcctgcagaaggtgaagaaagtgtttaaagcctccccattcctcgtgggggatgactgcgtcagcatcatgaatggcaccgatgagggggtgagtgcgtggattactataaatttcctcacaggctccctcaagacacccggcggttcatccgtcggaatgctcgacctcgggggcggttccacgcagatcgcctttctaccaagggtggaggggaccctgcaggcatctccacctggataccttacggccctaagaatgttcaaccgcacatataagttatacagctactcgtatctgggccttgggctgatgtctgcccgcctcgctatcctggggggagtagaaggccagccttag

SEQ ID NO: 186310 - DNA, 936 bp, synthetic construct
  misc_feature 1..936: note = Description of Artificial Sequence: Synthetic coding sequence
  source 1..936: mol_type = other DNA
tgaggcagcaccggcacccgggtgcacgtgttccagttcacccggccccccagggagacccctacactgacacacgaaactttcaaagctctgaagccaggcctgtctgcttacgccgatgacgtcgagaaaagtgcgcaaggcatccgcgaacttctggatgtcgcaaagcaagacattccgttcgatttttggaaggcgacaccactagtccttaaggctacggccgggctgcgcttactgccgggggagaaggcccagaagttgctgcaaaaggttaagaaggtttttaaagccagcccttttctggtaggagatgattgcgtctctataatgaacggcacggatgaaggggtctccgcttggattaccattaatttccttacaggctcactgaaaaccccaggggggtcttccgtcggaatgttagatctcggtggcgggtctacccagatcgcatttctgcctagagtcgagggtacattgcaggccagcccgcctggctacctgacagctttgcggatgttcaataggacatacaagctctactcatatagctatctggggctaggtctgatgtcggcgcggctggccattttaggtggcgtcgaaggccagcccgccgccagcctgcacgaattatgcgccgcgcgggtaagcgaggtcctacagaatagggtccacagaaccgaggaggtcaagcatgtagacttctacgctttctcgtattattacgatttagcagcaggcgtggggcttatagacgcagagaaaggcggttctctggtcgtgggcgattttgagattgctgccaagtacgtctgtcggacattagagacgcaaccccaatcctcccccttctcttgcatggatttaacatatgtctctcttttgttgcaggaatttggattccctaggtccaaggtcctcaagtag

SEQ ID NO: 186311 - DNA, 942 bp, synthetic construct
  misc_feature 1..942: note = Description of Artificial Sequence: Synthetic coding sequence
  source 1..942: mol_type = other DNA
aaccggggcgtggtgagccggggctggcggcccggctggcggcggccgggacgcggatcccctaaagatcgcctgccacctgcaccacggaagcgggccttggttagcgtaggtgtggctgagcgggcagtacacgaaacacccacactgacccatgagacttttaaagcacttaaacccggacttagtgcctatgcagacgacgttgagaaatctgctcagggcataagagagctgttggacgttgcaaaacaggacattccattcgacttctggaaggccaccccattagtgctcaaggccacggcgggtctgcgattgttgcctggggagaaggcccagaagttgcttcaaaaggtgaagaaggtgtttaaagcctctccttttctggttggtgacgattgtgtctctattatgaacggcacagatgagggcgtaagtgcctggatcacgattaacttcctgactgggagcttaaagactccaggcggcagttcagtgggcatgctcgacctgggaggcggatcaacccaaatcgccttcctgccccgtgtggaaggaacactgcaagcctcaccaccaggataccttaccgcactgagaatgttcaataggacatataaactctattcctactcttatctaggactcggactgatgtccgcccggctcgccatcctgggaggcgtggaaggccagccggcaaaagatggaaaagagctggtgagtccgtgtttatctccaagttttaaaggtgaatgggagcacgcagaggttacttatcgagtgtcgggacagaaagctgcagcctcacttcacgagctctgcgcagcccgcgtctcggaggtgctgcaaaaccgggtccatcgcacggaagaagtgaaacacgtggacttctatgccttttcatactactacgaccttgccgcaggtgttggctag

SEQ ID NO: 186312 - DNA, 2778 bp, synthetic construct
  misc_feature 1..2778: note = Description of Artificial Sequence: Synthetic coding sequence
  source 1..2778: mol_type = other DNA
atggagcgggacggctgcgccggcggcggcagccggggcggcgagggcggtagagctccccgcgaaggccccgccggaaatggcagggatcgcgggagatcccacgctgcagaggccccgggggacccccaagccgcggccagcctgctcgccccaatggatgtgggtgaagaacccctggagaaagctgcccgggctcgtactgccaaggatcccaacacctacaaggtcttgtcactcgtgctctcagtgtgcgtgctaaccaccatcctcggctgcatctttggtctcaagcctagctgtgcgaaagaggtgaaatcatgcaagggaagatgcttcgagcgcaccttcggaaattgccgctgtgacgccgcctgcgtcgagctaggcaactgctgcctcgactaccaggagacctgcatcgagccagagcacatttggacctgtaacaaatttaggtgtggcgagaagcgcttaactcgctctctgtgcgcctgtagcgacgactgtaaagacaagggtgattgttgtatcaactactcctcggtgtgccagggcgagaaatcctgggtggaggagccctgcgaaagtattaatgaacctcagtgtccggccggatttgagaccccccctactctcttgttttccctcgacggtttccgagccgagtatcttcatacgtggggaggtctcttgcccgtcatctcaaagttaaagaagtgtggcacctacacaaagaacatgaggcccgtctaccccaccaaaacattccctaatcactactcaattgtgacgggactgtatccagagtcccacggcatcatcgataacaagatgtatgaccctaaaatgaatgcctccttcagcctcaaaagcaaggagaagttcaatccagaatggtacaagggggagcctatttgggtgactgccaaataccaggggctgaaatctgggacctttttttggccaggctctgatgtggaaatcaacgggatcttccctgatatatataaaatgtacaacggctctgtccctttcgaggagcgcattttggctgttcttcagtggttgcagctccctaaggatgagcgcccacacttttatacgctgtatctcgaggagccagacagttctggacactcttatgggccagtgagttcagaagtgatcaaggccctgcagagagtggatggaatggtggggatgctaatggatgggctgaaagaactcaacctgcacagatgtttgaacctgatcctcatcagcgaccacggcatggagcaggggagctgcaaaaaatatatctatctcaacaaatatctcggggatgtgaagaacattaaagtgatttatggaccagccgcaaggctgcgcccaagtgacgtgcccgataagtattactcctttaactacgaggggatagcccggaatctttcttgtcgggaaccgaatcagcattttaagccttatctgaaacatttccttcctaaacgactccattttgcaaaaagcgacagaattgagcccctgaccttttatcttgacccccagtggcaactcgccttgaatccatccgaaagaaaatattgtggttctggctttcacgggagcgataatgtgttttccaacatgcaagccctgtttgtaggttatgggccagggttcaaacacggcattgaggctgacactttcgagaacatcgaagtgtataacctgatgtgtgatcttctgaatctgacacccgcaccaaataacggaacacacggtagtctgaatcacctcctgaaaaacccggtttacacccctaaacaccctaaggaagttcaccccctggtccagtgtccgtttaccaggaaccctagggacaacctaggctgctcctgtaacccctccatcctgccaatcgaggactttcagacacagttcaacttgaccgtagccgaggagaagataattaagcacgagaccctgccttacggccgacctagggtccttcagaaagaaaataccatctgtctgctgtctcaacatcagttcatgtcgggttacagtcaggatatccttatgcctctgtggaccagttacacggtagatagaaatgacagtttttcaacagaggatttcagcaactgcctctaccaggattttcggatccccctttcacccgtccacaaatgttccttctataagaataatacaaaagtgagctatggctttctctcacctcctcaactaaataagaacagctccgggatctactctgaagccctgctaacaacaaacatcgtacccatgtatcagagtttccaggtgatctggcgatactttcacgatacacttttgcgcaagtatgccgaggaaagaaatggggtgaacgtggtgtcaggccctgtgtttgatttcgactacgatggtcgatgcgattccctcgagaacctcagacagaagagacgggtgatacgaaatcaggaaatattgatccctacccacttcttcattgtcctgacgagctgcaaagacaccagccagactcccctacattgtgaaaacctcgacacactcgcgtttatcctccctcacagaacggacaatagtgagagctgcgtccatggcaagcacgatagcagttgggtcgaagagcttcttatgttacatcgagcacgaatcaccgatgtcgaacacatcaccggactcagcttttaccaacagcggaaggagcccgtgagcgatatccttaagttgaaaacgcacctgccgaccttctcccaggaggactag

SEQ ID NO: 186313 - DNA, 2592 bp, synthetic construct
  misc_feature 1..2592: note = Description of Artificial Sequence: Synthetic coding sequence
  source 1..2592: mol_type = other DNA
atggcccggcggagcagcttccagagctgccagatcatcagcctgttcacctttgctgtgggagtgaatatctgtctgggcttcacagctcatagaatcaaaagggctgaaggatgggaggaaggaccccctacagtcttatccgattcaccctggaccaacatatcgggatcatgtaagggtcgatgctttgagctgcaggaggctgggcccccagattgcagatgtgataacctgtgcaagagttataccagctgttgccatgattttgatgaattgtgtctaaagactgccaggggttgggaatgtacgaaagaccggtgtggcgaagtgaggaacgaggagaatgcctgccactgcagtgaggattgtttagcaagaggggattgctgtactaactaccaagtagtatgcaagggggaaagccactgggttgacgacgattgcgaagagattaaagccgccgagtgtcccgccgggtttgtgcgtccacctctgatcatctttagtgttgacggatttcgcgcctcttatatgaagaaaggctctaaggtgatgcctaacattgaaaagctgaggagctgtgggacacattccccgtatatgaggcccgtgtaccccactaaaacatttcctaacttgtacaccctcgcgaccggcctgtatcccgaaagtcacggcatcgtgggcaatagcatgtacgaccctgtcttcgatgccacgttccacttacggggaagagagaaattcaaccacagatggtggggcggacaacccttgtggattacggcgacaaagcaaggagtgaaggccggtaccttcttctggagcgtcgtaatcccgcacgagcggaggatactgaccatcctacagtggttgactttacctgaccacgaaaggcctagcgtatacgcgttttactcagagcagcccgatttctccggccataagtacggcccctttggacccgagatgaccaaccctctgagagagatcgataaaattgtgggacagttaatggatgggctcaagcagctgaagcttcacaggtgcgtcaacgtgatatttgtaggtgaccatgggatggaggacgtcacatgtgaccggactgagtttctgagcaattatcttactaatgtggacgatattacgctggtcccgggaactctggggcggattcgcagcaagtttagtaataacgcaaagtacgatccaaaggcaattatcgcaaacctaacatgtaagaagccggaccagcactttaagccctatctgaagcaacatctgcctaaaagattacactacgccaacaatagacgcattgaagacatacacctgctggtggagcggagatggcacgtagcccggaaacctctggatgtgtataagaagccttcaggtaagtgttttttccagggagaccacgggtttgacaataaagttaacagtatgcagacggtcttcgtgggctacggctccacctttaagtacaagacaaaagtgcctccattcgagaacatcgaactatacaacgtgatgtgcgatctgttgggattgaagccagctcctaacaacggtacccacggctccttgaatcacctactgaggactaatacattccgtcccacaatgcccgaagaagttacccgacctaattatccggggataatgtacttacagtctgatttcgatttgggttgcacctgcgatgacaaggtggaaccaaaaaataaactggatgaactcaataagcgcctgcacacaaaaggcagcacagaagagcggcatcttttatacggcaggcctgccgtcctgtaccgcacccgttacgatatcctttaccacacggactttgaaagtggatactctgaaattttcctgatgcccctttggacctcttacactgtgtccaagcaggctgaggtttcctccgtgccagaccacctcaccagctgcgtgagaccagatgtaagagtttctccgagcttttcccagaactgtctagcctataagaatgacaagcagatgtcttacggattcctgttcccgccatacctatccagcagtcccgaagctaagtacgatgcctttttggtgaccaatatggtgcccatgtacccagcctttaagcgggtgtggaattactttcagagagtactcgttaagaagtatgcaagcgagcggaacggagtaaatgtgatctcagggcccatatttgactacgattatgacgggctccacgacaccgaggataaaatcaaacagtacgtagagggatcctcaattcccgtccctacgcattactactctataattactagctgtttagacttcacacagccggccgacaagtgcgacggcccattgagtgtcagctccttcattttgccacatagacctgacaacgaagaatcttgtaatagcagcgaggacgaaagcaaatgggtagaagagcttatgaaaatgcatacggcccgcgtgagggacatagagcatctcacatctcttgattttttcaggaagactagccggtcttacccagaaatccttaccttaaagacctacctacacacctatgagagtgagatatag

SEQ ID NO: 186314 - DNA, 2748 bp, synthetic construct
  misc_feature 1..2748: note = Description of Artificial Sequence: Synthetic coding sequence
  source 1..2748: mol_type = other DNA
atggcccggcggagcagcttccagagctgccagatcatcagcctgtttacctttgccgttggagtgaacatttgcctcggctttactgcgcataggatcaaaagagccgaaggatgggaagagggcccccccaccgtgttgtccgacagcccttggacaaacatatcaggctcctgcaagggtaggtgttttgaattgcaggaagccgggccacctgactgtcgctgtgacaacctctgcaaatcctatacatcctgttgccatgactttgatgaactctgcctgaagacagccaggggatgggagtgcaccaaggacaggtgcggtgaggttcgcaacgaagagaatgcatgccactgctctgaagattgcttagctaggggcgattgctgtaccaactaccaggtggtatgtaagggagaatctcattgggtagacgacgactgcgaagaaattaaagccgctgaatgtcctgccggattcgtcagacctcctctcatcattttttctgtagacggttttcgcgccagttatatgaagaagggtagcaaagtgatgccaaacattgagaagctcagatcatgtggaacccattccccctacatgaggccagtctaccctactaaaacttttcccaacctgtacaccctggctacgggtttgtaccccgagtctcacggcattgtaggcaatagtatgtatgatcctgtcttcgatgccacattccacctcagagggcgggagaagttcaatcatcgatggtggggaggacaaccattgtggatcacggccactaagcaaggggtcaaggccggcacatttttttggtccgtggttattccacacgaacgcaggatcttgaccatattacaatggttaacccttcctgaccatgaacggccctccgtgtacgcattttattctgaacagcccgatttttctggacacaagtacggaccttttggtcctgaggagagcagctacggatcaccctttacacccgccaagcgtccgaaaagaaaggtcgcacctaaacgacgacaggaacggcccgtcgccccgcccaaaaaacggcggcggaagatccaccggatggatcactacgctgcagagacacgccaggacaaaatgacaaatccgctgcgggagatcgacaaaattgttggacagctgatggacggcctgaagcagctgaagctccaccgttgcgtcaatgtcatcttcgtgggcgaccatggcatggaagacgtgacttgtgacaggaccgaattcctgtctaactatctaacgaacgtggatgacattaccctggtgccgggtaccttagggcgtatcaggtctaaatttagtaataatgccaagtatgatcccaaggcaataatcgccaatctgacctgtaaaaagccagaccagcactttaaaccctatctcaagcaacaccttcctaagagattacactatgctaacaacaggcggatagaggatattcatctgctcgtagagagaagatggcatgttgcgaggaagccactggatgtctataaaaaaccttctggaaaatgcttcttccaaggcgaccatggattcgataataaggtcaactcgatgcagaccgttttcgtgggctatggcagcacatttaagtataaaacaaaagtgcctcccttcgaaaacatcgagctctataacgttatgtgcgatctgcttggacttaagcccgctccaaacaacggaacacatggttctcttaaccacctacttaggacgaacacattcagacccaccatgccggaagaggttacccgtcctaattaccctggaatcatgtacctgcagtcggactttgatttgggctgtacctgcgacgataaggtggaacccaaaaacaaactcgatgagctgaacaagcgcttacacaccaagggatcaaccgaagagagacatttgctctatggccggccagcagtgttgtaccgtactcgctacgatatactctaccataccgacttcgaaagcggctactcggagatctttctgatgccactttggaccagctacactgtctccaagcaagctgaggtcagctctgtaccagatcacctcacctcatgcgtaagacccgatgtgagggttagcccttcttttagtcagaactgcctggcttataagaatgataaacaaatgagctacggatttcttttccctccatacctgtcctcctcacctgaggcgaagtatgacgccttcctggtcacaaacatggtcccaatgtaccccgcatttaagagagtctggaactacttccagagggtcttagttaaaaaatatgccagcgaacggaacggcgttaatgttatctctggccccatctttgactacgactacgacgggctccatgacacagaagacaaaatcaaacagtatgtggaagggtcctctatccccgtccccacgcactactattccattatcaccagctgcttggacttcactcagccggccgacaagtgtgacggaccactttccgtctccagctttatcctgccccatcgccctgacaatgaagaatcctgtaacagctccgaggatgaatctaagtgggtggaagagctgatgaagatgcacacagctagggttcgggatatcgagcacttaacatcgttggacttttttcgcaaaactagccggtcgtatccggagattctaacccttaaaacttatctgcatacatatgaatctgagatctag

SEQ ID NO: 186315 - DNA, 2667 bp, synthetic construct
  misc_feature 1..2667: note = Description of Artificial Sequence: Synthetic coding sequence
  source 1..2667: mol_type = other DNA
atggcccggcggagcagcttccagagctgccagatcatcagcctgttcacatttgctgttggggtgaatatatgccttggatttaccgcccaccgcatcaagagggctgagggatgggaggagggacccccaacggtcctctcagactcaccttggaccaacatcagtggatcctgtaagggccgctgctttgagctgcaagaggccggtcctccagattgccgctgcgataacctgtgtaaatcctacacaagttgttgtcatgactttgatgaactgtgcctgaaaactgccagaggctgggagtgcacaaaggaccggtgtggggaagtgaggaacgaggagaatgcgtgccactgttccgaagattgtttagcccgcggcgattgttgtactaattatcaggttgtctgtaaaggcgagtctcattgggtagatgatgactgtgaggagatcaaagccgcagaatgccccgcgggcttcgtccgcccacctcttattattttctcggtagatggattcagagcttcctacatgaagaaagggtccaaagtcatgccgaatattgagaagctgcggagttgcggaacgcattctccctacatgcgccccgtgtaccctacaaagacctttcccaacctgtacacccttgccaccggactttacccggaaagtcatggaatagtgggcaactcgatgtacgatcccgtcttcgatgccacctttcacctaagaggccgcgagaagttcaatcatcgctggtggggcggacaacctctctggattaccgccactaaacagggagtgaaggcaggcacattcttctggagcgtggtcattccacatgagcgccggattctgacgattttgcagtggttgaccctccccgaccacgagagaccttcagtgtacgctttttattcagaacagcctgactttagtgggcacaagtacgggccctttggacctgagatgactaaccctcttcgggagatcgataagatagttggtcagctcatggatggtctgaaacagttgaagctacaccgctgcgtgaatgtcattttcgtgggcgatcatggtatggaagatgtgacttgtgaccgaaccgagttcctctctaactatctgacaaatgtcgacgacattactttggtcccaggaaccctgggcagaatccgatccaaatttagcaacaatgctaaatacgatccaaaagccattatcgccaacctgacttgtaagaaacctgaccagcacttcaagccctacctaaaacagcatttgccaaagcgactccattatgccaataataggcggattgaggatattcatttactggtggaacgcagatggcacgtggccagaaagccgctggatgtatacaagaagccctctggcaagtgcttcttccagggagaccacgggtttgacaacaaggtgaacagcatgcagacagtgttcgtggggtatggtagtaccttcaaatacaaaacgaaggttcccccttttgagaacatcgagctctataacgtgatgtgcgatctgctgggtcttaagcctgctcctaataacgggacacacgggtctctaaaccatctgttgcgtaccaatacctttcgacctacgatgcccgaggaagtgacccgcccaaactatccagggatcatgtatctgcagagcgattttgacttggggtgtacctgcgatgacaaggtcgagccaaaaaataagctggatgaactgaataagaggctgcacacaaaagggtccaccgaagcagagaccaggaagtttaggggatcgcggaacgaaaataaggaaaacataaatgggaactttgagccacgtaaagagcgacacttactgtacgggcgcccagccgtgctataccggaccagatatgatatcctgtaccacaccgactttgagagcggctactctgagatttttcttatgcctctatggacttcatataccgtgagcaagcaggcggaagtgagcagtgtccccgaccatctgacatcatgcgtgcgacccgatgtgcgagtaagtcctagtttctcgcagaattgtcttgcatacaagaacgataaacagatgtcatatggcttcctgttccccccatacttgagttcgtcacccgaggccaagtatgatgcctttctggtgacaaacatggtcccgatgtatccagcctttaaaagagtgtggaactacttccagagggttctggtgaagaagtatgccagcgaaaggaatggggtaaatgtgatcagtggccccatctttgattacgattacgacggtttgcatgacacagaggacaaaataaagcagtacgtggagggttctagcattcctgtacctacgcattattactccatcatcacaagctgcctggatttcacccagcccgccgacaaatgcgacggaccacttagtgtgtcctcgtttatactcccccatagacccgacaatgaagaaagctgtaactcctccgaagacgaatctaaatgggtggaggagctaatgaagatgcacaccgcccgagtgagagacatcgaacacctaacttctctggatttttttcgaaaaacatctcgaagctaccccgagatcctcaccctgaaaacctatctccacacctatgaatcagaaatatag

SEQ ID NO: 186316 - DNA, 2628 bp, synthetic construct
  misc_feature 1..2628: note = Description of Artificial Sequence: Synthetic coding sequence
  source 1..2628: mol_type = other DNA
atggagagcaccctgaccctggccaccgagcagcccgtgaagaagaacactttgaagaaatacaagatagcttgtatcgtgctcctggccctacttgtgattatgagcttgggcctcgggttagggttggggctgcgcaagctcgagaaacagggatcttgcaggaagaagtgttttgatgcttcctttaggggtctcgaaaactgtagatgtgacgtggcctgtaaggataggggcgactgttgctgggattttgaggatacttgtgtggagtccacccgcatctggatgtgcaacaaatttagatgcggggaaacaagactggaagcaagcttgtgctcgtgtagcgacgattgcctacaacgtaaagactgttgcgcggattacaaatcggtttgtcagggcgaaaccagctggctggaagagaactgcgataccgcacagcaaagccaatgtcctgaaggtttcgaccttcctcctgtcattctcttttccatggatggtttccgggctgagtatttatatacgtgggacactctaatgccgaacatcaataaactgaagacatgtggtattcattcaaaatacatgcgcgccatgtatcccaccaagacttttcccaaccactatacgattgtgaccggcctgtatccggaaagtcatggaatcatcgacaacaacatgtatgatgtgaacctgaacaagaacttttccttgtcatctaaggagcagaacaacccagcctggtggcacggtcagcccatgtggctgacagctatgtaccaggggttgaaggccgctacatacttctggccaggatctgaggtggcaattaacgggtcctttcctagcatctatatgccctacaacggatcggtcccctttgaggaacgaatctccaccctgctaaaatggctggatttacctaaggccgaaaggccaaggttttacaccatgtatttcgaagagccagacagttccggccatgccggagggcctgtttcagcgagagtgatcaaggcactgcaggttgtcgaccatgcattcgggatgctgatggaaggactaaagcagaggaacctccacaattgcgtcaatatcatactcctcgcagaccacggaatggatcaaacctactgtaacaagatggaatacatgaccgattattttcccagaataaacttcttctatatgtacgagggacctgcaccccggatacgcgcgcataatatcccccatgattttttctcattcaacagcgaggagatagtgcgtaatttgagctgcaggaagcctgaccaacactttaagccatatttgacaccagatttacctaagagactgcactacgccaaaaatgttagaatcgacaaggtccatttgttcgtggaccagcaatggctcgctgtacgctctaagtctaacacaaattgcggagggggcaaccacggctataataacgagttcaggagcatggaggctatctttctggctcatggtccatcattcaaggaaaagacagaggtagagccattcgaaaacatcgaagtgtataacctaatgtgtgacctactccgcattcagcccgcccccaacaacgggactcacggctccttgaatcatctacttaaagtgccattttatgagccttcccatgcagaggaggtgagcaaattcagcgtctgtggattcgccaatccacttccaactgagagtctcgactgtttttgtccacatctacaaaattccacccagctggagcaggtcaatcagatgcttaaccttacccaggaggagattactgccactgtgaaagtcaatctgcccttcggcagaccaagagttctgcaaaaaaatgtggatcactgtctcctgtatcacagagaatacgtcagtggctttgggaaggcaatgcggatgcccatgtggtctagttatacggtgccacagttaggagatacatcacccctgccccccaccgtccccgactgcctcagagctgatgtgcgcgtgcccccatccgaatctcaaaaatgcagcttctacctggccgataagaacatcactcacggattcctgtaccctcctgcgtccaaccgcacatccgactcccagtatgacgccttgataacatctaatctcgtacctatgtacgaagaatttagaaagatgtgggattatttccacagtgtgctcctgatcaagcatgccactgagcgaaacggagtgaacgtggtgtccggacctatctttgactacaactatgacggccacttcgatgcccctgacgaaatcaccaagcatctggctaatacagatgtccccattcctacgcattattttgtggtcctcacctcttgtaagaacaagagtcacactcccgaaaattgccctggctggttggacgtgctgccctttatcattcctcaccggccaacaaatgtggaatcctgccctgagggtaaaccagaggccctatgggtggaggaaaggtttacagcacacatcgcgcgcgtaagagatgttgagctgctcacagggctggacttctatcaggacaaggtccagcctgtctcggaaatcctgcagctcaagacatacctcccaaccttcgaaacaactatttag

SEQ ID NO: 186317 - DNA, 1992 bp, synthetic construct
  misc_feature 1..1992: note = Description of Artificial Sequence: Synthetic coding sequence
  source 1..1992: mol_type = other DNA
atggagagcaccctgaccctggccaccgagcagcccgtgaagaagaatacactgaaaaagtacaagatcgcatgcattgtgttgcttgcactgctggtcattatgtcactgggactcggcctgggcctgggcttgaggaagctggagaaacaagggagttgccggaagaagtgctttgatgcttcgttccggggcctcgaaaattgtaggtgcgacgtggcatgcaaagacaggggagactgctgttgggactttgaagacacatgcgtcgagtccactagaatctggatgtgcaataagtttcggtgtggggagaccaggttggaggctagcttgtgcagttgtagcgatgactgtctgcaacgaaaagactgctgcgccgactataagagcgtctgtcagggtgaaacttcgtggctcgaagagaactgcgatactgcacaacagtcgcagtgtcccgagggcttcgacctcccacctgttatcctcttttctatggacggctttcgtgcagagtatctgtatacctgggacaccctgatgcctaatatcaacaaactgaagacttgtggcatccactccaaatacatgcgagctatgtatccaacaaagacttttcccaaccattacaccatagtaacaggtctttacccggagagccacggcattatcgacaataacatgtatgacgtgaacctcaataagaacttttccctctcctccaaggagcagaacaacccagcctggtggcacggacaacccatgtggctcaccgcaatgtaccagggcctgaaggccgctacatacttttggcccggcagcgaggtggcgatcaacggttcatttccctccatttatatgccatataatggcagcgtgccattcgaggagagaatttctaccctactgaagtggttagacctgcccaaagccgaacgccctaggttctacaccatgtattttgaagaacccgatagctcgggccacgcgggaggccccgtgtctgcccgagtgatcaaagctttgcaagtagtagaccatgcctttgggatgttgatggagggtttgaagcagcggaatctgcataactgtgttaatatcatccttctcgctgaccacgggatggatcagacctattgcaataagatggagtatatgaccgattacttccccaggatcaattttttttatatgtacgaagggcctgcaccgagaatcagggcacacaatatccctcatgacttcttcagcttcaactccgaggagatagtgagaaacttgtcatgcagaaaacctgaccagcacttcaagccttatctcacccctgacctcccaaagagactgcattatgccaagaatgtaagaatcgacaaagttcacttgtttgtggaccagcagtggcttgccgtgcgctccaagtccaacacgaattgtggcgggggcaaccatggctataacaatgagtttcgtagcatggaagcaatttttctggcacacggtccatcttttaaggaaaagacggaagtggagccattcgagaatatcgaggtgtataatctcatgtgtgatctgctgagaatccagcccgcccctaataacggcactcatggctccctgaatcacctcttaaaagtgcccttctatgagccaagccacgccgaagaggtctcgaaattctccgtctgcggatttgctaatccgctccctacagagtccttagactgtttctgtcctcacctccagaatagcacccagctggagcaggtgaaccaaatgttgaacttgacccaagaggaaataaccgcgactgtaaaggttaacctaccattcggaagaccccgtgtgcttcagaaaaatgtggaccattgcctactgtaccaccgggaatatgtgtctggatttgggaaggctatgcgcatgcccatgtggagctcgtacacagtgccgcagcttcccgccatagaacatcagattgccaacatgatgctgtag

SEQ ID NO: 186318 - DNA, 2628 bp, synthetic construct
  misc_feature 1..2628: note = Description of Artificial Sequence: Synthetic coding sequence
  source 1..2628: mol_type = other DNA
atggagagcaccctgaccctggccaccgagcagcccgtgaagaagaacacgctgaaaaagtataagattgcttgtatcgtcctgctcgccctgcttgtcattatgtccctcgggctgggcctaggtctgggcctcaggaaattggagaaacaagggtcatgtcgtaaaaagtgttttgatgcaagtttccgcggattggagaactgccggtgtgacgttgcgtgcaaggacaggggtgactgctgctgggactttgaggacacctgcgttgaatcaactcggatttggatgtgtaacaagtttagatgtggggagacccgcctcgaggccagtctttgcagctgtagcgacgattgcctgcagcgaaaggactgctgcgccgattataagagcgtgtgccagggcgagacctcctggttggaagagaactgtgatactgcgcaacagtcacagtgtccggagggatttgacctacccccagtgattctatttagcatggacggcttccgcgcggagtacctgtacacatgggatacattaatgcccaatattaataaactgaaaacctgtggaatccattccaaatacatgcgcgccatgtatcctacgaaaacgttccccaatcactacactattgtcactggattgtaccccgaatcccatgggattatcgataataacatgtacgatgtgaacctaaataaaaactttagtctgtctagtaaagagcagaataacccagcctggtggcatggacagccaatgtggctgacagccatgtaccaaggccttaaggccgctacatacttctggccgggaagtgaagttgctattaacggctcctttccgtctatttatatgccttataacggctcagtccccttcgaggaaaggatttcaacgttgctaaaatggttggatttgcccaaggccgaaaggccgcgcttttataccatgtattttgaggagcctgactcttctgggcatgcaggaggacctgtttccgcccgagtcatcaaagctttacaggtggtggatcatgcttttggcatgctcatggagggcctcaaacagcggaacttgcacaactgcgttaacattatcctccttgccgaccatggcatggatcagacctactgcaacaagatggagtacatgactgactactttccccgcatcaactttttctacatgtacgaaggcccagcaccaaggatccgtgcccacaatatcccccacgactttttctctttcaatagcgaggagattgtgaggaacctgtcttgccgtaaacccgatcagcacttcaaaccttacctcactcctgacttgcctaagcgtctgcactatgcaaagaatgtgaggattgacaaggttcatctgttcgtcgatcaacagtggctggcagtgaggtctaaatccaacactaactgtggggggggcaaccatggttataataatgagttccggtctatggaggctatctttctcgcacatggccccagcttcaaagagaagacggaggtcgaacccttcgagaacattgaggtatacaacttaatgtgcgacctcttgcgtatccagcccgcacctaataacgggacccacggttctctcaaccacctcctgaaggtgccattctatgagcccagtcacgccgaggaggttagtaagttttcagtctgtggcttcgcgaaccccctgcccactgagagcttggactgtttttgcccgcaccttcagaactccacccagttggagcaggtgaatcagatgctcaacctgacacaggaagagattaccgctactgtgaaagtaaacctgccattcggtcgtcctcgtgtgctgcagaaaaatgtcgaccattgcttgctttaccatcgggagtacgtgtccggatttggtaaggccatgcggatgcccatgtggtcaagttacacagttccacagttgggagacacctcacctctcccaccaacagttcctgactgtctgcgcgccgacgtgcgagtcccgccctccgagtcccagaagtgcagcttttacttggctgataaaaacataacccatggctttctgtatcctcccgctagcaacagaacctctgactcacaatatgacgccctgatcacaagcaatttggtgcctatgtatgaggagttcagaaagatgtgggattattttcacagcgtactcctgattaaacacgctaccgagaggaatggcgtgaatgtcgtgtccggacccattttcgattataattatgacggacactttgacgctccagatgagattactaagcacttagccaataccgatgtgccgattcccacccattacttcgtggtgttaacctcctgtaaaaacaaaagccatacgccggagaattgtcccggatggctggatgttctgccctttattatcccccaccgcccgacgaatgtagagtcctgtccggaggggaaaccggaggccttgtgggtcgaggagaggtttactgctcacatcgcccgcgtgagggacgtggagctgttgacagggctggacttctatcaggacaaggtccagcctgtttcagagatcctgcagcttaagacctatctgccaacttttgaaactaccatatag

SEQ ID NO: 186319 - DNA, 765 bp, synthetic construct
  misc_feature 1..765: note = Description of Artificial Sequence: Synthetic coding sequence
  source 1..765: mol_type = other DNA
atgagcctgggcctgggcctgggcctgggcctgcggaagctggagaaacagggctcgtgcagaaagaaatgcttcgacgcttccttcaggggtcttgagaattgcaggtgtgatgtcgcctgcaaagataggggtgattgctgttgggacttcgaagacacatgtgtcgagagcacccggatctggatgtgtaacaaattccggtgcggagagacacgcctggaagcttccctctgttcctgctcagatgactgcctccagaggaaggattgctgcgccgattacaagtcagtgtgtcagggtgaaacatcatggctggaagaaaactgcgatactgctcagcagagccaatgcccagagggtttcgatcttccccccgtcattctattttccatggacggattcagggcagaatacctctacacctgggatacgctcatgccaaacatcaacaagctcaagacctgcggcatccacagcaagtacatgagggctatgtacccaactaagacctttcctaaccattacaccattgttaccggcctgtatcctgagagccatgggattatcgataacaatatgtatgacgtgaacctaaataaaaatttttcactgtcttccaaggagcagaataaccccgcatggtggcacgggcaacccgtatgtagcatcctgcatgtggctaccgaggtgacctcaatcagtcagtgtgaccggcgtacattgtttagcctcagcggagcctcctccatgagccccatctag

SEQ ID NO: 186320 - DNA, 774 bp, synthetic construct
  misc_feature 1..774: note = Description of Artificial Sequence: Synthetic coding sequence
  source 1..774: mol_type = other DNA
atgagcctgggcctgggcctgggcctgggcctgcggaagctggagaagcaggggtcatgccgcaaaaaatgctttgatgcttcgtttcgcggcctggagaattgtagatgcgatgtcgcatgtaaagacaggggtgactgctgttgggattttgaagacacatgcgtggagagtactagaatttggatgtgcaataaatttcgctgcggagagacccgcctcgaagcatctctctgcagttgttccgatgactgcctgcagcgcaaggattgctgcgcagactataagtcggtgtgtcaaggagagacatcttggctggaagaaaactgcgatactgcccagcagtctcagtgtccagaaggctttgatctgccacccgtgatattgttttccatggatggtttcagggcagagtacttatatacttgggatactctgatgcccaacattaacaagctaaagacatgcgggattcactcaaaatacatgcgggccatgtatccgaccaagacatttcccaatcactacacaatagttacaggactatatccagaatcccacggaattatcgataacaacatgtacgacgttaatctgaataaaaacttctccctatcaagcaaggaacaaaataatcccgcctggtggcacgggcagcctatgtggctcaccgctatgtaccaggggctgaaggcagccacatacttctggccaggtagcgaggtagccattaacggaagtttccctagcatctacatgccatacaacgggtag

SEQ ID NO: 186321 - DNA, 1200 bp, synthetic construct
  misc_feature 1..1200: note = Description of Artificial Sequence: Synthetic coding sequence
  source 1..1200: mol_type = other DNA
atggccagccccggcaagcccggcgccgacgaggcccaggaggaggaaggcgagctggaaggaggctccgccggtcctcgcgctgcaatcctggaacaggccgaggagctgttccttttgtgtgacaaagaagcaaaaggttttatcactaaacatgatctccagggtctccagtctgatctccctctgacaccggaacagctcgaagctgtcttcgagagcctggaccgagcacatacaggcttcctgaccgcaagagaattctgtctgggactgggcatgttcgtgggagtggcttccgctcaaggcgccaacccgtgtagaacccccgaagagactttcgagagtgggggcctggacgtgcagggaaccgccggaagcctcgacgaagaggaagaggaggaagagagattccacactgtccttgaacagttgggggtggccccggtactcggcaagcaacgcgctgtccggactctgtgggctaggcttcagagggagcggcccgaattgctggggagcttcgaggacgtactcatacgcgcgtcggcttgtctggaggaggccgccagggaacgggatggtctggaacaggcactgcggcgccgcgagtctgaacacgagagggaggtacgcgctttgtacgaagaaactgagcaactgagggagcaatctcgtcgaccccctagccaaaatttcgctagaggtgagcgtcggtctcgcctcgaactggagttacaatctcgggagcaggacttggagcgcgccgggctccggcagcgggagcttgagcagcagctccacgcccaggccgccgaacaccttgaggctcaggcacagaactcacagctgtggcgcgcccacgaagcgttacggacccagctggaaggggcacaggaacagattcgaaggttggagtcagaagccagaggccgccaggagcagacacagagagacgtggttgccgtaagtaggaacatgcagaaagagaaggtaagccttttgaggcagctcgaattgctgcgggagctgaatactaggctgcgcgatgacagggacgcctgcgaggccaggcgcgcggggagcagctgccgcaaagctctcacgactgccagattacctgggccaacatgctgttgctgttgttgttgggctaggcccccgcggcggggatcaggacacttgccatccgcccgatag

SEQ ID NO: 186322 - DNA, 885 bp, synthetic construct
  misc_feature 1..885: note = Description of Artificial Sequence: Synthetic coding sequence
  source 1..885: mol_type = other DNA
atggccagccccggcaagcccggcgccgacgaggcccaggaggaggaaggtgagctagagggaggatcggcagggccaagggctgcaattctcgagcaggctgaggaattgtttctgctgtgcgacaaggaagcaaaaggcttcattaccaagcacgacctccaaggactgcagtcagacctcccactcacaccagagcagctggaagccgtcttcgagtccttggaccgggcccatactggattcctcactgcaagggagttctgtcttggcttaggcatgtttgtgggtgtggccagtgcccagggtgccaatccctgtcggactccagaggaaactttcgagtccggaggtctggatgtgcaggggacggctggtagccttgatgaagaggaggaagaggaggagaggttccataccgtgctcgagcaactgggggtcgctccagtgttgggcaaacaaagagctgtgcggacgctgtgggctcgcctgcagagggaaagacccgagttattgggcagctttgaggatgttttgatcagggcctcagcttgtttggaggaggctgctcgcgagcgcgacgggctcgaacaggcgctccggagaagggagagcgaacatgaaagagaggtcagagcactgtacgaggagaccgaacagcttagggagcagagccgtaggccgcctagtcaaaacttcgctcgaggagaaagacggagtcgcctcgagcttgagcttcaaagcagagagcaggatctagagcgcgccggccttaggcagcgagaacgtcggggcaggagactgcaggagcacgcagagagagagtcacagcctgctacagccactggagctgctcagggggccgagtatacagctgctgggtag

SEQ ID NO: 186323 - DNA, 267 bp, synthetic construct
  misc_feature 1..267: note = Description of Artificial Sequence: Synthetic coding sequence
  source 1..267: mol_type = other DNA
atggccagccccggcaagcccggcgccgacgaggcccaggaggaggagggggaacttgaaggcgggtccgcgggcccacgcgccgcaatactggaacaggctgaggagcttttccttctgtgtgacaaggaagccaagggcttcatcacgaagcacgatttgcagggcctccaatctgatcttccattgactcctgaacagcttgaggccgtctttgaatcgttagatagggcacacaccggatttctgaccgccagagaattctag

SEQ ID NO: 186324 - DNA, 105 bp, synthetic construct
  misc_feature 1..105: note = Description of Artificial Sequence: Synthetic coding sequence
  source 1..105: mol_type = other DNA
atggccagccccggcaagcccggcgccgacgaggcccaggaggaggaaggggagttggaagggggaagtgccggcccaagggcggctatcttggagcaggcctag

SEQ ID NO: 186325 - DNA, 885 bp, synthetic construct
  misc_feature 1..885: note = Description of Artificial Sequence: Synthetic coding sequence
  source 1..885: mol_type = other DNA
atggccagccccggcaagcccggcgccgacgaggcccaggaggaggaaggtgaactggaggggggcagcgctggacctcgggcagcgattctggaacaagctgaggagctcttccttctatgtgataaagaggccaagggttttatcaccaagcacgatttacagggactgcagagcgatctgcccctgactcctgagcagttggaggcggtttttgagagcctagatagagcccataccggttttctcaccgccagagagttttgccttgggctgggtatgtttgttggagttgcgagcgcacagggcgcaaacccttgtagaacgcccgaggaaacgttcgagagtggcggcctggacgttcagggaacagctggttcacttgatgaggaggaagaggaagaggaaagatttcacacggttctggagcagcttggagtcgcaccggtactgggaaaacagagagctgtgcgtaccctctgggccagactccagcgggagcgtccggagctccttggcagctttgaagatgtattgatccgagccagcgcctgtcttgaggaggcagcgcgcgagcgagatggtctggagcaagccttacgacgacgggagtccgaacacgagagggaggtgcgcgccctttatgaggagacagagcagctgcgagaacagtctaggagacctcccagccagaacttcgccagaggggagcggaggtcgcggttggagctggaactacagtctcgagagcaggacttggagcgggcaggtctgcgccagcgggagaggcggggcaggcgattacaggaacacgccgagagggaaagtcaaccagctaccgccaccggagcagcccaaggagcagagtatactgcagcaggatag

SEQ ID NO: 186326 - DNA, 162 bp, synthetic construct
  misc_feature 1..162: note = Description of Artificial Sequence: Synthetic coding sequence
  source 1..162: mol_type = other DNA
atggccagccccggcaagcccggcgccgacgaggcccaggaggaggaaggagaactggaaggaggatctgcaggcccacgcgccgctatcctcgagcaggcagaagagctctttctcctatgtgataaggaggcaaaaggatttatcacaaaacacgattag

SEQ ID NO: 186327 - DNA, 246 bp, synthetic construct
  misc_feature 1..246: note = Description of Artificial Sequence: Synthetic coding sequence
  source 1..246: mol_type = other DNA
atggccagccccggcaagcccggcgccgacgaggcccaggaggaggaaggggagcttgaaggaggcagcgctggaccccgggctgccatactcgagcaagctgaagaactgttcctgctgtgcgataaggaagctaaaggctttattaccaaacacgacttacagggcctccagtctgatctgccgttaacccctgagcagctcgaggccgtcttcgagtcattggatcgggcacatacgggatag

SEQ ID NO: 186328 - DNA, 1188 bp, synthetic construct
  misc_feature 1..1188: note = Description of Artificial Sequence: Synthetic coding sequence
  source 1..1188: mol_type = other DNA
atggccgcccccgacggccgggtggtgagccggccccagcggctggggcagggaagtggtcagggccctaaaggatcaggcgcttgcctccatcctctggattccctggaacagaaggagacacaggagcagacatcaggacagttggtcatgctgaggaaggcacaagagtttttccaaacctgtgacgcagaaggcaaaggctttatagcccgaaaagatatgcagcgacttcataaagagctcccattgagccttgaggagttggaggatgtgttcgacgctctggacgctgatgggaacggatatttgaccccccaagagttcacaacgggtttttcacacttcttcttcagtcagaataatcccagccaggaggacgccggtgagcaggtggcccaacggcacgaagagaaggtctacctgagccggggagacgaggatttaggagacatgggagaagacgaggaggcgcaattcaggatgttgatggaccgacttggtgcccaaaaggttctagaggatgagtctgacgttaaacaactgtggttgcagctgaaaaaggaggaacctcatctattgtccaacttcgaggattttctcactaggataatttcgcagctgcaggaagcccacgaggagaaaaacgaactggagtgcgcattgaagcggaaaattgctgcgtatgacgaagagatccaacatctgtatgaggaaatggaacagcagatcaagagtgagaaggaacagttcctcctcaaagatactgagagatttcaggcccgctcccaggaattggagcaaaagctgctgtgtaaggagcaggagttggaacaattgacccaaaaacagaagcgtctggaggggcagtgcacggctctacatcacgataaacatgagactaaagctgaaaacacaaaactgaaattgactaatcaggaattagcccgcgaactggaaaggacatcatgggaactacaagatgctcagcaacagctggagtccctccagcaagaggcctgcaaattgcatcaggagaaggagatggaggtgtacagagtcacagagtccctgcaaagggagaaagctggtctcttaaagcaactggacttcctaagatgtgtgggcgggcactggcccgtactcagagcaccacctagatctcttggatccgaaggccccgtctag

SEQ ID NO: 186329 - DNA, 2196 bp, synthetic construct
  misc_feature 1..2196: note = Description of Artificial Sequence: Synthetic coding sequence
  source 1..2196: mol_type = other DNA
atggccgcccccgacggccgggtggtgagccggccccagcggctgggacagggttctggtcagggacctaaaggctccggggcttgcctgcatcccctcgactcactcgagcagaaagagacacaggagcagacttcaggacagcttgtgatgttgcggaaggcccaggagttttttcagacttgcgatgcggagggtaaaggattcatcgcccggaaagacatgcagcggctgcacaaagaattgcccctcagtcttgaagagctggaggacgtctttgacgccctggatgccgatggcaatggataccttacccctcaggagttcactacgggattcagccatttcttctttagccaaaataacccatcacaggaggacgcaggggaacaagtggcccagagacatgaggagaaagtgtacctaagccggggcgacgaagaccttggagacatgggcgaggacgaggaggcgcagttcagaatgcttatggatcgtctgggtgcgcaaaaggttcttgaagacgaaagcgatgtcaaacagctgtggctccaactgaaaaaggaggaaccacacctcctgtcaaactttgaagactttctgacacggatcatttcacaactgcaggaggcacacgaggagaagaacgaactcgagtgtgcgttgaaacgtaagatcgctgcatatgacgaggaaatccagcacctgtacgaagagatggaacagcagatcaaaagtgagaaagaacaattcctgcttaaagacacggaaaggttccaggctcggtctcaggagttggaacagaagctgttatgtaaggaacaggagttagaacaactaacccagaagcaaaaaaggctcgagggccagtgcacagcattacaccacgacaagcacgaaacaaaagctgagaatactaagctgaagctgacaaaccaagagctggctagggagctggaaaggacgtcttgggaactccaggatgctcaacagcagctggaatctctgcagcaggaagcgtgcaaattacatcaagagaaagagatggaggtgtaccgagtgaccgaatctttgcagagagagaaagccggccttttgaagcagctggattttctgcgggagaggaacaagcaccttcgagatgaacgggacatctgtttccagaagaacaaagctgcaaaagcgaacacagccgctagtcgggcctcctggaagaagcggagcggcagcgtgattgggaaatatgtagacagtcgaggcattctgagatcccagtctgaggaggaagaggaggtgtttggcatcccccgtaggtccagcctcggtctatctggttacccacttactgaggaagaaccaggcactggagagccgggtcctgggggaccgtacccaagacctctcagaaggatcatctcagtcgaggaagaccctctgccgcaactgctagacggtggattcgagcagcccctctctaaatgcagcgaggaagaggaggtttccgaccagggggtgcaggggcaaattcccgaggctccaccactaaaattgaccccgacttccccgagagggcagccggtcggaaaagaggcactgtgcaaggaggagtcctccccctctgcccccgaccgattgtttaagattgtgtttgttgggaacagcgctgtcggcaagactagctttctgcggaggttctgcgaggaccggttttcgcccggcatggcggccacggtgggcatcgattacagagtgaagacgctcaacgttgataacagccaagtggcattgcagttgtgggacacagcaggccaggaaaggtataggtgcataacccagcagttcttcagaaaggcagatggcgtcattgtgatgtatgacttgacggacaagcagagttttctaagcgtgcgtcgctggttgtcaagtgttgaggaggccgtgggcgacagggtgcccgtgctgttgctcggtaataagctggacaatgagaaggaacgggaagtgccaaggggattgggcgagcagctggcaaccgagaataatttgattttttatgagtgctccgcttacagcggtcacaacaccaaagagagcctactgcacttggcccgatttctgaaagagcaagaagatactgtccgggaagataccatccaagtcggtcacccggccaagaagaaatcatgctgcggctag

SEQ ID NO: 186330 - DNA, 1389 bp, synthetic construct
  misc_feature 1..1389: note = Description of Artificial Sequence: Synthetic coding sequence
  source 1..1389: mol_type = other DNA
atggccgcccccgacggccgggtggtgagccggccccagcggctgggacaggggagcggacagggacccaagggttctggtgcatgcctccacccccttgatagcctggagcagaaggagactcaggaacagacttccggccagctcgttatgctgagaaaggcccaggagttttttcagacgtgcgatgccgagggcaagggatttattgcacggaaggacatgcaacgccttcataaagagctgcccctctccctggaggagctagaggacgtgtttgacgccttagatgccgacggtaacggttacctgactccccaggaattcaccaccggcttttcacacttcttcttcagccaaaataatcccagccaggaggacgccggcgagcaggtggcacagaggcacgaggaaaaggtttatctgtctcggggcgatgaagatctgggtgatatgggggaagatgaagaggcccagttcaggatgctaatggacaggcttggggcccagaaagtccttgaggatgaatccgatgtcaagcagttatggttacagctgaaaaaagaagaaccccacctcctgtccaatttcgaggacttcctgaccagaatcatctcacagttgcaggaagctcacgaggaaaaaaacgagctggaatgcgccctgaagagaaagattgccgcctatgatgaggagattcagcacctgtatgaggaaatggagcagcagattaagtctgaaaaggagcagttcctcctgaaagataccgaaaggttccaggctagatcgcaggaacttgagcagaaacttctctgtaaggagcaggagttagaacaactgactcaaaaacaaaagcgattggagggtcaatgcacagccctccaccatgataaacacgagacgaaagcagaaaatactaaactgaagctgactaaccaggagctagcgcgggagctggagagaacatcttgggagctgcaggatgcccagcaacaactagagtctctgcaacaagaagcctgcaaactgcaccaagagaaggaaatggaggtatatcgggtgacagagtctcttcagcgtgagaaggctggccttctgaagcagctggacttcctccgcgagcgtaataagcacctgcgcgatgaacgggatatttgtttccaaaagaataaggcggcaaaagctaatactgccgctagtcgggcttcctggaagaagaggtccggttccgtcatcggtaagtacgtggatagccggggaatcttgcgccgctggcctcagagagatagaggaatccctacgcttcaataccagacccagcgggatctggaggactgcaagcacgagatgaaaaaaatctgcaaggccgaggtgactctggagatgtag

SEQ ID NO: 186331 - DNA, 357 bp, synthetic construct
  misc_feature 1..357: note = Description of Artificial Sequence: Synthetic coding sequence
  source 1..357: mol_type = other DNA
tgagagaaggagatggaggtgtaccgggtgaccgagagcctgcagcgcgaaaaggcagggctcttgaaacaactggacttccttagggagaggaacaaacacctaagagatgaacgcgacatttgttttcagaagaacaaggcggcgaaggccaacacagcggccagccgcgcaagctggaagaagcggagtggctcagtgattggaaaatatgtggattctcgaggaattctaagaaggtggccccaacgcgatcggggtatccccaccctgcagtaccagacacagagggacttggaggattgcaaacacgaaatgaaaaagatctgcaaggcggaggtaactctagaaatgtag

SEQ ID NO: 186332 - DNA, 1923 bp, synthetic construct
  misc_feature 1..1923: note = Description of Artificial Sequence: Synthetic coding sequence
  source 1..1923: mol_type = other DNA
atggtgagcaaccccgtgcacggcctgcccttcctgcccggcaccagctttaaagactccaccaaaacggccttccacagatcccagacactgagttatcgtaacggctatgccatcgtcagacggcccacagtcggtattgggggggatcgcctgcagttcaaccagctctcacaggcagaacttgatgagcttgccagcaaagcccccgtcttaacatacggccaaccaaaacaagcgccgcctgccgatttcatccccgcccacgtggctttcgacaaaaaggtgctcaagttcgacgcctatttccaagaagatgtgcctatgtccacagaagagcagtatcgcattagacaggtcaacatatactactacctggaggatgactctatgtccgtgattgaaccagtggtcgaaaactctggaattctgcagggaaaacttataaaaaggcagcgcctggctaagaacgataggggggaccactatcactggaaagatcttaacagagggatcaatatcacaatttacggtaaaaccttcagagtggtggattgcgaccagtttacccaggtctttttagagagccaagggatcgagctgaatcctcccgaaaagatggctctggacccatacaccgagctgcgcaagcagccactgaggaaatacgttacgccatctgatttcgaccaactcaaacaattcctaacatttgacaaacaggttctcagattttatgcaatctgggacgataccgattcaatgtacggcgagtgccgcacatatataattcactactatctcatggacgacacagtcgagattcgggaagtgcatgagcgtaatgacggccgggatcctttccctttgctgatgaatcgccagagagtccctaaagtcctagttgaaaacgcgaaaaatttccctcagtgcgtactggaaattagtgaccaggaggtcctggagtggtacaccgcaaaggactttattgttggcaagtccttgaccattctgggaagaacctttttcatttatgattgcgacccattcacacgcaggtattacaaggagaaatttggaataacagatctccccagaatcgacgtgagcaaacgtgaacccccacctgtgaagcaagagctgcctccttacaacggatttgggctagtagaggactcagcgcaaaactgcttcgcactcatccccaaagccccgaagaaggatgtgatcaagatgttagtcaacgataataaagtgttacggtatctggcggtcttggagtcccccattcctgaggacaaagaccggcgtttcgtgttcagctattttctggctacagacatgataagcatttttgaacctcctgtgcgcaattctggaataatcggaggaaagtacctaggaagaacgaaggttgtgaagccctattctacagttgataatcccgtgtactatggccctagtgacttcttcataggggctgtgattgaagtgtttggccaccgcttcattattctggacaccgatgagtacgtgctgaagtacatggaaagtaacgcggcccaatactcaccagaggctctggcatcgattcagaaccatgtgcgcaagagggaagctccggccccagaagccgagtctaagcagacggagaaagaccctggggtgcaagagttggaggctcttatcgataccattcagaaacagctcaaggaccactcgtgtaaagacaatattagggaggctttccagatctatgataaagaagcgagcggatatgtcgatcgggacatgttcttcaagatatgcgagtcgttaaatgtacctgttgacgactccctcgtgaaggagctgatccggatgtgctcgcatggagagggcaagatcaactactacaacttcgtgagggcattcagcaactag

SEQ ID NO: 186333 - DNA, 1653 bp, synthetic construct
  misc_feature 1..1653: note = Description of Artificial Sequence: Synthetic coding sequence
  source 1..1653: mol_type = other DNA
atgagctggcccgtgctgaagttcgacgcctacttccaggaggacgtcccaatgtcaaccgaagaacaatacagaataagacaggtgaacatttactattacctggaagacgactccatgagcgttatagaacctgtcgtggaaaactcaggtattctgcagggaaaactcattaagcgtcagcggcttgccaagaatgacaggggggaccactaccactggaaagatctgaaccgaggaatcaacattacaatttacgggaagacattccgagtcgtggactgtgaccagttcacacaggtgttcctggagagccagggaatcgagctgaatccacccgagaaaatggccctagatccgtacactgaattgagaaagcaaccactgagaaagtatgttaccccgtcggatttcgatcagttaaaacagtttctcacatttgacaagcaggtactccgcttttacgctatctgggatgatacagattctatgtacggtgaatgtcggacctatataatccactactatctgatggatgatacagtcgagattagggaggtccacgagagaaatgacgggagagatccattccccctgttaatgaaccgacagagggtcccaaaagtcctggttgagaatgctaagaacttccctcagtgcgtgctcgaaattagcgatcaagaggtgctcgagtggtacaccgcgaaagattttattgtagggaagtccctgaccatcctgggccggacgttcttcatatatgactgcgatcctttcactcggcgttactataaggaaaaattcggtatcacagatctgccccgtattgatgtgagcaaacgggaacctccgccggtcaagcaagaactcccaccctacaatggattcggacttgtggaagatagcgcccagaactgctttgcccttattcctaaggctcctaagaaggacgtgatcaagatgctagtcaacgataacaaggtgctgagatatctcgctgtgttagagtctcctatcccagaagacaaggataggcggtttgtcttcagttattttctcgccaccgacatgataagtattttcgaaccccccgtgagaaacagtggcatcataggggggaagtacctgggccgcacgaaagtcgtgaagccttattccaccgtggataatcccgtctactacgggccatccgactttttcattggcgcagttattgaagtgtttggtcatcgattcatcatcttagacactgacgaatacgtgctaaagtatatggagagtaacgccgcccaatattctccagaagccctggcatccatccagaatcatgtgaggaagagagaagcccctgctccagaagccgaatccaagcagacggaaaaagatccaggtgtgcaggagttggaagcactgatcgacaccatccagaaacagctgaaagaccatagctgtaaggataacatccgagaagcattccaaatctatgataaagaagcatcgggctacgtcgaccgagacatgttcttcaagatttgcgaatccctgaatgttcccgttgatgattctctcgttaaggaagtcacttgcaagaggttactgcttccagccttcaccttcccctcacccgtctggatcccactgtgcgggctgtag

SEQ ID NO: 186334 - DNA, 1866 bp, synthetic construct
  misc_feature 1..1866: note = Description of Artificial Sequence: Synthetic coding sequence
  source 1..1866: mol_type = other DNA
atgctgaagaccgccttccaccggagccagaccctgagctaccggaacgggtatgcaatcgtgcgcagacctacagtgggcatcggcggcgatcgcctgcagttcaaccaattgtcccaagcagaacttgacgagcttgccagtaaagcaccagtcctgacttacgggcagcctaaacaggccccaccggcagatttcattccggcgcacgtggcatttgacaaaaaggtgcttaagtttgacgcctactttcaggaggacgttccaatgagcaccgaggagcagtacagaatcaggcaagttaacatctactactatttggaggacgactccatgtcggtgatcgagccggtggtcgagaattccggcatcctgcagggcaaactaattaagcggcaacgcctggccaagaacgatagaggagaccactaccattggaaggacctaaatcgggggatcaacatcactatctatggcaagacattcagagttgtggactgtgatcagtttacacaggtcttcctcgaatcccagggtatcgagctcaacccccccgagaagatggcgttggacccatacaccgagcttcgaaaacagccactgcgtaagtacgtcacacctagcgacttcgaccagctgaaacaattccttaccttcgacaaacaagtcttgcgcttctatgccatctgggacgacaccgatagcatgtacggcgaatgtaggacgtatatcatacactactatctcatggatgacaccgtggaaatccgcgaggtgcatgaaagaaacgatggccgcgacccatttcccctgttaatgaataggcagcgggtgcccaaggtgctggtggagaacgctaagaattttcctcagtgcgtgctggagatatctgatcaggaagtcttagagtggtacaccgcaaaagacttcatcgtgggaaaaagcctgacaatactgggacgaaccttttttatttatgactgcgaccctttcacccgccgttattacaaggaaaaattcggaattactgacctgcctaggatcgacgtctcaaagcgcgaacccccacccgttaaacaagaactgcccccctacaacggctttggactggtggaggatagcgcacaaaactgctttgccttaattcccaaggcgccaaaaaaagacgtgattaagatgttagtgaacgacaataaagttctgcggtatctggccgtactcgagtctcccattcccgaggacaaggatagaagatttgtattcagttatttcctagcaacagacatgatctctatctttgagccgccagtgagaaactccggaattatcggtggcaaatatctggggagaacaaaggtcgttaagccttactctactgttgacaacccagtgtattatggcccttccgactttttcatcggtgcagtgattgaggtgttcggccatcgcttcatcattctcgataccgatgagtatgtcctgaagtatatggaatctaacgcagcgcagtactctcctgaagccctggccagcattcaaaaccatgtgcgaaagagggaggctcccgcgccagaggccgaaagtaaacagaccgagaaagatcctggtgtgcaggagctggaggctctgattgataccatccagaaacagctgaaggatcacagttgtaaggataacatccgcgaggctttccaaatctatgataaggaggccagcgggtatgtggatagagatatgttctttaagatatgtgagtccctgaacgttccggtcgacgactcgttggttaaagaactcatccggatgtgttcccacggggagggtaaaattaactattataactttgtccgagctttcagtaattag

SEQ ID NO: 186335 - DNA, 2250 bp, synthetic construct
  misc_feature 1..2250: note = Description of Artificial Sequence: Synthetic coding sequence
  source 1..2250: mol_type = other DNA
atggccctgcccctgctgcccggcaacagcttcaaccggaacgtggggaaagagaagtttcataagagccagcactgggggttctgtaataatgtgatgatgctcgtttcagatgaaaagccaggaatcgggggtgagccacttctcggtcagaagattaaaccgaagtgctccatctatcccaaaggggatggaagcgatgtacctagctgggtggcctttgacaaacaggtgctgtctttcgacgcctatctggaagaggaagtgttagataagagtcaaaccaactatcgcatccgctactataaaatctatttttatcctgaagacgataccatacaagtgaatgagccagaggttaaaaactcgggattgcttcaaggaacgtccatccggagacacaggatcacacttccgccacctgatgaggaccagttttatacagtataccacttcaacgtcggtaccgaggtcgttttctacgggcgtacctttaagatctacgattgtgacgcctttactcgtaattttctccggaaaattggcgtcaaagtgaatccccccgtgcagtgccccgaagatccatatatgaagatacggagggaggtagttgagcacgtagaacctctgagaccctatgaatcactggatacgctcaaacagtttttgcaatatcatggaaaaatactttgctttttttgcttgtgggatgacagcgtctcgatgtttggagacaggcgggaactcatcctgcattactttctgtgtgatgacacgatcgagatcaaagagttgctcccgcactctagtggccgggatgctctcaagatgttcttgcgccggtcaaagttaccgaagaattgcccacccagggtgtatcagcctggtcagattaccgaccgcgccgtcctgaattcatatggggacttcattaagaatcaagccgatggatatctctttgacaggtataaactcggaaaggtggatcaagaattttacaaagacagtgacttgtccctgggcgtgaccattaacgtgtggggccgcaaggtcctcctatacgactgtgacgagtttacaaagagctattacaagtcaaagtacggtattgaaaatttcaccagcgtttcctgtaaacccccatctccccctccaaaaatagagcggaagtttccaccctataatggatttggatcggaagaggactcattgagaaactgcatcgatttaaaacccactcctcacagacgcaacttcaaaaaattcatggagaaggatagttatggatcgaaatctaatattcttcgcttctttgccaagctcgtgacggataaatgcgttgacttagaccgcatgttcgtgatttcttactacctcggggatgatacaatctccgtgttcgagccaattgaacgaaactccggtattgccggcggcatgtttctcaaacggtccagagttaagaagccaggacaggaggttttcaaaagcgagctgtctgaatacataaaggcagaagagctgtacattggagtcaccgtgaacgtgaatggatatcttttccggctgctgaatgcggacgagtatacacttaattatatggagcaaaacaccgataagtacccattcagtaatcttaagttggcattacagaaattaaagcaggaagaggggaaatcccgcgagctgaagcaggtttttaaagctgcagattcaaagcacacaaatatggtggattataacacctttcgcgacattctgatgagtttgacggtcggcaatctcgccgagcaggagtttgtcaccatcgctaggcactaccgtgtgcccgagggtacctgctccgatatggacttcctgatagctctagcccacgaaaaattcaagaagaatatgttcgagaacttcgacacttttatctactcttgtgtgtacgaggacagagagaagaaaaatgtgctgccgacaaaggatataaaacggttatgcaagtcctcaagactccctttatccgatgacctcctggagagcctgctaagtaggttcgaggacagcgagaaacagattgactacaagagcttcttttccgcgttgaactggcgcaaaaaccccgttccggaactgcaacccgcctcatatctaaaggagagatgtgaagatgtttggctcggcatgcctagtcccattccagcaaaatacatcgattactggactttcctcaaggacgcattcggcctcgaagaggagtag

SEQ ID NO: 186336 - DNA, 489 bp, synthetic construct
  misc_feature 1..489: note = Description of Artificial Sequence: Synthetic coding sequence
  source 1..489: mol_type = other DNA
atgagcctgaccgtgggcaacctggccgagcaggagttcgtgaccattgccaggcattatagggtgcccgagggcacttgttccgacatggatttcctgattgccctagctcacgagaagtttaaaaaaaacatgttcgagaatttcgacaccttcatttattcatgtgtgtatgaggacagggagaagaagaatgtgttacccacaaaggatatcaaaaggctgtgcaagtcctcacgcctgcctctgagtgacgacttactcgagtcgctgctgagcagatttgaggatagcgaaaagcaaattgactacaagagtttttttagcgccttgaattggcgcaaaaaccctgtgcccgaactgcagcccgctagctacctaaaggagaggtgcgaagacgtctggctcggaatgcctagcccaattcctgccaaatatatcgactactggacattcctcaaggacgctttcggactcgaggaagagtag

SEQ ID NO: 186337 - DNA, 753 bp, synthetic construct
  misc_feature 1..753: note = Description of Artificial Sequence: Synthetic coding sequence
  source 1..753: mol_type = other DNA
atgaagatccggcgggaggtggtggagcacgtggagcccctgcggccgtatgagagcctggacacactcaagcagtttctgcagtaccacgggaaaatcctctgcttcttctgtctctgggatgatagcgtcagtatgtttggcgaccgcagggagcttatactccactacttcctgtgcgacgatactatcgagattaaagagctgctgccacattcctccgggcgggatgctcttaagatgtttcttaggcgctctaagcttcccaagaactgtccacctcgcgtttaccagccaggtcagattacagatagagcagttctcaatagctatggagatttcatcaagaatcaggctgatgggtatctgttcgacagatacaaactgggaaaagttgaccaggaattttataaggactctgacctgtctctgggcgtcacgattaatgtgtggggacgtaaggtactactgtacgactgcgatgaattcaccaagtcctattataagagcaaatacggaatcgaaaattttaccagcgtgtcctgcaaaccgccatccccaccgcccaaaatagagcgaaaattccctccttacaatggatttggatccgaggaagactcactacggaattgcatagaccttaaacccacaccccatagaagaaattttaaaaaatttatggaaaaggactcctatggatccaagagcaacatcctgttcttttgcaagacttcccatcgacagatgtgctag

SEQ ID NO: 186338 - DNA, 2334 bp, synthetic construct
  misc_feature 1..2334: note = Description of Artificial Sequence: Synthetic coding sequence
  source 1..2334: mol_type = other DNA
ggcggccagaccacccggcccggcggcgccgccgcctgccgggccctctcaagtggcacacttgattttcggacactgtccgcaatggcactgccactgctgccaggtaatagctttaatagaaatgtgggtaaagagaaattccataagtctcagcactggggattctgcaacaacgtgatgatgctagtgagcgatgaaaaacctgggatcggtggcgagcccctgctgggccaaaaaattaaacctaaatgttccatataccctaagggagacggtagtgatgttccatcttgggtggcattcgacaaacaggtcctgagtttcgacgcttatctggaggaggaggttcttgacaaaagtcagaccaactaccggatccgctattataaaatttatttctatccggaggatgataccattcaggtgaacgaacccgaggtcaagaatagcggcttgctgcagggcacctctatccgccggcatagaatcaccctgcctccaccagatgaggatcaattctatacagtctatcattttaacgttggcacagaggtagttttctatgggcggacattcaagatatacgattgcgacgcctttacgcggaacttcctgagaaagattggtgtgaaagtgaaccctcctgtgcagtgtccggaagatccctatatgaagattcggcgggaggtggtggagcacgtcgaaccgttacggccatatgaaagtctagataccttgaagcagtttctgcagtaccacggaaagattctgtgctttttttgcttgtgggacgattccgtctcgatgttcggagatcggagagaattgatcctacactacttcctgtgtgatgacacaatagagatcaaagagctccttccgcactccagcgggcgcgatgctttgaagatgttcctcagacgaagcaaacttccaaagaattgccctcctcgagtgtatcagccaggtcagataactgacagggctgtcctgaattcatacggcgactttatcaagaaccaggccgatggatatcttttcgacagatacaaattgggcaaggtagaccaagagttttacaaggattccgacctgtctctgggtgtcaccatcaacgtttggggaaggaaagtactgctctatgactgcgacgagtttaccaaatcatactataaatcaaaatacggcatagaaaacttcacaagtgtgtcgtgcaaaccaccatcccctccacccaaaattgagcgaaaattcccaccctacaacggattcggcagtgaagaggactccctgagaaactgcatcgatttgaaacctaccccccataggcggaactttaaaaaatttatggagaaagacagctatggctctaaatcaaacattcttagattctttgccaaattggtaacagacaagtgtgtggatctcgaccgcatgttcgtgatttcatactatttaggcgatgataccatttcagtatttgagcccattgagcggaactctggcatcgcaggaggtatgtttctgaagagatcaagggtgaaaaagccgggacaggaggtcttcaaatccgagctgtcagagtatattaaggctgaggaactctatatcggggttactgtaaatgtgaatggttatctgtttaggctgctcaacgctgacgagtacacccttaattacatggaacaaaacaccgataaataccctttcagtaacctgaagctcgctctccaaaaactgaaacaggaagaggggaaatccagagagctcaaacaagtgttcaaggctgccgatagcaagcacaccaacatggtcgattacaacacattcagagacattcttatgagcctgactgtcggtaaccttgcagagcaagagtttgttaccattgcgcgccactatcgagtgccggagggcacatgttcagatatggactttctgattgccctggctcacgagaagttcaaaaagaatatgttcgagaatttcgacactttcatatattcttgcgtgtacgaggacagagaaaagaagaacgtactgcccaccaaggacatcaagcggctgtgcaaatcctctagattgccactgtctgacgacttgctcgaatcactgctgtcacgcttcgaggattcagaaaagcagatagattacaagagcttcttctcggccttgaactggcgtaagaaccctgtccctgagctgcagcctgccagctacctcaaggaacgttgcgaagacgtatggctcggcatgccaagcccgatacctgccaagtatatagattactggacattcttgaaagatgcctttggactcgaggaggagtag

SEQ ID NO: 186339 - DNA, 2193 bp, synthetic construct
  misc_feature 1..2193: note = Description of Artificial Sequence: Synthetic coding sequence
  source 1..2193: mol_type = other DNA
tgaaacaacaccgccggccggcggcggtgcctgcccggccccctgttttgggatcccgggttttctgatacagagcgacacgggccggcatctgccgctgggcagcaacttcagccacagagggagaaaggcgatgggtctgatgtaccctcatgggtagcctttgataagcaagtgttgtccttcgatgcgtacttagaagaagaggtcctcgacaagtcccagacaaattaccgaattcgctactacaagatctacttctaccccgaggacgacacgatccaggtgaacgaacccgaggttaagaacagtggcctcctgcaagggaccagcattaggcgccacagaattacgctcccaccccccgacgaggatcagttttacactgtgtaccactttaatgtggggactgaggtggtcttttatggccgcacctttaagatctatgactgcgacgcatttacacgaaactttctgcggaaaatcggagtgaaagtgaaccctccagtgcagtgcccggaggatccctacatgaagatccgcagggaagtggtggaacacgtcgagcctcttcggccttatgagtccctcgacactttaaaacaatttctgcagtatcatggcaaaattctgtgcttcttctgcctctgggatgatagcgtctcaatgtttggcgaccggcgggaactgatactgcattacttcctgtgcgatgacactattgagattaaagagttgctgccacactcctccggccgggatgccttaaagatgttccttcgacgatctaagttaccaaaaaattgccctcctcgtgtatatcaacccggacagatcactgacagagcggtgcttaattcttatggggactttattaagaatcaagccgatggctacctttttgatcgctataaactgggaaaggttgatcaggaattctacaaggatagcgaccttagtctgggcgtaaccatcaacgtgtggggacgtaaagtcctcctatacgattgcgacgagtttacgaagagctactacaagtctaaatacggaatcgagaacttcacaagtgtttcctgcaagcctccctcaccaccacccaagatcgagcggaaatttccaccatacaacgggtttggcagcgaggaagacagcctcaggaactgcatagacctcaagcccacccctcatagacgtaatttcaagaagtttatggagaaagactcttatggctctaaaagtaatatactgagattctttgctaagctcgtcactgacaagtgtgtcgatctggatcgaatgttcgtcatcagctactatctgggtgatgataccatcagcgtgtttgaacctatcgagcggaactctggcatcgcaggaggcatgttccttaagcgtagcagagtgaaaaagcctggtcaagaggtatttaagagcgagttgagtgagtatatcaaggccgaagagctgtatatcggcgtgacagtgaatgtaaacggctatctgttccgacttcttaacgcagacgagtacacgctcaattatatggaacagaacacagataagtacccattctctaatctgaaacttgccctgcagaaactaaagcaagaggaaggaaagagccgagaattgaaacaagttttcaaagctgctgattcaaagcacaccaatatggtggattataatacctttagggatatcctgatgtctctcacggtgggcaatttggccgagcaggagtttgtgaccatagcccgccactatagagttccagaaggaacttgctccgacatggactttctcatcgccctggcgcatgagaagttcaaaaagaatatgtttgagaattttgatacattcatttacagttgtgtctacgaggacagagagaaaaaaaatgtgttacccactaaggatattaaacgattgtgtaaaagttcccgcctgccccttagcgacgatctgttggaaagcttgctgagccgatttgaagactctgagaaacaaatcgactataagagtttcttctcagcactgaactggcgcaagaatccagtcccagagctccaaccagcttcttacctaaaggagagatgcgaagatgtctggttggggatgccctctcctatccccgccaagtacatagactattggacatttttgaaagacgcatttggactggaagaagagtag

SEQ ID NO: 186340 - DNA, 720 bp, synthetic construct
  misc_feature 1..720: note = Description of Artificial Sequence: Synthetic coding sequence
  source 1..720: mol_type = other DNA
atggccagcgaggagctggcctgcaagctggagcggcggctgcggagggaggaagccgaggagagcgggccccaattagctccgctcggtgcccccgcgcccgagcccaagcctgaaccagagcctcctgccagggcacccactgcatccgccgacgcagagctctcagctcagctgtccaggaggctagacatcaacgagggggccgcaaggccgaggagatgtcgggtcttcaacccttatactgagttcccagagtttagtaggcgtctgatcaaggatctcgaatccatgttcaagctgtacgatgcaggaagagacgggttcattgacctaatggagctgaaactcatgatggagaagctcggcgctcctcagacgcacctcggtcttaagtcaatgataaaggaagtcgacgaggatttcgatgggaagttaagcttccgcgagttcctattgatcttccataaagcagcggctggagaacttcaggaagattcagggctgatggctctggccaaattgtctgagatagatgtcgcccttgagggtgtaaagggcgccaaaaattttttcgaagccaaggtccaggccctgagcagtgcgtccaaattcgaagccgaactgaaggctgagcaagacgaacgcaagcgggaggaagaagagcggcgcctcaggcaggcagcgttccaaaagctgaaagcaaactttaacacctag

SEQ ID NO: 186341 - DNA, 432 bp, synthetic construct
  misc_feature 1..432: note = Description of Artificial Sequence: Synthetic coding sequence
  source 1..432: mol_type = other DNA
atgggcgagctgcagtacgacgccggccgggacggcttcatcgaccttatggaacttaaactgatgatggagaagctgggagctcctcagacgcatctgggactaaaatctatgattaaagaggtggacgaggatttcgatgggaaactgtctttccgcgagtttctgctgatttttcacaaagctgcggcaggtgaactgcaggaggacagcggtctgatggccttagccaagctgtcagagatcgacgtagccttggaaggggtgaaaggggccaaaaatttcttcgaagcaaaggttcaggcacttagtagtgcatctaagttcgaagctgagctgaaggccgaacaggatgagaggaaacgggaagaagaggagcgtcgcttacggcaggcagcatttcaaaaattgaaagctaatttcaatacatag

SEQ ID NO: 186342 - DNA, 384 bp, synthetic construct
  misc_feature 1..384: note = Description of Artificial Sequence: Synthetic coding sequence
  source 1..384: mol_type = other DNA
atggagctgaagctgatgatggagaagctgggcgccccccagacccacctggggctgaaaagtatgattaaggaagtggacgaggacttcgacggtaaattgagcttcagagagttcctgttgattttccataaagcggcagctggagagctccaggaggatagtggcctaatggcactggccaagctttccgagatcgacgtcgccttggaaggtgttaagggcgccaagaattttttcgaagccaaggtgcaagccctgagctcggcgagtaagtttgaagcagagctcaaggccgaacaggatgagcgcaagagggaggaagaggagcgtaggctgcggcaggccgccttccagaagctgaaagccaacttcaatacctag

SEQ ID NO: 186343 - DNA, 384 bp, synthetic construct
  misc_feature 1..384: note = Description of Artificial Sequence: Synthetic coding sequence
  source 1..384: mol_type = other DNA
atggagctgaagctgatgatggagaagctgggcgccccccagacccatctcggtctgaaaagcatgatcaaggaagtggatgaggacttcgatggcaagctgtcctttagggaattcctgttgatctttcataaagcagctgccggtgagcttcaggaagattccggattgatggcccttgcaaaactatctgaaattgacgttgcgcttgaaggcgtaaaaggtgccaagaacttttttgaggcgaaggtgcaggccctctcttctgcgagcaagtttgaagctgagctcaaagctgaacaggatgagaggaaacgggaggaggaagaacggcggctgagacaggcggcattccagaagctcaaggctaactttaacacatag

SEQ ID NO: 186344 - DNA, 429 bp, synthetic construct
  misc_feature 1..429: note = Description of Artificial Sequence: Synthetic coding sequence
  source 1..429: mol_type = other DNA
atgttcaagctgtacgacgccggccgggacggcttcatcgacctgatggagcttaaattgatgatggagaaattgggtgccccccagacacacttgggactgaagtctatgattaaagaggttgacgaagactttgatggaaaattgagctttagggagtttctcctgatttttcacaaggctgccgcgggggaactgcaggaagacagcgggttgatggccctcgctaaactctccgagatcgacgtagcattggagggtgtgaagggggccaagaatttcttcgaagctaaggtccaggcactgtcttcagcaagcaaattcgaggcagagctgaaagctgaacaagacgagaggaagcgcgaggaagaggagagaagattgcggcaagctgcatttcagaaattaaaggcaaattttaacacttag

SEQ ID NO: 186345 - DNA, 2466 bp, synthetic construct
  misc_feature 1..2466: note = Description of Artificial Sequence: Synthetic coding sequence
  source 1..2466: mol_type = other DNA
atgcccacccgggtgtgctgctgctgcagcgccctgcggccccggtataaacgattagtcgataatatttttccagaggaccctaaagatggactagtcaaaactgatatggagaagctgactttctacgctgtttcagccccagaaaaactggacaggatcggcagttaccttgccgagcggttatctagggacgttgttcggcacagaagtgggtacgttctcatagccatggaggcattagatcagcttctgatggcatgccattctcagagtatcaaaccgtttgtcgaaagttttttgcatatggtcgcaaagctgctggaatcgggcgaaccaaaactccaggttttgggcactaatagcttcgtgaagttcgcaaacatcgaggaagatacaccatcctaccaccgccgctacgacttctttgtcagtcgtttttctgctatgtgccacagctgccacagcgaccccgaaatccggacagagatacgtatcgcagggatacgagggattcagggggtggtcagaaagaccgtgaacgatgaactcagggcgacgatttgggaacctcagcacatggataaaattgtacctagccttctgttcaatatgcagaaaattgaagaagtggattcaaggatcggccctccatcttctccttcggccacagacaaggaggagaaccctgccgtgctagcagaaaactgtttcagggagcttctcggacgtgccacctttggcaatatgaataatgccgtgcgccctgtcttcgctcatctggaccaccacaagctatgggatcccaatgagtttgccgtccattgtttcaaaatcatcatgtacagcatccaggcacagtacagtcaccacgttatacaagagatcctcggtcacctcgatgcccgtaaaaaggacgcccctagggttagagccggtatcatccaggtgctccttgaagctgtggccattgccgcaaaaggcagtatcggcccaacagtgcttgaggttttcaacaccctgttgaagcacctccgcttatctgtggaatttgaggctaacgatttgcagggtggatccgtcgggagcgtaaacctgaacacgagttccaaagataatgacgaaaagattgtgcagaacgctatcatacaaacaattggtttctttggatctaacctgcctgactaccagagaagcgaaattatgatgtttatcatgggcaaggtgcccgtattcgggacttcaacacacaccctagacatcagtcagctaggggacctcggtacaaggcgcattcagatcatgcttcttcgatcactgcttatggttacaagcgggtataaggcgaaaacgatcgtgaccgcccttccaggcagtttcctcgaccctttgctttccccctctttgatggaggactatgaactgagacagctagtcctagaagtcatgcataatcttatggataggcatgacaaccgcgcaaagctgcgtggcatccggattatccccgacgttgccgacctgaagataaagagggaaaaaatctgcaggcaagacaccagtttcatgaagaaaaacggccagcagttgtatcgacacatctacctcggctgtaaggaggaggacaatgtgcagaagaactacgagcttctttacaccagccttgccttgataactattgagttagccaacgaggaagtagtgattgatctgatacgcctggccatcgcacttcaagactccgcaatcattaacgaggataacctgcctatgttccaccgctgtgggatcatggcactggtcgccgcctatttgaacttcgtttctcaaatgatagccgtcccagctttttgccagcacgtgtccaaagtcatagagataaggacgatggaggctccttacttcctgcctgaacacattttccgggacaaatgtatgctgccaaagagccttgaaaagcacgaaaaggatctttattttcttaccaacaaaattgcggaatctctcggcgggagcggctactctgtagaaaggctgtctgtgccctacgtgccacaagtgaccgatgaggatcggttgagcaggcgcaagagcattgtcgacaccgtcagcatccaggtggatatcctctccaacaacgttcctagcgatgatgtggtgtcaaacacagaagagataacattcgaggcccttaagaaggctattgatacttccggtatggaagagcaagaaaaagagaaaagacgcttagtcatcgagaagttccaaaaggctccctttgaagaaattgctgctcagtgtgaatccaaggcgaacctcctacacgatcgactcgctcagatccttgaactgactatccgcccccctccttcccccagcggaactcttaccatcacatcgggccatgcccaataccagtccgttcctgtctacgaaatgaagtttccggacctgtgtgtgtactag

SEQ ID NO: 186346 - DNA, 2466 bp, synthetic construct
  misc_feature 1..2466: note = Description of Artificial Sequence: Synthetic coding sequence
  source 1..2466: mol_type = other DNA
atgaagagccgggtgtgctgctgctgcagcgccctgcggccccggtacaaacgactcgtcgataatattttccccgaggatcccaaggacgggcttgttaaaactgatatggagaagcttaccttctatgcagtttccgcgcccgaaaagctcgatcgcattggaagttacctcgctgagagactgagccgcgacgtagttcggcaccgttctggatatgtgcttatcgccatggaagccctggatcagctgcttatggcctgccattcccagagtatcaagcccttcgttgagtcctttctgcatatggtcgccaagctgctcgagtccggcgaacccaaactgcaggtcctcgggacaaattccttcgtgaaatttgctaatatcgaggaagacacaccttcctatcatcggagatatgatttctttgtgagccgcttcagcgccatgtgtcatagctgtcacagcgaccccgaaatccggaccgagattcgaattgccggaattcgcggcatccagggtgtggtccgcaaaaccgtgaatgatgagttacgtgctacaatatgggagccccagcatatggataagattgtcccctctctcctgtttaacatgcagaagatcgaggaagttgattccaggattggccccccctcaagcccatcggctaccgacaaagaagagaatcctgccgtgctcgctgagaactgttttagggagcttttaggacgggcaaccttcggcaacatgaacaacgctgtgcgccctgtgtttgcacacctggatcatcacaaactgtgggacccgaatgagtttgccgtgcactgtttcaagatcatcatgtattctatacaggcacaatactctcaccatgttatccaggagatcctgggtcatctcgatgcgcgaaaaaaagacgctccgagggttagggcagggattatccaggtgttgttagaagctgtagcaatcgcagcaaaggggagcatcgggccaaccgtcctcgaagtttttaatacattattaaaacatctcaggctgagcgtggaattcgaggcaaacgacctgcagggaggttccgttgggagcgtcaacttgaacacaagttccaaggataacgatgagaagatcgtacagaatgctataatccagactattggcttttttgggagtaacttgcccgactaccagcgctcagagattatgatgtttattatgggcaaagtccccgtgttcgggacctcaacacataccttggacatcagtcaactcggggatctgggcacaaggcggattcagatcatgctcctgcggtccttgctcatggtgacaagcggttataaagccaaaaccatcgtcaccgcactgccaggcagctttttagatcctcttctcagcccatcccttatggaggattatgagctgcgccagttggttttagaggtaatgcacaatttgatggatcgtcacgacaaccgcgctaaactcagaggtatccgcataattcccgatgttgcggatctcaagatcaagcgtgagaagatatgccgccaagacacatctttcatgaaaaagaacgggcaacagctatatcgccacatctacctgggctgcaaggaagaggataacgtgcagaagaactacgagctcctgtacacatctttggccctcatcaccatcgaacttgcaaatgaagaggtggtcattgatctgatcaggctggcaattgctttgcaagacagtgccatcatcaatgaagacaatttgcctatgttccatagatgtgggataatggctttagtcgcggcgtatcttaacttcgttagtcaaatgatcgctgtcccagccttttgccaacacgtgagcaaagttatcgaaatccgtaccatggaggctccatacttcttgccagagcacatattcagagacaaatgcatgttgcccaaaagccttgagaagcacgaaaaagatttatatttcctcacaaacaagattgctgagagcttaggaggctctggctatagtgtcgaaaggttatccgtcccttacgtgccacaggttacggatgaggatcgcctgtcccggagaaagtcaatcgtggatactgtgtcaatccaggtagacatcctcagcaacaatgtgccttcagacgatgtggtgagtaatacagaggagatcacctttgaagccctgaagaaggccatagatacatctggcatggaggagcaggaaaaggagaagcggagactcgttatagaaaaatttcaaaaggcaccctttgaagagatcgccgcccagtgtgagagcaaggccaatctcttgcacgacaggcttgcccaaatcttagaactcaccattcgaccacctccctctccgtccggcactctgacaatcacctccgggcacgcccaatatcagtctgtacctgtttatgagatgaaatttcctgatttgtgtgtgtattag

SEQ ID NO: 186347 - DNA, 2334 bp, synthetic construct
  misc_feature 1..2334: note = Description of Artificial Sequence: Synthetic coding sequence
  source 1..2334: mol_type = other DNA
atgcccaagggcgtgtgctgctgctgcagcgccctgcggccccggtataaacggcttgtcgataacatttttcctgaggatccaaaggacgggctggtgaagacggatatggaaaaactgaccttctacgcagtctccgctcctgagaaactggaccgcattggatcctacctggctgaacgcctgagtagagatgtggtgcggcacagaagcgggtatgtactgatagcaatggaagccctggaccaattgctgatggcctgtcatagtcagtctatcaagccgtttgtcgagtcttttctgcacatggtcgcaaagctgctggagtccggagagcccaaactacaggtcctggggaccaattcctttgtgaagtttgcaaatatagaggaagacaccccatcataccacagaaggtacgacttttttgtgtcccgcttcagcgcgatgtgccattcttgtcattcggatccggagattcgcactgagatcaggatcgccggcatccggggaatacagggagtggtgcggaagacagttaacgatgaacttagggcaactatctgggagccgcagcacatggacaagattgtgccttctttgctgttcaacatgcaaaagatagaggaagtcgacagcaggatagggcccccatcatctccgtccgccaccgataaagaagagaatcctgccgtgttggccgaaaattgctttcgcgaactcctcggacgggcgactttcggaaatatgaataatgcagttcggcccgtgttcgcccaccttgatcatcacaaactgtgggatcctaacgaattcgccgttcattgctttaaaattatcatgtactccatccaggcccagtactcacaccatgttattcaagagatcctgggacatctcgacgctcgaaaaaaagacgctccacgagtacgggccggtatcatccaggtcctgctcgaggctgtcgccattgccgctaagggctccattgggccaaccgtgttagaagtcttcaatacgttgctgaaacacctgagactgtctgtggagtttgaggcaaacgatctgcagggaggtagcgtaggaagcgtgaatcttaacacctctagcaaggacaacgacgaaaaaattgttcaaaatgcgatcattcaaaccatcgggtttttcggtagcaatctcccagactatcagaggagtgaaatcatgatgtttatcatggggaaagtgccagtctttggcacgagcacccacacattggacattagccagttgggtgatctaggtacaaggcggatacagatcatgctgcttaggagtctgctgatggtgacgtctggttacaaggcgaagacgatcgtcaccgcccttcctggtagcttcctggatcctcttctgtccccctcattaatggaagattatgaactgcgccagctggtcctagaggtgatgcacaatttaatggaccggcacgacaatagggccaagcttcgtggaattagaatcattcctgacgtggccgacttaaaaattaagcgggaaaagatctgtcgacaggatacaagttttatgaagaagaacggccagcagttatatcgccatatttaccttggatgcaaagaagaagacaacgttcagaaaaactatgagctgctgtacactagcctggccctaattacaatagaactggctaatgaggaggtcgtgattgacctcataagacttgcaatcgctctccaggacagtgccattatcaacgaggataacttgccaatgtttcacagatgtgggatcatggctctcgtggccgcctatcttaatttcgtatctcaaatgatcgctgtgcccgcattctgccacaagattgctgaatcactcggcggatctggctactctgtggagcggctcagcgtgccctacgtgccacaagtcacagacgaagaccgactgagccggcgcaaaagtattgtcgataccgtgagtatccaggtggacattctttccaataatgttccgagtgatgacgttgtctccaataccgaggaaatcacttttgaggccctgaagaaggccattgatacgagcggtatggaggagcaagaaaaggagaaaagacggcttgtgatcgagaaattccagaaggcgccattcgaagagatcgccgcccagtgtgagtcaaaggcgaatcttctgcacgatcgactcgcacagatcttggagttgacaattcgtccaccaccctctccctccgggaccctgactatcacctcaggacacgcccaatatcagtctgtcccagtgtatgagatgaagtttcctgatttgtgcgtctactag

SEQ ID NO: 186348 - DNA, 603 bp, synthetic construct
  misc_feature 1..603: note = Description of Artificial Sequence: Synthetic coding sequence
  source 1..603: mol_type = other DNA
atgctggcccggctgctgaagttcgaggaggccccctacttcctgccagaacacattttcagagacaagtgtatgctgccaaagtccctggagaagcatgaaaaagatctgtactttttaacaaacaagatcgcagagtctttgggagggtccggatactcagtggaacgtttgagtgtgccctacgttccacaggtgacagatgaggacaggctcagccgccggaaatctattgtggacaccgtcagcatccaggtggacatactctctaacaatgtgccgtccgatgacgtggtgtctaacacagaggagattacattcgaagccctgaagaaggcaattgacacaagcggcatggaagaacaggagaaggagaagaggcgcctagtaatagagaagtttcaaaaggcccctttcgaggagattgccgcccaatgcgagtccaaggccaacctcctccacgaccgccttgctcagatcttggagctcaccatcaggcctcccccatcacccagtggcacgctgactatcacttccggccacgcacaatatcagagcgttcccgtgtatgagatgaagttccccgatctctgtgtgtattag

SEQ ID NO: 186349 - DNA, 2358 bp, synthetic construct
  misc_feature 1..2358: note = Description of Artificial Sequence: Synthetic coding sequence
  source 1..2358: mol_type = other DNA
atggagaagctgaccttctacgccgtgagcgcccccgagaagctggaccgcattgggtcctacctggccgagaggcttagtcgtgacgttgtccgacacaggtccggttatgttctgatcgccatggaggcactggaccagcttctgatggcctgtcattcccagtctattaaaccattcgtggagtctttcctgcatatggttgcgaagctgctagagtctggtgagccgaagctgcaggtgctgggcactaactcgtttgtgaagtttgctaatatcgaagaggacactccttcataccacagacgatatgattttttcgtcagtcgcttctccgctatgtgtcactcttgtcatagcgaccctgaaatccgcactgaaattcgcatcgctggcattagaggtatacagggggtagtgcggaagactgtcaacgacgaactgagagccaccatatgggagccacagcacatggataaaatcgttccctcactcctgtttaatatgcagaagatcgaggaagttgacagcagaatcggcccaccctcctccccaagcgccacagacaaggaagagaacccagctgtgctcgccgagaactgctttcgtgaactactggggagggcgacttttgggaacatgaacaatgccgtgagacccgtgttcgcccatctggatcatcataagctgtgggatccaaacgaattcgctgtccactgcttcaagatcattatgtacagtatccaggcacagtatagccaccacgtgatccaggagatcttaggccacctcgacgcccgaaagaaagacgccccccgggtgcgagccggcataatccaggtgctgctggaagcggtcgccatcgccgctaaagggagcatcggccccacggtgctcgaggtgttcaacactttactgaaacatctgagattgtcagtggagttcgaggctaacgacctccaaggcggaagtgtggggtcagtgaatcttaacacctcttcgaaggataatgacgagaagattgtgcagaacgctatcattcagaccataggatttttcggtagcaacctgcccgattaccagcggtcagaaataatgatgtttattatgggcaaagttccagtgttcggcacttctacccacactctcgatatcagccagttgggcgatctggggacacgaagaattcagatcatgcttttgagaagcttacttatggtaactagcgggtataaagctaaaaccatcgtgacagctttgcccggtagcttcctcgaccctctgctctctcctagtctgatggaggactatgaactgcgacaactggtgctggaagtgatgcacaatcttatggacaggcacgataatcgcgccaagttacggggaatcagaattattccagacgtcgccgacctgaagatcaagagggaaaagatctgcagacaagacacttcattcatgaagaaaaacggtcaacagttatatcgccatatctacttgggctgcaaggaggaagacaatgtgcaaaaaaattacgagcttctttacaccagtttagctttgattacgattgagttagctaatgaggaggtcgtgatcgacttgattaggctcgccatagctctccaagactccgctataataaacgaagacaacttgcccatgtttcacagatgcggaatcatggccctggttgccgcatacttgaacttcgtgtcccagatgattgccgtccctgcgttttgccaacatgtgagcaaggttatagagatcaggactatggaggctccctatttccttcccgaacacatttttagagataaatgcatgctcccaaagtcccttgagaagcacgagaaggacttgtactttctgactaacaaaatcgcagagagtctggggggaagcggctattccgtggagcgtctgtccgtgccctatgtcccacaagttaccgatgaggaccgacttagtaggcgtaagtcgattgtcgataccgtttcaatccaggttgacattctttctaataacgttccctccgatgatgtagtctccaacactgaggagataacattcgaagccctgaagaaagcaatcgacacctctggtatggaggaacaggaaaaggaaaagcgccgactggtgatcgaaaaattccagaaagcacctttcgaagaaatcgcagcccagtgtgagtctaaggccaatctgctgcatgatcggctggcacagatcctcgaactgaccatccgaccccctccatctccctctggcactctgacaataacctcgggccacgcacagtatcagtccgtgcctgtgtacgagatgaagtttccagacctctgtgtttattag

SEQ ID NO: 186350 - DNA, 1482 bp, synthetic construct
  misc_feature 1..1482: note = Description of Artificial Sequence: Synthetic coding sequence
  source 1..1482: mol_type = other DNA
atgctgaaggccctgttcctgaccatgctgaccctggccctggtgaaaagtcaggatactgaagagacaatcacctacacacagtgcaccgacggctacgaatgggatcctgtgcgtcaacagtgcaaagacattgatgagtgtgacatcgtgccagatgcttgtaagggtgggatgaaatgtgtgaaccactacgggggatatttatgtctgcccaaaacagcccagattatcgttaacaacgaacagcctcagcaggaaacccagccagcagagggcacgagtggggcaaccaccggggtagtggcggccagcagcatggccacctctggagtgctccctggtggaggcttcgtggccagtgccgccgctgtggccgggcctgaaatgcaaacagggcgtaacaacttcgtgattaggaggaatccggctgatccacagagaataccaagtaacccttcccacaggatacagtgcgccgcaggatacgagcagagtgagcacaatgtatgtcaggatattgatgagtgcactgctggaactcataattgcagggctgaccaggtttgtattaatctccggggtagtttcgcctgtcaatgccctcctgggtaccagaaaaggggcgagcagtgtgtggacatcgatgagtgtacaatccctccgtattgccatcaaagatgcgtcaatacgcccgggtccttctactgtcagtgtagccctggttttcagctggcagccaataactacacctgtgttgatattaacgagtgcgatgcgtctaaccagtgcgcacagcagtgttacaatattctcggaagttttatctgtcagtgcaatcaagggtacgaactaagttctgacagattaaattgcgaagacatcgatgagtgccgtacctcctcttatctgtgccagtatcagtgtgtgaacgaacctggtaagttttcctgcatgtgtccccagggatatcaggtagtgaggtctaggacatgtcaggacattaacgaatgcgaaacaacaaacgagtgccgggaggacgaaatgtgctggaactatcatggggggttcagatgctatccaaggaacccctgccaggatccttacattctgaccccagagaacagatgcgtatgtcccgtatctaacgcaatgtgccgggagctcccacagtcaatcgtgtacaaatatatgtctataaggagtgatcgtagtgttccatcagacattttccagatccaggcaaccaccatatacgcaaatacgattaataccttcaggatcaaatctggtaatgagaacggagagttctatctgaggcagacatcacctgtgagcgccatgttggtcctggtgaagagcctgagtggaccccgggagcatatcgtcgacctagagatgcttactgtgagtagcatcggtaccttcaggactagtagtgtgcttcggctgactataatcgttgggcccttctcgttttag

SEQ ID NO: 186351 - DNA, 1482 bp, synthetic construct
  misc_feature 1..1482: note = Description of Artificial Sequence: Synthetic coding sequence
  source 1..1482: mol_type = other DNA
atgctgaaggccctgttcctgaccatgctgaccctggccctggtgaagtcccaggatacggaagaaaccattacctatacacagtgtactgatggctatgagtgggacccagtccgccagcaatgcaaggacatagacgagtgcgacattgtaccggacgcatgtaaaggggggatgaagtgtgtgaaccattacggtggctacctttgcctaccaaagaccgcccagatcattgtcaacaatgagcaacctcaacaagaaacccagcctgcagagggtacttctggcgcgactaccggagttgtggccgcctcttccatggccaccagtggcgtcctccctggaggggggtttgtggcatcggccgcagctgttgccggccctgaaatgcagacagggcggaacaacttcgtcatccgaagaaaccctgcagatccccagaggatcccaagtaatccaagccaccgtattcagtgcgctgcaggctacgagcagtccgagcacaatgtgtgccaggatatcgatgagtgcacagccggaacacacaattgtcgcgccgaccaggtgtgcattaatctgagggggagttttgcctgccagtgtccgccaggctatcagaagagaggcgaacaatgcgtggatattgacgaatgcacaatacccccatattgccatcagcgctgcgtcaatacacctggctctttttactgtcagtgcagtcctgggtttcagctggccgcgaacaattacacatgcgtcgacattaatgaatgtgatgcatccaaccagtgcgctcagcagtgctataacatccttggctcattcatctgccaatgtaatcaaggttacgagctatcctcagatcgcctgaactgcgaagatatagatgaatgtagaactagctcttatttgtgtcagtaccagtgcgttaacgagcctggcaagttctcgtgtatgtgcccccagggatatcaggtagtcagaagtagaacatgccaagatataaacgaatgcgagaccaccaatgagtgtcgtgaagatgagatgtgttggaattaccatggaggtttccgctgttacccacgaaacccgtgtcaggatccatacatattgaccccggagaatagatgtgtctgcccggtgtccaatgcaatgtgtagagaactgccccaatctattgtgtacaaatatatgagtattcgcagcgaccggtccgtcccatcggacatatttcagatccaagcgactaccatttatgcgaacactatcaatacattccggatcaaatctggcaatgagaatggcgaattttaccttcggcaaacaagccccgtcagtgccatgctcgtgcttgtgaagagcttgtccggcccccgggaacacatcgtggacttagaaatgcttacagtgtcctccatcggaacattcaggacttccagtgttcttcgactaacaattatagtgggacccttctcgttttag

SEQ ID NO: 186352 - DNA, 1482 bp, synthetic construct
  misc_feature 1..1482: note = Description of Artificial Sequence: Synthetic coding sequence
  source 1..1482: mol_type = other DNA
atgctgaaggccctgttcctgaccatgctgaccctggccctggtgaaatctcaagatacggaagagacaattacatacacccagtgtacagacggttatgagtgggatccagttcggcaacagtgtaaggatatcgatgaatgcgacatagtgccggacgcctgtaagggcggcatgaagtgcgtcaaccactatggaggttacctgtgtctgccaaagactgcgcaaattatcgtcaataacgagcagccccaacaagagactcagccggccgagggaactagcggcgccacaacaggagtcgttgcagcgagctccatggcgactagcggcgtgcttcccgggggcggcttcgtggcctcggccgccgctgtcgccggcccagaaatgcagacaggtcgcaataattttgtaattcggaggaacccggccgacccgcagcgcatccccagtaacccatcacatcggattcagtgtgccgccgggtacgaacaatcagaacataatgtttgtcaggacatagatgagtgcactgctggtactcataactgcagagcagaccaggtgtgtattaatttgcgtgggtccttcgcatgtcagtgtcctcctggttatcaaaaaaggggcgaacaatgcgtggacatcgatgaatgtaccatcccgccctactgtcaccagagatgcgttaatacaccgggaagcttctattgtcagtgctcacctggcttccagcttgcagctaataactatacatgcgtggacatcaacgagtgtgatgcctccaatcagtgtgcacagcagtgctataacatccttgggtcctttatttgccagtgtaatcaagggtacgaattgtcaagtgaccggcttaactgtgaggacattgatgagtgccgcacctctagctacctctgtcagtaccaatgtgtgaatgaacccggaaaatttagttgtatgtgtccccaaggttatcaggttgtgagaagccgaacgtgccaggatattaatgaatgcgaaacaaccaatgagtgtcgggaggatgagatgtgctggaactaccatggcggcttcaggtgctaccccaggaatccctgtcaagatccttatatcctgactcctgaaaacaggtgcgtctgtcccgtttctaatgcaatgtgcagagaactgccccagagcattgtttataaatatatgtcaatcagaagtgacagatcagttccaagcgacatcttccagatccaggctacaacgatctatgccaatactataaatacgttccgcatcaaatcaggaaacgagaacggcgagttttatttaaggcagaccagcccggtgtctgctatgttggttctggtgaaatccctctccggaccacgggagcatattgtggacctggagatgttgactgtttcgtcgatcggaactttccggacttcatctgtgttgagactgactattatcgtgggaccgtttagtttttag

SEQ ID NO: 186353 - DNA, 1050 bp, synthetic construct
  misc_feature 1..1050: note = Description of Artificial Sequence: Synthetic coding sequence
  source 1..1050: mol_type = other DNA
atggaggacaccagcgccttccggaagcagccccggctgctgagcattatgaattctctgagctcagagcacaacgtttgtcaggacatcgacgaatgtactgcaggaactcacaattgtagggctgatcaggtatgtatcaacctgaggggttcatttgcctgtcagtgtccgcctgggtaccagaagaggggggagcagtgtgtcgatattgacgagtgcacgatacccccttactgtcaccagcggtgtgtgaataccccagggagtttttattgccagtgtagccctggctttcagctggccgccaacaactacacctgtgttgacatcaacgagtgcgatgcttcaaatcagtgcgcccagcagtgttataacattctggggagcttcatctgccaatgtaatcagggctacgagctcagcagtgataggctaaactgcgaagacatcgacgagtgccggacgtccagttacctatgccagtatcaatgcgttaacgaacctgggaaattctcgtgcatgtgtccgcaggggtatcaggttgtgaggtcccgcacgtgtcaagatatcaacgagtgcgagactacaaatgagtgcagagaggacgagatgtgttggaattaccacgggggcttcaggtgttatccacgcaatccttgtcaggacccctatatccttacccccgaaaacagatgcgtctgtccagtctcaaacgctatgtgcagggagctccctcagagcattgtttataagtatatgtccatccgcagtgatcggagcgtccctagcgatatctttcagatacaggccacgaccatctacgcaaacaccattaacacattcagaattaagtcaggaaatgagaatggcgaattctatttaaggcaaacaagcccagtgagcgccatgctcgtcttagtcaagtccttatcaggccccagagaacatatcgttgatctggagatgctgacggtgagcagcatcgggacttttaggaccagttccgtcctgcgcttgactatcattgtaggacccttttcgttctag

SEQ ID NO: 186354 - DNA, 159 bp, synthetic construct
  misc_feature 1..159: note = Description of Artificial Sequence: Synthetic coding sequence
  source 1..159: mol_type = other DNA
atgctgaaggccctgttcctgaccatgctgaccctggccctggtgaaatcccaagataccgaagaaacaatcacgtacacacagtgcacagatggttacgagtgggacccagttcgtcagcagtgtaaggacatcgacgagtgcgacattgtgccgtag

SEQ ID NO: 186355 - DNA, 84 bp, synthetic construct
  misc_feature 1..84: note = Description of Artificial Sequence: Synthetic coding sequence
  source 1..84: mol_type = other DNA
atgctgaaggccctgttcctgaccatgctgaccctggccctggtgaaaagtcaggatactgaggagaccattacgtacacatag

SEQ ID NO: 186356 - DNA, 1068 bp, synthetic construct
  misc_feature 1..1068: note = Description of Artificial Sequence: Synthetic coding sequence
  source 1..1068: mol_type = other DNA
atgaagtgcgtgaaccactacggcggctacctgtgcctgcccaagacagcacagatcatcgtaaacaatgaacagccccagcaggagactcagccagccgaggggacttccggggctaccaccggagtggtcgctgcaagcagtatggcaactagtggggtgttacctggaggaggatttgtggcttccgcagccgcagtggctggtcccgagatgcagacaggcaggaataacttcgtgataagaaggaaccccgctgaccctcagagaatcccttcaaacccctcacaccggatacagtgtgccgctggatacgaacagtcagagcataacgtgtgtcaggatatcgacgagtgcaccgccggaacacacaactgccgcgccgatcaggtgtgtatcaacctgcggggctcatttgcatgccagtgtccacctgggtaccaaaaacgcggtgagcagtgcgttgatatcgatgaatgtagaacctcctcatatctgtgccagtaccaatgcgtgaatgaaccaggcaagttttcatgcatgtgtccccagggatatcaggtcgtacgctcacgcacttgccaggacataaatgagtgtgagacaaccaatgagtgtagagaggatgaaatgtgttggaattatcacggtggctttagatgctacccgcggaacccctgccaggatccatatattttaacaccggaaaatcgatgcgtatgcccagtgagcaacgccatgtgcagagaactcccgcaatccattgtgtacaagtacatgtctattcgttccgacaggagcgttccaagcgatatatttcagattcaggccactaccatctacgcgaacactataaacactttcagaatcaagagtggaaatgagaacggcgagttttatctcaggcagacatcgccggtctccgccatgttggttctcgtcaaatctttatccggtcccagagagcacattgtggatcttgaaatgctgaccgtgtcttctattggcacctttcgcacatcttccgtactgcgccttaccatcatcgtggggccttttagcttctag

SEQ ID NO: 186357 - DNA, 264 bp, synthetic construct
  misc_feature 1..264: note = Description of Artificial Sequence: Synthetic coding sequence
  source 1..264: mol_type = other DNA
atgctgaaggccctgttcctgaccatgctgaccctggccctggtgaagtcccaggatacagaagaaacaattacttacactcaatgtacagatggatacgaatgggaccccgtccgtcagcagtgcaaggacattgacgagtgcgatatcgtgcccgatgcttgtaaaggagggatgaaatgcgtcaaccactacggaggatatctgtgtctgcctaagacagcccagattatcgtgaacaatgagcagccccagcaagaatag

SEQ ID NO: 186358 - DNA, 519 bp, synthetic construct
  misc_feature 1..519: note = Description of Artificial Sequence: Synthetic coding sequence
  source 1..519: mol_type = other DNA
atgctgaaggccctgttcctgaccatgctgaccctggccctggtgaaaagtcaggatactgaggagactattacatacacccaatgcactgatggctatgagtgggaccccgtgagacagcagtgcaaggatattgatgaatgtgacatcgtgcccgatgcttgcaagggtggaatgaagtgtgtgaatcactatgggggatatctctgtcttccaaaaactgcccagatcatcgttaataatgagcagccacagcaggagacccagcctgccgagggaaccagcggcgccacaactggtgtggttgctgctagttctatggccacctcaggagtacttccaggtggaggctttgtggctagcgctgctgcagtcgcgggtccagaaatgcaaaccgggcgcaataactttgtcatcagacgcaaccccgccgacccacaaaggataccatctaacccctctcatagaatccagtgcgccgccgggtatgagcagagcgagcacaacgtgtgccagtag

SEQ ID NO: 186359 - DNA, 360 bp, synthetic construct
  misc_feature 1..360: note = Description of Artificial Sequence: Synthetic coding sequence
  source 1..360: mol_type = other DNA
atgctgaaggccctgttcctgaccatgctgaccctggccctggtgaagtctcaggacacggaagagaccattacctatactcagtgtaccgatggttatgagtgggaccctgtcaggcaacagtgcaaagatatcgacgaatgcgacatcgttccagatgcctgtaaaggagggatgaaatgcgtcaatcattatggtgggtacctgtgcttgcctaaaacagcccagatcattgtcaacaacgaacagcctcagcaggagacccagccggcagagggcacgagcggggccaccacaggggtagtagcggcgagctccatggccacatcaggggttctgcctgggggcggctttgtgtag

SEQ ID NO: 186360 - DNA, 321 bp, synthetic construct
  misc_feature 1..321: note = Description of Artificial Sequence: Synthetic coding sequence
  source 1..321: mol_type = other DNA
atgctgaaggccctgttcctgaccatgctgaccctggccctggtgaagagccaggacacggaagaaacaatcacctatacacagtgtacggacggctatgagtgggacccggtgaggcagcaatgtaaagatattgatgaatgcgacatcgtgccggatgcttgtaagggcggtatgaaatgcgtaaaccattatggaggctacctgtgcctgccaaaaacagctcagatcattgtcaacaatgaacagccacagcaggaaacacagcccgcagaagggacctccggcgcaacaaccggcgtggtcgccgcatcctcatag

SEQ ID NO: 186361 - DNA, 189 bp, synthetic construct
  misc_feature 1..189: note = Description of Artificial Sequence: Synthetic coding sequence
  source 1..189: mol_type = other DNA
atgctgaaggccctgttcctgaccatgctgaccctggccctggtgaagtcccaggacactgaggagacaattacatacacacagtgcacagatggatacgaatgggaccctgttcgccaacagtgtaaagatatcgatgaatgcgatattgtgccagacgcctgcaaggggggtatgaaatgtgtgtag

SEQ ID NO: 186362 - DNA, 1332 bp, synthetic construct
  misc_feature 1..1332: note = Description of Artificial Sequence: Synthetic coding sequence
  source 1..1332: mol_type = other DNA
atgctgccctgcgccagctgcctgcccggcagcctgctgctgtgggcgcttctgctgctgttgctgggctccgcatcgcctcaggattccgaagagccagatagctacactgagtgcaccgatggctacgagtgggatcccgatagccagcattgccgggatgtgaatgaatgccttactatacctgaagcctgtaagggagagatgaagtgtattaaccattacggcggatacctttgtttgccacgctctgcggctgttataaacgacttgcatggagaaggtcctccgcccccggttccgccagctcagcacccaaatccttgcccaccaggttacgagcccgacgaccaggattcctgcgtggacgtggacgagtgtgcgcaggctcttcacgactgccgcccaagccaagactgtcataatttaccaggaagctatcagtgtacttgccccgacggttatagaaaaatcggtcccgagtgcgtggatatagacgaatgtagatatcgttactgccagcaccggtgcgtcaacctgcctgggtccttcagatgccagtgtgagcccggctttcaacttggtcccaacaaccggagttgcgtcgacgttaatgagtgtgacatgggagccccttgcgaacaacgttgcttcaattcctatgggaccttcttgtgtagatgccaccagggatatgagctccatcgggatggattctcctgcagtgatatagacgagtgttcttactcctcctacctttgccaataccgttgcatcaacgagcctgggcggttcagctgccattgcccacaggggtatcaactgctagcaactcgactctgtcaggacattgatgagtgcgagtcaggggcccaccagtgttccgaggcccagacgtgtgtcaatttccacggcggataccggtgtgttgatactaatcggtgcgttgagccctatattcaagtctcagaaaataggtgtctctgtccggcgtccaatccactttgccgggagcagccatccagcatagtgcatagatatatgaccattacctctgagaggtctgtgcccgccgacgtcttccaaatccaggccacaagcgtgtatcccggagcgtataatgcattccagattcgcgccggtaactctcagggcgacttctacatcaggcagatcaataatgtcagcgccatgctggtcctggctcggcctgtgaccgggccacgggagtatgtgttggacctggaaatggtgacaatgaactctctgatgtcctaccgtgcctcatctgtcctccgactcacagtatttgtcggcgcttacaccttttag

SEQ ID NO: 186363 - DNA, 609 bp, synthetic construct
  misc_feature 1..609: note = Description of Artificial Sequence: Synthetic coding sequence
  source 1..609: mol_type = other DNA
atgctgccctgcgccagctgcctgcccggcagcctgctgctgtgggccttgctactgttgctgcttggttcggcctcgcctcaggacagcgaagagcctgactcttacaccgaatgtaccgacggatatgagtgggatcccgattcccagcactgccgcgacgtgaacgaatgccttacgattcctgaagcctgcaaaggcgagatgaagtgcatcaaccattacggcggatacctgtgtcttccgcgctctgctgctgtaatcaatgatctgcacggggaaggccccccaccacccgtcccacctgctcaacaccctaatccttgtcctcccgggtatgagccagatgaccaggatagctgtgtggacgtggatgaatgcgcccaggcactgcatgattgccgcccatcccaggattgtcacaacctgccgggaagttaccaatgtacgtgtcccgatggatatcgaaagatcgggccagaatgcgtggacattgacgagtgcagataccgctattgtcagcatagatgcgttaacctgccaggatcttttaggtgccagtgcgagccaggtttccaattgggccccaacaatcgatcatgtgtctag

SEQ ID NO: 186364 - DNA, 552 bp, synthetic construct
  misc_feature 1..552: note = Description of Artificial Sequence: Synthetic coding sequence
  source 1..552: mol_type = other DNA
atgctgccctgcgccagctgcctgcccggcagcctgctgctgtgggctcttctgctgcttctactcggcagcgcttctccacaagatagcgaggagcccgactcatacacagaatgcactgatgggtatgagtgggatccggatagccagcactgccgagatgtgaacgaatgccttaccattcccgaagcctgcaaaggagagatgaaatgtatcaaccattatggggggtacctttgtcttccccggagtgccgctgttattaatgacctacacggagagggccccccccctcccgtgccccctgctcagcatcccaatccctgccctcctgggtatgagccagatgatcaggactcgtgtgtggacgttgatgagtgtgcgcaggccctccatgattgtaggccaagtcaggactgtcacaacctgcctgggagttatcagtgtacctgccctgatggttatcgcaagattggtccagaatgtgtggacattgacgagtgccgataccggtattgccagcaccgctgcgtgaatctccccgggagttag

SEQ ID NO: 186365 - DNA, 1332 bp, synthetic construct
  misc_feature 1..1332: note = Description of Artificial Sequence: Synthetic coding sequence
  source 1..1332: mol_type = other DNA
atgctgccctgcgccagctgcctgcccggcagcctgctgctgtgggcattgctcttattgctgctggggagtgccagtcctcaggacagtgaagagccagactcatacaccgagtgtaccgatggctatgagtgggaccctgacagccagcactgtagagacgtgaacgagtgtctgacaatccctgaggcatgtaaaggagagatgaagtgcatcaatcattacggggggtacctgtgcctgcctagatctgctgctgtgatcaatgacctacacggtgagggtcctcccccgcccgtccctcccgcacagcacccaaacccctgtccccccggttatgaaccggatgaccaggactcctgtgtggacgtggacgagtgcgctcaggccctgcatgattgtcgccctagtcaggactgtcataacctcccgggaagttaccagtgtacgtgtccggatggctatcgcaaaatcggcccagagtgcgtggatattgatgaatgtcgctaccggtattgccagcaccggtgtgtcaatctgcccgggagcttcagatgtcaatgcgagccaggtttccagcttggccccaacaatcgaagctgtgtggatgtgaatgaatgcgacatgggtgcgccatgtgaacaaagatgtttcaatagctacggaaccttcctgtgccgctgtcaccaggggtacgaattacatagagacggattctcctgttctgacatcgacgagtgttcatatagctcttatctctgccaataccgatgtatcaatgaacccgggaggttctcgtgccactgcccccagggctaccaactattagctacccggttgtgtcaggacattgacgagtgtgagagcggagctcatcagtgttccgaggcccagacatgtgtgaacttccatggggggtacaggtgtgttgataccaatcggtgcgtcgagccatatatccaagtgtcagagaaccgttgcctgtgtcccgctagcaaccctctgtgtagagaacagccttcgtctattgtgcaccggtacatgacaataaccagcgagaggtccgttcccgctgacgtgtttcagatccaggcaacaagtgtgtatcctggagcgtacaatgccttccaaatccgagctggtaattcccaaggcgatttttacattaggcagatcaacaatgtttctgccatgttagttctggccagacccgtaacaggacccagggaatacgtcctggatctggagatggtaaccatgaattcccttatgtcataccgggccagctccgtcctacgcttgactgtattcgtgggggcgtatactttctag

SEQ ID NO: 186366 - DNA, 2466 bp, synthetic construct
  misc_feature 1..2466: note = Description of Artificial Sequence: Synthetic coding sequence
  source 1..2466: mol_type = other DNA
atgcggggcttcaacctgctgctgttctggggctgctgcgtgatgcacagctgggagggccacataagacccacccggaaacccaacacaaaaggcaacaattgtagggattccactctttgccccgcttatgcaacttgcaccaacacagtagactcatactactgtgcctgtaaacaagggttcctcagttcaaatgggcagaatcacttcaaagacccaggagtgcggtgtaaagacattgatgagtgctcgcagtctccacaaccatgcggcccaaacagctcctgtaaaaatctgtcggggcgctataagtgctcatgccttgatggcttctcttcccccactggtaacgattgggtcccaggtaagccgggtaatttctcatgtacagatatcaatgaatgtcttactagcagcgtttgtcccgagcacagcgactgtgtcaattctatgggcagttatagctgttcatgtcaagttggattcatctctcgcaatagcacatgcgaggatgttgacgaatgtgcagacccaagagcctgcccagaacacgcaacatgtaataataccgtggggaactacagttgcttctgcaatccgggctttgaaagttcaagtggtcatctgtcttttcagggcctgaaagcctcctgcgaagatatcgacgagtgtactgagatgtgccccatcaactcaacatgtacaaatacccctggatcatatttttgcacatgccaccccgggtttgccccgtctaatggacagctcaactttactgaccagggggtggagtgtcgggacatcgacgagtgtcgccaggatccaagtacatgtggacccaactccatatgcacaaatgcgctgggctcctacagttgcggatgtatcgccggattccatccaaatcccgaaggttcacaaaaagacggaaactttagctgtcaacgcgtccttttcaagtgcaaggaagacgtgataccagacaataaacagatacagcagtgccaggagggaactgctgtgaagcccgcatacgtgtcattctgcgcccagatcaataatattttctccgtcctcgataaggtttgtgagaacaagacaacagtcgtatcactgaagaatacaacagaatctttcgtgcctgttttgaagcaaatctcaacttggaccaagtttaccaaggaggaaaccagcagcctggccacagtgtttctggagtcagtggaatcaatgactcttgcttccttctggaagccttccgcgaacatcacccccgccgtccgcactgagtacttagatatcgagtccaaggtcataaataaggagtgcagcgaggagaacgtgactctggatctagtagccaaaggagataagatgaagattggctgttcaaccattgaagagtccgagagtacagagactacaggagtcgcattcgtgagcttcgtgggcatggagtccgtgctgaatgagagattctttaaggatcaccaggccccactgaccacgtcagagatcaaactgaaaatgaactctagagtcgtcggtggaattatgacgggagagaaaaaggacggtttttctgatcccattatttataccctcgagaacatccagcccaaacagaagtttgaacgtcccatctgtgtgagctggagcactgatgttaagggaggtagatggacatcttttggatgtgtgattctagaagcctctgaaacctataccatttgctcttgcaaccagatggcaaacttagccgtcatcatggccagtggggaacttacaatgggttgtgctatcatcgccggcttcttacattatctgttccttgcatgttttttctggatgctcgtggaagcggttattctgttcctgatggtgcgaaacctgaaagttgtgaattacttctccagccgcaatattaaaatgctccacatctgtgcgttcgggtatgggctgcccatgctggtggtggtcatatccgccagtgtccagccacaggggtacggcatgcacaatagatgttggctaaacacggaaaccggctttatctggagttttcttggacctgtgtgcacagtgatcgtaatcaactctctcctcctgacatggacactgtggatactcagacaacggctttccagcgtgaatgctgaagttagtaccctcaaagatacgaggctgctgacgttcaaagccttcgctcaattattcattctcgggtgcagctgggttctggggatctttcagataggacctgtggcaggcgttatggcatatttattcaccataataaactctctgcagggtgccttcatcttcctgatccactgcctccttaacggacaggtcagagaggagtacaaacggtggatcacgggaaagaccaaaccgtctagtcaaagtcagacatcaagaatccttctcagctccatgcctagcgcgagcaagaccgggtag

SEQ ID NO: 186367 - DNA, 2661 bp, synthetic construct
  misc_feature 1..2661: note = Description of Artificial Sequence: Synthetic coding sequence
  source 1..2661: mol_type = other DNA
atgcggggcttcaacctgctgctgttctggggctgctgcgtgatgcattcttgggaaggacacatacggcccacccgaaagcctaacacgaaaggcaacaattgtcgagattctacattgtgtcccgcctatgctacctgcacaaacacggttgactcttattactgcgcctgtaaacagggatttttatcttctaatgggcagaatcacttcaaggacccaggcgtccgctgcaaggacatcgatgagtgtagccaaagccctcagccttgtggacccaatagctcttgcaaaaacctttcaggccggtacaaatgttcctgcctggatggttttagtagccccacaggtaatgactgggtgccaggaaagccgggcaacttcagctgcacggacatcaatgagtgcctgactagcagtgtgtgtcctgagcacagcgattgcgtgaactcgatgggcagctattcctgttcttgtcaagtaggattcatctcccggaacagcacctgcgaggatgtggatgagtgtgcagatcctcgggcatgcccggagcacgctacctgtaataacacggtcggcaattactcctgcttctgtaaccccggcttcgaaagctcttcaggccatctcagcttccagggtcttaaagcttcctgtgaggacattgatgagtgtactgaaatgtgccctattaattccacgtgcactaatacaccgggatcttatttttgcacttgccaccccgggtttgccccgtctaacggccaattgaattttaccgaccaaggcgtagagtgccgagatatcgacgagtgtcgccaagatccatcaacttgcggtccgaattctatttgcaccaatgccctcggctcctatagctgtggctgtatcgccggctttcaccccaaccccgagggctctcagaaggacgggaacttctcctgtcagcgtgtgctgttcaaatgcaaggaagacgtcattccagacaataaacagatccaacagtgtcaggaaggcacggccgtgaaaccagcgtatgtgtccttctgtgcccaaatcaataacattttcagcgtcctcgacaaggtctgcgaaaacaagacaaccgtggtgtctctcaaaaataccactgaatcttttgtccccgtactaaaacaaatttccacctggaccaagtttaccaaggaagaaaccagcagcctggctacagtctttcttgagtccgtggaaagcatgacgctagctagtttctggaaaccaagcgcaaatatcactccagcggtccggaccgagtatctcgacattgagtctaaggtcattaataaggagtgttctgaggaaaacgtgaccctagacctggtagccaaaggagacaaaatgaagattgggtgtagcaccatagaagaatctgaaagcaccgagaccacaggggtcgcgttcgtgagtttcgtagggatggagagcgtcctgaacgagaggttcttcaaagatcaccaggccccccttaccacttctgagatcaaacttaagatgaacagccgcgttgtgggcggaatcatgacaggtgaaaagaaggacggcttttctgatcctatcatttatactctagagaatattcagccgaagcagaaatttgaacggccaatttgtgtgtcctggagcaccgatgtgaaaggaggccgttggacttcatttgggtgcgtgattctagaggctagcgagacctacaccatttgcagttgtaatcagatggccaacctggctgttatcatggcatctggggaactgactatggatttcagtctgtacattatttcacatgtgggaatcattattagcttagtctgcctggtgctggctatcgcaaccttcctgttgtgtaggtctatccgaaatcacaatacctatctccatctgcatctctgcgtgtgtttgctcctggcaaaaacgctgtttttggctggcatccataagacagataacaagatgggatgcgccataatcgctggttttctgcattacttgttcctggcttgcttcttctggatgctggtggaggctgtcattctgttcctgatggtccggaacctaaaagtggttaactacttctctagtcgcaatattaaaatgttacacatttgcgcctttggttacggacttcccatgctcgtcgtggtcatatcggccagtgttcagccacagggctatgggatgcataatagatgttggttgaacaccgagactggatttatctggtccttcctgggtccagtttgtacggtgatagtgatcaatagtctgctgttaacatggactctctggattctccgccagagactctcatccgtgaacgccgaggtgtctactctgaaagacaccaggctcctgactttcaaagcctttgcgcagctcttcattcttggatgctcatgggtccttggtattttccagatcggcccagtcgccggcgtcatggcctacctgttcacaatcatcaatagtctgcaaggggcgttcatattcttgatacactgcctcctgaacggccaggtacgcgaggaatacaagcgatggattactggtaaaacaaaacccagcagccagagtcaaacgagccgaatcctgctgtcaagcatgccatccgcttcaaagaccggctag

SEQ ID NO: 186368 - DNA, 2604 bp, synthetic construct
  misc_feature 1..2604: note = Description of Artificial Sequence: Synthetic coding sequence
  source 1..2604: mol_type = other DNA
atgcggggcttcaacctgctgctgttctggggctgctgcgtgatgcatagttgggagggtcatatccggccgacaaggaagcccaatacgaagggcaacaactgcagggatagcaccctgtgccccgcttacgccacctgcacgaacactgtagattcctattactgtgcctgtaagcagggcttccttagctccaacgggcagaaccactttaaagatcctggtgtgagatgcaaagatatcaacgagtgtctgacaagcagcgtgtgccctgagcactctgattgcgttaactccatgggctcgtactcctgtagttgtcaggtcggcttcataagtcgcaattcaacctgcgaggacgtcgatgagtgcgctgatcctagagcgtgccctgagcacgccacctgcaacaacactgtgggcaattattcttgtttctgtaaccccggcttcgagagctccagtggccatctgtctttccagggccttaaggccagctgtgaggatatcgacgaatgtacagagatgtgtcccatcaattcaacgtgtaccaacacccccggcagctatttttgcacatgtcaccctggtttcgctccatctaacgggcagctcaactttactgaccagggcgtggagtgccgggacatcgatgagtgtagacaagaccccagtacttgcggtccaaatagtatctgcaccaatgccctcggctcatactcctgcggctgcatagccgggttccatcctaacccagaaggttcccagaaagatggtaatttctcctgtcaaagggtcctttttaagtgtaaagaagacgtgattcctgacaacaagcagattcaacagtgccaggagggcactgcggttaagcctgcatacgtatccttttgcgcccaaatcaataatattttctcggtacttgataaggtgtgcgagaacaaaactacagtcgtcagtctgaagaacaccactgagagcttcgtgccggtgctcaagcagatttctacgtggactaagtttacaaaagaagaaacatcatccctggccacggtgttcctggagtccgtggagagtatgaccctcgcttcattctggaagccatccgccaatataactccggccgtccgcacagagtacctagatattgaaagtaaggtcatcaataaggaatgttctgaggaaaatgtgactcttgacctggtagccaagggcgataagatgaagatcggttgttcaaccattgaagaatccgagtctaccgagaccacaggggttgcctttgtgtcattcgtgggaatggagagcgtactgaacgagcgattctttaaagaccaccaggccccactgacgacatccgagattaagctgaagatgaacagcagggtggtcggcggcatcatgactggggagaagaaggacggcttttccgatccaatcatctatactctggagaacatccaacccaagcaaaaattcgaacgccccatctgtgtatcttggtcaacagatgttaagggaggtcggtggacctcattcggctgcgtcattttggaagcatccgagacttatacaatctgtagctgtaatcagatggccaatctggccgtcatcatggcgagcggcgaattgactatggacttcagcttatacataattagccatgtgggaattattatatcattggtgtgcctagtgctggccattgctaccttcctcctttgtaggagcatacgtaaccacaacacctacctgcacctgcacttgtgtgtttgtttacttctcgctaaaactctgttcctcgcgggcatccacaaaaccgacaataaaatggggtgcgctattattgcggggttccttcactatttattcctcgcctgtttcttctggatgctggtggaagcggtcattttatttctgatggtgcgtaacctgaaggtagtaaactacttcagcagcagaaatattaaaatgcttcatatatgcgcatttggctatggattaccaatgctggtcgttgtcatctccgcttccgtgcagccccaaggctacggcatgcacaacagatgttggctcaatactgaaaccggctttatctggagcttcctaggaccagtctgcacggtaatcgttgtctctaagtactataattcattggctaaatgcgtgctgaaggaagagcaaggggacctgcgggatttggaattccctggaacctgtgctgcagaaaggatcaactcactgctcctaacttggacactatggatcctgaggcagaggctaagtagcgtgaacgccgaggtctcaacacttaaggacacccgcctcttgacattcaaagcttttgcacagctcttcattctgggctgctcttgggtgctgggcatctttcagatcggccccgtggccggtgttatggcttacttgttcactattataaacagcctgcagggggcttttatcttcctaatacactgcctattaaatggtcaggtgagagaggagtataagagatggattacaggcaaaaccaaaccttcatcccagtcacagacctcaagaatcttgctgagtagcatgccctccgcctcaaagaccgggtag

SEQ ID NO: 186369 - DNA, 2238 bp, synthetic construct
  misc_feature 1..2238: note = Description of Artificial Sequence: Synthetic coding sequence
  source 1..2238: mol_type = other DNA
atgcggggcttcaacctgctgctgttctggggctgctgcgtgatgcactcctgggaggggcatatccggccaacacggaaaccaaacaccaaggggaataactgcagggattcgaccttatgtccagcgtatgcgacgtgcaccaacacagttgattcctattattgtgcttgtaagcagggttttttatcatcaaacggacagaatcacttcaaagacccaggggtacgttgtaaggacatcgatgaatgtacagaaatgtgccctatcaattctacatgcaccaacactcccggctcctatttttgcacctgtcacccaggattcgcgccctccaacgggcagctgaacttcacagaccagggagtggagtgtagagacatcgacgaatgtcgacaggacccatctacttgcggaccaaatagtatctgtaccaacgctcttggaagttacagctgtggctgtatcgccggatttcatcccaaccctgagggatcccagaaggatggcaatttctcatgtcagcgggttctattcaaatgcaaagaggacgtgatacctgataataaacaaatccagcagtgtcaggagggcaccgccgtaaagcctgcgtacgtgtctttttgcgcacagattaataacatattctccgtgctggataaggtgtgtgaaaataagactacagtcgtttctctcaaaaacaccaccgaaagtttcgttccagtccttaagcagatttccacatggaccaagtttaccaaggaggagaccagctctctggccaccgttttccttgagagtgttgagtcaatgacattggcctctttctggaaacctagcgctaatattaccccagccgtgagaacagagtatctcgatatagagagcaaggtcattaacaaggagtgtagtgaagagaatgtcactctagacttagtggccaagggggataaaatgaagatcggctgtagtaccatcgaggagtcggagtctactgaaacgactggcgtggccttcgtttcttttgtgggcatggagagtgttctgaatgagaggtttttcaaagaccaccaagcacccctgacgacctctgaaatcaaactaaagatgaatagtagggtggttggcgggatcatgactggagaaaagaaagacggattctcagaccccattatctacacactggagaacattcagccaaagcagaaatttgagcggcctatctgcgtatcctggtcaactgacgtaaagggcgggcgctggaccagcttcggctgtgtgattctggaggcctctgagacatataccatttgctcttgtaatcagatggccaacctagctgttattatggccagcggggagctcaccatggacttctcgttgtacattattagtcatgtcggaattatcattagtctcgtgtgtctagtgctggctattgcaactttcttactgtgccgttccatccgcaaccataacacgtacttacacctgcacctctgcgtatgtctgctgctggctaagacacttttcctggcgggtattcataagaccgacaataaaatgggctgcgcgatcatcgccggattcttacactatctctttttagcctgcttcttttggatgctcgtcgaagccgtgatcctgttccttatggtccgcaatctgaaggtagtcaactacttctcctctcggaatattaaaatgctccatatctgcgcattcgggtacggtctgcctatgctggtggtagtgatcagcgcttccgtccagcctcagggctatggaatgcataatcgatgctggctgaacaccgagacagggttcatatggagctttctcggcccagtgtgtaccgtcatcgttatcaatagcctactcctgacttggacactgtggatactcaggcaacggttgtcttcagtgaacgccgaagtatcaactcttaaggatactagattgttgacatttaaagccttcgctcaactgtttattctgggatgtagctgggttctgggcattttccagatcggccccgtcgctggggtgatggcgtatctatttaccattatcaatagcttgcagggagcatttatatttctgatccactgcctgctcaatggccaggtgagagaggaatacaagaggtggatcacagggaaaaccaagccaagctcccagagccagacgtctaggattttactcagtagtatgccttccgcttccaagacaggctag

SEQ ID NO: 186370 - DNA, 2130 bp, synthetic construct
  misc_feature 1..2130: note = Description of Artificial Sequence: Synthetic coding sequence
  source 1..2130: mol_type = other DNA
atgcggggcttcaacctgctgctgttctggggctgctgcgtgatgcactcctgggaggggcatatcagacccactaggaaacccaacacaaaggggaacaactgtagggatagcacactgtgtccggcctacgctacatgcactaataccgttgattcctactattgtgcctgcaagcaggggttcttgagttccaatggtcagaaccactttaaggatccaggggttagatgcaaggacatcgacgaatgcagccagagcccccaaccctgcggccctaatagttcctgcaagaatttgagcggacgatataaatgctcgtgccttgatggcttcagttcgcccaccgggaatgattgggtacccggcaaaccagggaatttctcttgtaccgacatcaacgaatgcctgactagccgggtgttgtttaaatgtaaggaagacgtgatccccgacaacaaacagatccaacagtgtcaggagggcaccgccgtgaaaccggcctatgtgagcttttgcgcacagattaacaacatcttctccgtcctggacaaagtctgcgagaacaaaacaaccgttgttagcttgaaaaataccacggagtcattcgtgccagtacttaagcagatatcgacctggacaaaattcactaaagaggaaaccagctccctggccacagtttttctcgagtcagtggagtccatgaccctggcttctttctggaagccctcggccaatatcacgccagccgtcagaacagaatatctagatattgaaagtaaggtgatcaacaaagagtgttcagaagagaatgtgactctggatctggttgccaaaggcgacaaaatgaaaattggctgctctaccatagaagagtcagaaagcacagaaactactggagtggcttttgtctccttcgtgggaatggagtccgtgctaaacgaaaggtttttcaaggatcatcaggccccactgaccacaagcgaaatcaagctgaaaatgaatagccgcgtcgtgggaggtattatgaccggcgagaagaaggacggtttttccgatcccattatttacaccctcgagaacatccaacccaagcagaaattcgaacgccctatatgtgttagctggagtacagacgtgaagggggggagatggacctctttcggctgcgttatccttgaggcgtctgaaacatataccatctgttcctgtaatcagatggctaatctggccgtgataatggcgagtggtgagcttacaatggacttctccctgtatatcatctcccacgtaggaatcatcatctcacttgtgtgcttggtgctggctatagcaaccttcctcctttgccgctccatcagaaaccacaacacttacctgcaccttcacctgtgcgtgtgtctcctacttgccaaaaccctctttctggctggaattcacaaaactgataacaaaatggggtgcgcgatcattgccgggtttctccattacctgttcttggcctgtttcttctggatgcttgtagaggcggttatccttttcctcatggtccgcaacctaaaagtggtaaattatttctcttcgagaaatattaagatgcttcatatctgtgccttcggatacggactcccaatgctcgtcgtggtgatctccgcaagtgtgcagccgcagggctacggcatgcacaatcgctgttggttaaacaccgaaactgggtttatctggtcttttctgggcccagtgtgcaccgtgatcgtgattaattctctgttgctgacctggactctctggattctgcgccagcgcctctctagcgttaatgcggaagtctcaactcttaaggacaccaggctgctgacctttaaagcctttgcgcagctgttcattctagggtgttcctgggtgttgggcatcttccaaatcgggccggtcgccggagtgatggcttatctgtttactatcataaactctctgcaaggggcctttattttcctgatacactgcttgctaaacggccaggtgagagaagagtataagcggtggatcactggcaagacaaagcccagcagtcagtctcagacgtcccgcatactgctctccagcatgccttccgcatccaagaccgggtag

SEQ ID NO: 186371 - DNA, 2466 bp, synthetic construct
  misc_feature 1..2466: note = Description of Artificial Sequence: Synthetic coding sequence
  source 1..2466: mol_type = other DNA
atgcggggcttcaacctgctgctgttctggggctgctgcgtgatgcacagttgggaagggcatattcggcctaccaggaagccaaacaccaagggcaacaactgcagggacagcacgctgtgtccggcttacgcaacttgtaccaatacagtggacagctattactgcgcatgcaaacaggggtttctttctagcaatggccaaaaccacttcaaagacccaggagtgcgatgcaaggatattgacgaatgcagtcagagccctcagccttgtggaccaaattcttcttgtaaaaatctgagcggacggtataaatgttcatgtctcgacgggtttagctcacctacagggaatgactgggttcctgggaaacctggcaatttttcatgtaccgatattaatgagtgtttaacttcatccgtatgtcccgaacactcggactgcgtgaatagtatggggtcatattcttgctcctgtcaagttggattcatctcacgtaacagcacatgcgaagacgtggatgagtgtgcagaccctagagcatgccccgagcatgccacatgtaataacaccgtcggcaattactcctgcttctgcaaccccggatttgagtcctcaagcgggcacctgtctttccagggattgaaggccagttgcgaggatattgacgaatgtaccgaaatgtgtccgatcaattctacatgcactaacaccccaggatcatatttttgtacatgtcatcctggattcgcaccttccaacgggcagctgaactttaccgatcaaggcgtggaatgtagggatatagacgaatgccgccaggatcctagcacatgcgggccaaattccatatgtacaaacgccttgggctcatatagctgcggttgcattgcaggcttccaccccaatcccgagggatcccagaaggatggaaactttagctgtcagcgggtgctgtttaagtgtaaggaagatgtaattccagacaacaaacagatacagcagtgtcaagaaggaacagctgtgaagccagcgtatgttagcttctgtgcgcagattaataacatcttctcagtgctcgataaagtgtgcgagaataaaaccactgtggtttctctcaagaacacgaccgaaagctttgtccccgtgctgaagcagatctctacatggacgaaatttacaaaggaggaaacgagcagccttgccacagtgttcctagagagtgttgaatcaatgactctggctagcttctggaagccttctgccaatatcacgcccgcagtgaggacagagtacctggacatcgaatctaaggtcatcaataaggagtgttctgaagagaacgtaaccctcgaccttgtggctaaaggcgacaaaatgaaaattgggtgttcaacaatcgaggagtccgagtccacagagactaccggcgtagcattcgtgtcattcgtaggaatggaatccgtcttgaatgaacggttttttaaagatcaccaggcgcccttgacaacctccgaaattaagctgaagatgaatagtagagtcgtgggcggcatcatgacgggagagaagaaggacggcttcagcgaccccatcatttatacactggaaaatatccaacctaaacagaagttcgagcgaccaatatgtgtgtcctggtctaccgacgtcaagggcggtaggtggacttcatttggctgcgttatactggaagccagtgagacttatacgatttgctcctgtaatcagatggctaacctcgccgtgataatggcttccggcgaattgacaatgggctgtgccatcatagcaggctttttacattacctcttcttggcgtgcttcttctggatgttggtcgaagcagtgattcttttcttaatggttcggaatctcaaggtcgttaattatttctcaagtcggaatatcaaaatgctccacatctgtgcctttgggtatggcctgcctatgctggttgttgtgatcagcgcatctgtgcagccgcagggctatggcatgcataatagatgttggctgaatactgagaccggcttcatttggtcttttctcggcccagtatgcactgttatcgtgattaacagcttactgctcacatggacactttggatactgcgtcagagattatccagcgtcaacgcggaggtgtctacactgaaagacactaggttactgacgtttaaagcgttcgcccagttgttcattctcggatgctcttgggtgctgggcatctttcagataggacccgtcgctggagtgatggcgtacctgttcacaattattaattctttgcagggggcctttatctttctcatacattgtctcttaaatggccaggtcagagaggaatataagcgatggataactggcaagactaagcccagcagccagagccaaacaagtcgcatcctgctctcctccatgccctctgcctctaaaacgggctag

SEQ ID NO: 186372 - DNA, 1662 bp, synthetic construct
  misc_feature 1..1662: note = Description of Artificial Sequence: Synthetic coding sequence
  source 1..1662: mol_type = other DNA
atgcccctgccctggagcctggccctgcccctgctgctgagctgggttgcaggagggtttggtaatgccgcttccgccagacatcacggcttgctggcgtccgccagacagccaggggtgtgtcattatggcacaaaactggcttgctgctatgggtggcgcagaaatagcaagggggtatgcgaggcgacgtgcgagcctggctgtaagtttggcgagtgcgtgggccctaacaagtgtcgctgctttcctggctacacgggtaagacttgcagccaggatgttaatgagtgcgggatgaaaccacgcccatgccagcaccggtgcgtgaatactcacggttcctacaagtgcttttgtctcagcggtcacatgctcatgcccgacgctacatgcgtaaacagtcggacatgtgcaatgatcaactgtcagtattcttgtgaggacaccgaagagggcccacagtgcttgtgtccatcatccgggttgaggctggcacccaatgggagagactgccttgatatcgatgaatgcgcttctggcaaagttatctgcccctacaaccggcgctgcgtgaacacgtttggatcatactactgcaaatgtcacatcggcttcgagctgcagtatataagcgggaggtacgactgtattgacataaacgagtgcaccatggacagccacacttgttcccatcacgcaaactgttttaacacccagggctccttcaagtgcaagtgcaagcaggggtataaaggtaacggtctgcggtgttccgctattcctgaaaacagtgtgaaagaggtccttagagctccaggcaccattaaggataggattaagaagctgttggctcataagaactctatgaaaaaaaaggctaaaattaagaatgtcaccccagaacctacaagaactcccactcccaaagtgaacctgcagccctttaattacgaagagatcgtgtctcgggggggcaacagccatgggggaaaaaaaggaaacgaagaaaaaatgaaagagggcttagaagacgagaaacgtgaagaaaaggctcttaaaaatgacattgaagagcgtagcctccgcggtgatgtgtttttccctaaggtgaacgaggctggcgagttcggcttgattcttgtccagcgcaaggcccttactagcaaattggagcataaggacctgaacatctccgttgactgcagcttcaatcacgggatctgcgattggaaacaagatcgtgaggacgattttgactggaacccggctgatagagataacgcaatcggattttatatggccgtgccggctctcgcaggacataagaaagatataggccgactgaaattactgctcccagatttacaaccacagagcaatttttgtctactgtttgactaccgtcttgccggcgacaaggtcggcaaattgcgagtgtttgtgaaaaactctaacaacgcacttgcgtgggaaaagaccacatccgaagacgagaagtggaagacaggaaagatccagctgtaccagggtaccgatgccactaaatctattattttcgaggccgagcgggggaaaggaaagacaggagagattgccgtggacggggtgctgctcgtgtctggattgtgcccagactcgctactgagtgtcgatgattag

SEQ ID NO: 186373 - DNA, 1665 bp, synthetic construct
  misc_feature 1..1665: note = Description of Artificial Sequence: Synthetic coding sequence
  source 1..1665: mol_type = other DNA
atgcccctgccctggagcctggccctgcccctgctgctgagctgggtcgctgggggattcgggaatgcagccagtgctcgacaccacggcctccttgcttctgccaggcagcctggtgtgtgccactacggtaccaagctcgcctgttgctacggttggcgacgtaacagcaagggtgtctgcgaggccacgtgcgaacccgggtgtaagtttggtgagtgtgttggtcccaataaatgcaggtgcttccctggttacacggggaaaacatgtagtcaggatgtaaacgaatgtggcatgaagccacggccttgtcagcatagatgcgtcaacactcacgggagttacaaatgcttctgcctttcagggcacatgttgatgccggacgcaacctgcgtgaactctcggacctgcgcgatgatcaattgccaatacagttgtgaggatactgaggaaggaccgcagtgcctctgcccgagcagcggcctgcgtcttgctcccaacgggagggattgcttagacatcgatgagtgcgcttcggggaaggtgatctgtccctataaccgccgttgtgtgaataccttcggatcgtattactgtaaatgccacataggatttgagctacagtacatctccggcaggtacgattgtattgatataaatgagtgcacgatggatagtcacacatgctcgcatcacgccaactgtttcaacacacaaggctctttcaagtgtaagtgcaagcagggctacaaggggaacggattaagatgctcagcgatccctgagaactctgttaaggaagtcctcagagcccctgggactattaaagacagaattaaaaaacttctcgcacacaagaactccatgaagaagaaagccaagattaagaacgtcacccctgagccaacgaggacccctaccccaaaggtcaacctacagccctttaactatgaggaaattgtgtcacgcgggggtaattcacatggggggaaaaagggcaacgaagagaaaatgaaggaaggcttagaggacgagaagcgcgaggagaaggcattaaaaaacgacatcgaagaaaggagcctgcggggggacgtgttcttccccaaagtgaacgaagcaggagaattcggacttatcctggtgcagcggaaggcactgacttcaaagctcgagcataaggccgatcttaatattagtgtcgattgcagctttaaccacgggatttgcgattggaaacaggacagggaggatgacttcgattggaatcccgctgaccgggacaatgccattggtttttacatggcagtcccggcactggcgggccataaaaaggatattgggagactgaagctgttgctgcccgacctccagccccagtcgaacttctgtctgctgtttgattatcgtttggcgggcgacaaggtaggtaagctgagagtcttcgtcaagaattctaataatgcactagcctgggaaaagacgacttccgaagatgagaagtggaagacagggaagattcaactttatcagggcactgacgctactaaatcaatcatttttgaggctgaaagaggcaaaggaaagaccggggagatcgctgtagatggagtactgctcgtgtccggcctctgtcccgattctctgttgtcggtcgatgactag

SEQ ID NO: 186374 - DNA, 822 bp, synthetic construct
  misc_feature 1..822: note = Description of Artificial Sequence: Synthetic coding sequence
  source 1..822: mol_type = other DNA
atgcggggcagccaggaggtgctgctgatgtggctgctggtgctggctgtcggcggtaccgagcacgcctaccgccctggacggcgagtctgcgctgttagggcacatggagacccagtctctgaatcgttcgtccagagagtgtatcagccttttcttaccacgtgcgacggccaccgggcatgcagcacatatcgcacaatctaccggacggcataccgccggtccccggggttggctccagcccgaccgcgctacgcctgttgtcccgggtggaagcggaccagcggccttcccggagcatgcggggctgctatttgtcaacctccctgtcggaacgggggttcttgcgtccagccaggccggtgtcgatgtccagcaggatggaggggggatacctgccagagcgacgtcgacgagtgcagcgcccgcaggggaggctgcccccagcgttgtgtgaacacagctgggagttactggtgccaatgctgggagggacactccctcagcgcagacggtactctttgcgtccctaagggcgggccccccagagtggcacctaaccccaccggcgtcgattctgccatgaaagaagaggtgcaaagactgcagtcaagagtcgatttgctggaggaaaaactccaactggtcctcgcgccacttcattccctggcatcccaagctctcgagcacgggcttccagaccccgggtcactgctcgtgcattcttttcagcagctgggtaggattgattcactgagtgagcagatcagcttcctggaagagcagctgggatcttgtagctgcaaaaaggactcgtag

SEQ ID NO: 186375 - DNA, 822 bp, synthetic construct
  misc_feature 1..822: note = Description of Artificial Sequence: Synthetic coding sequence
  source 1..822: mol_type = other DNA
atgcggggcagccaggaggtgctgctgatgtggctgctggtgctggctgtgggtggtactgagcacgcctacagacccgggagacgggtgtgtgccgttcgagcgcacggcgacccggtttccgagtcttttgtgcagagggtgtaccagcctttcttaaccacatgcgatggacatcgggcatgttctacctacagaaccatttataggacagcctaccgaagaagccccggtctagcccccgcgcggccaaggtatgcgtgttgtcccggctggaaacggactagcggtttgcctggggcctgtggggcagccatttgccagcctccttgccgcaacggcgggtcatgtgttcagcccggcaggtgccgctgcccagctggctggagaggcgatacatgccagtccgacgttgatgaatgcagcgcacgcagagggggatgtccacagcggtgtgttaataccgccgggtcttactggtgtcaatgttgggaggggcatagcctgtcggctgacggaaccctgtgcgtgccaaaaggcggcccccccagggtggctccgaatcctaccggagtcgactctgcaatgaaggaggaggttcagcggttgcagagccgggtcgatctgctggaggaaaagcttcagctggtactggccccccttcattcgcttgcctctcaggcactggagcacggcctccccgatcctggctctctcctggtacatagttttcaacagctcggccgtattgactccctgtcagaacaaatctcattcttggaggaacagctgggcagttgcagctgcaaaaaagacagctag

SEQ ID NO: 186376 - DNA, 822 bp, synthetic construct
  misc_feature 1..822: note = Description of Artificial Sequence: Synthetic coding sequence
  source 1..822: mol_type = other DNA
atgcggggcagccaggaggtgctgctgatgtggctgctggtgctggctgtcggcggtactgagcacgcgtaccgcccaggccggcgggtttgcgcggttcgggcacacggggatcccgtctcggaatctttcgtacagcgcgtataccagccctttctgaccacttgcgacggacatcgggcatgcagtacctaccggaccatttatcgaactgcttaccggcggtctccaggactcgcacccgccagaccccggtacgcctgttgtccgggatggaagcgcacctcagggctgcccggggcctgcggggctgcaatctgccagcccccctgccgcaatggtgggtcttgcgtgcagccgggtagatgtcggtgtcccgctgggtggcgaggcgatacctgtcaatctgacgtcgacgagtgctctgcacgccggggcggatgccctcagaggtgtgtgaacacagctggcagctattggtgtcagtgctgggaaggccactctctttccgcggacggtactctgtgtgtacccaagggcggcccccctagagtagcacctaatcccacgggtgtggattcagctatgaaagaagaggtccagcgcctccagagtagagttgatctgctggaggagaaactgcagttggtacttgccccactccacagcttggccagccaggcactggaacacgggttgcctgatcccggaagcttgctggtacactcctttcagcagcttggtaggatcgattctctctccgaacagatcagttttttagaggaacagctgggatcttgtagttgcaaaaaggatagttag

SEQ ID NO: 186377 - DNA, 822 bp, synthetic construct
  misc_feature 1..822: note = Description of Artificial Sequence: Synthetic coding sequence
  source 1..822: mol_type = other DNA
atgcggggcagccaggaggtgctgctgatgtggctgctggtgctggctgtgggcgggactgaacacgcataccgccctggccggagggtctgcgcagtacgagcccacggggatcccgtcagcgagtcgtttgtgcagcgggtttatcagccattcctgactacttgcgatgggcacagagcctgttctacttatcgcacaatttaccgtactgcctatcggagatccccagggctggccccagcgcgtcctcgctacgcctgctgtcctgggtggaagcgcacatctggtctccccggggcctgtggcgccgcaatttgtcaaccgccatgccgtaatggcgggtcgtgtgttcagcctggaagatgccgctgtccagctggatggcggggagacacgtgccaatccgacgttgatgaatgctccgccaggcgagggggatgcccacaaaggtgcgtcaatacagccgggtcttactggtgtcagtgctgggagggacatagcctgtccgcagacggaactctgtgcgtgcctaagggaggccccccacgggtagcaccgaacccaaccggcgtggactctgcaatgaaagaggaagtgcaacgcctgcaatctagggtcgacctcctggaggaaaagctgcaactcgtgttggcccctttgcatagtctcgcatcccaggcgctggaacacgggctgccggacccaggaagcttgctggtgcactccttccagcagttaggccggatcgactctctgtcagagcagatcagctttcttgaagagcagttaggctcttgctcgtgtaagaaagatagctag

SEQ ID NO: 186378 - DNA, 882 bp, synthetic construct
  misc_feature 1..882: note = Description of Artificial Sequence: Synthetic coding sequence
  source 1..882: mol_type = other DNA
atgggcagccgggccgagctgtgcaccctgctgggcggcttcagctttctcctacttctgataccgggcgaaggagcgaaggggggctccctgcgggagagtcaaggagtttgctctaagcagacgctggtcgtcccgctacattataatgagagttacagccagcctgtatataagccttatctgacgctgtgcgcgggacggagaatttgtagtacttatagaacaatgtaccgcgtgatgtggcgagaagtgcgccgtgaggtgcaacaaacgcacgctgtgtgctgtcagggatggaagaagcggcatcccggagccctcacctgtgaggcaatttgcgccaaaccatgtctcaatggaggcgtgtgtgtcagaccggatcaatgtgaatgtgcccccgggtggggggggaaacattgccacgtggatgtggacgagtgtcgtacctccatcaccctgtgttcccatcactgtttcaatacagcaggtagtttcacttgcggctgtccacatgatttggtgcttggagtggacggacggacatgcatggaagggagccccgaacctcccaccagcgcatcaatcctctccgtggccgtgagggaggccgagaaggatgaacgggccttgaagcaggaaatccacgagctccgcggccgcttggagcggctggaacaatgggctgggcaggcaggggcctgggtgagggccgtactgcctgtacctccagaagagttacagccagagcaagttgccgagctgtggggacggggcgacagaatcgagagtcttagcgaccaggttctgctgctggaggaacgtctaggggcatgttcctgcgaagacaattctctgggattaggggttaaccacaggtag

SEQ ID NO: 186379 - DNA, 882 bp, synthetic construct
  misc_feature 1..882: note = Description of Artificial Sequence: Synthetic coding sequence
  source 1..882: mol_type = other DNA
atgggcagccgggccgagctgtgcaccctgctgggcggcttcagcttcttgctcctgcttatccccggtgagggcgccaagggcggttctttgagggaaagccaaggggtctgctcaaagcagaccctggtcgtaccccttcactataacgaatcatactctcagcccgtgtacaagccgtacctcaccctttgtgcaggaagaaggatctgtagtacctaccggacgatgtaccgcgtgatgtggcgggaggtgagacgcgaggtgcagcagactcacgccgtctgctgccagggatggaaaaaaaggcatcccggagcattaacgtgcgaagctatctgcgcgaagccctgcctgaacggcggtgtttgtgttcgtccggatcagtgtgaatgtgccccggggtggggaggaaaacattgtcacgtcgacgttgatgaatgtcggaccagtataacgctatgttctcatcactgcttcaacacagccgggagcttcacctgtggttgcccacatgacctggtgctcggtgtggatggtcgtacgtgtatggaaggctctccagaaccacccacctccgccagcatactgtccgtggcagtccgagaagctgagaaggacgaacgagccctcaaacaggagattcatgagctgcgggggcgactcgagagattagaacagtgggccggtcaggccggagcctgggtgcgcgccgtgctgcccgtaccccctgaggaactgcagccggagcaagttgcagaactctggggcagaggcgatcgcatcgaaagcttatccgatcaggtcctcctcctcgaggagcggctgggggcatgtagctgtgaggacaactctctgggtctcggggtcaatcaccggtag

SEQ ID NO: 186380 - DNA, 882 bp, synthetic construct
  misc_feature 1..882: note = Description of Artificial Sequence: Synthetic coding sequence
  source 1..882: mol_type = other DNA
atgggcagccgggccgagctgtgcaccctgctgggcggcttcagcttcttacttttgttgatcccaggtgagggcgccaaaggaggtagtctgcgagaatcccaaggagtctgctcaaagcagaccttggtggtgccactgcattacaacgaatcttattcccaacctgtctacaaaccatacctgacattgtgcgctgggaggcggatctgtagcacttacaggacgatgtacagagtgatgtggcgcgaggtgaaacgggaggtgcagcagactcatgcggtgtgctgccagggatggaagaagcgacaccctggagctttgacatgcgaggccatatgcgcgaagccatgcctgaacggaggggtgtgtgtcaggccggatcagtgcgagtgcgccccaggatggggcgggaaacattgccacgtggacgtggatgagtgtcgtacatcaatcactttgtgctcccatcactgtttcaataccgccggatcatttacctgtggttgtcctcacgacttagttctgggagtggacggccggacctgtatggaagggtcgccagaaccacccaccagcgcatccattctgtccgttgccgtgcgcgaggctgagaaggacgagagggccctgaaacaggaaatccatgagctacgaggtaggctagaacgcctggagcagtgggcaggccaggcaggagcatgggtgagagcggttctccccgtgccacccgaggaactacagccagagcaggtggcagaactgtggggccgcggagaccgcatcgagtccttatcagatcaggtgcttcttttagaagaaaggttgggggcttgttcctgcgaggataacagcctgggtctcggcgtgaatcacaggtag

SEQ ID NO: 186381 - DNA, 777 bp, synthetic construct
  misc_feature 1..777: note = Description of Artificial Sequence: Synthetic coding sequence
  source 1..777: mol_type = other DNA
atgggcagccgggccgagctgtgcaccctgctgggcggcttcagctttttgctcctgttgattcccggcgagggagccaaaggaggttctttgagagagtctcagggcgtgtgctctaagcagacattggtggtccccctgcattataacgagagctacagccagcctgtttacaaaccatatctgacactctgcgctgggcggagaatttgctccacctaccgaaccatgtatcgcgttatgtggcgcgaggtgcgcagagaggtgcagcaaacacacgccgtgtgctgtcagggctggaagaaaagacaccccggcgcactgacctgcgaggctatctgtgctaagccttgtctcaacggcggagtctgtgtcagacctgaccagtgcgaatgcgctcctggatggggcgggaagcattgtcatgtgggctccttcacatgtggatgtcctcacgatttggtgctcggtgtggatgggcgcacttgtatggaagggagcccagagccacccacctcagctagcatcttgtctgtggccgtacgtgaagcagaaaaggacgagagagctttgaaacaggaaatccacgagcttagaggccgcctggagaggctggagcaatgggcggggcaggccggtgcttgggtgcgcgcagtattgcctgtgcctccggaggaactgcagcccgagcaggtagcggagctttggggacggggagaccgtattgaatctctcagcgaccaggtacttctgttagaggaaagactaggcgcgtag

SEQ ID NO: 186382 - DNA, 882 bp, synthetic construct
  misc_feature 1..882: note = Description of Artificial Sequence: Synthetic coding sequence
  source 1..882: mol_type = other DNA
atgggcagccgggccgagctgtgcaccctgctgggcggcttcagctttctgcttctgctgattcctggagaaggggcaaaaggaggctctctccgggagagccagggcgtgtgctcgaaacaaaccctcgttgtccctctgcactacaatgagagttacagtcagccagtatataaaccttatcttacattgtgtgccggtaggcgcatttgctctacataccgtaccatgtatcgcgtcatgtggagggaggtcagaagagaagtccagcagacgcatgctgtgtgctgtcaggggtggaagaagcggcatcccggtgcactgacttgtgaggcaatttgtgccaaaccttgcctgaacggcggggtgtgcgttagacccgatcagtgtgagtgcgccccagggtggggtggaaagcattgtcatgtggatgtcgatgaatgtcggacctccatcaccctgtgctctcatcattgttttaacacagcaggctctttcacctgcggctgtccccatgatctggttctgggcgtggatggacgcacctgcatggagggtagccccgagcctccgacctccgccagcatcctgtcagtcgccgttcgagaagccgaaaaggacgagcgggcactgaagcaagagatccacgaactcaggggcagactagaacgcctggagcagtgggcaggccaagccggcgcttgggtgagggctgtactgcctgtacctccagaagagctccagcccgaacaggtggctgaactgtgggggaggggggatagaatcgagtctctgtctgaccaggtgctgttattggaggagaggctgggggcatgtagttgtgaagataactctctgggtctaggcgttaaccatagatag

SEQ ID NO: 186383 - DNA, 882 bp, synthetic construct
  misc_feature 1..882: note = Description of Artificial Sequence: Synthetic coding sequence
  source 1..882: mol_type = other DNA
atgggcagccgggccgagctgtgcaccctgctgggcggcttcagctttttgctgcttctcatacccggggaaggggccaaaggcggctcactgagagaatctcagggagtatgcagcaagcagactctggtggtgccactccattacaatgaaagctattctcagcctgtttacaaaccctacttaaccctatgtgctggccggcggatttgctccacctaccgaaccatgtaccgggtgatgtggcgcgaggtccggagagaagtccagcaaacacacgctgtctgctgtcagggctggaagaaaaggcatcccggcgcattaacttgtgaagcaatatgcgccaagccatgtctcaatggtggagtgtgtgtgcgaccagaccagtgcgagtgtgcacccggctggggaggcaaacactgccacgtcgacgtggacgaatgcaggaccagtataaccctgtgctcacaccactgtttcaacacagccgggtcattcacatgcgggtgtcctcacgacttggtgctcggagtagacggcaggacttgcatggagggatcaccagaacctcctacgagcgctagtatcctgtcagtagctgtgagggaggctgagaaagacgagagagctctgaaacaggagatccacgaactgcggggacggttggagcgccttgagcagtgggcagggcaggccggcgcttgggtgagggcagttttaccggttcctccagaggagttgcagcccgaacaagtcgctgaactgtgggggcgcggggacaggatcgagagcctcagtgatcaagtgttgttgctcgaggaaagacttggtgcttgctcttgtgaggacaacagtctggggctgggggtgaatcaccgttag

SEQ ID NO: 186384 - DNA, 882 bp, synthetic construct
  misc_feature 1..882: note = Description of Artificial Sequence: Synthetic coding sequence
  source 1..882: mol_type = other DNA
atgggcagccgggccgagctgtgcaccctgctgggcggcttcagctttctattactcctaatcccaggcgaaggtgctaaaggcggctccctcagggaatcacagggcgtctgctcgaagcagaccttggtcgtcccgttgcactataatgaatcatactcccagccagtctataaaccctacctgactttatgcgccggcaggcgaatatgttcgacttacagaacaatgtatcgagtcatgtggagggaagtcaggcgagaggtgcagcagacacacgctgtttgctgtcaaggctggaagaagaggcatcccggggccctgacatgtgaagcaatatgcgccaagccctgtcttaatggtggcgtatgcgtgcgccccgaccagtgtgagtgcgctcccggatggggcggcaagcattgtcacgtggacgtggatgagtgccgaacatcaatcacactatgtagccaccactgttttaacactgcagggtccttcacatgcggatgtccacacgatttagtgcttggcgtcgatggccgcacttgtatggaaggcagccccgaaccccccacatcagcttctatcctcagtgtggctgtccgcgaggccgagaaggacgagagagccctgaagcaggaaatacacgaattgaggggacgccttgagcgcctggagcagtgggccggacaggcgggcgcgtgggtgagagctgttttaccggtcccccctgaggaactgcaacctgaacaagtcgccgagctctggggaagaggcgaccgtatcgaatcactgagcgaccaggtgctccttctagaggaacgcctcggcgcctgtagctgcgaagacaattccctaggtctcggggttaaccaccggtag

SEQ ID NO: 186385 - DNA, 777 bp, synthetic construct
  misc_feature 1..777: note = Description of Artificial Sequence: Synthetic coding sequence
  source 1..777: mol_type = other DNA
atgggcagccgggccgagctgtgcaccctgctgggcggcttcagcttcctactgctgctcataccaggggagggcgctaaaggaggttcactgcgggagtcacagggcgtttgctctaaacaaactctcgtcgtccccttgcattacaatgaatcctactctcagcccgtctataaaccctatctaaccctttgtgctgggcggcgcatttgctctacttatcgcaccatgtaccgtgtgatgtggagagaggtacgccgtgaagtgcagcagacccatgcggtgtgttgtcagggctggaaaaagcggcacccaggcgccctcacctgtgaagctatctgcgccaaaccctgtctcaatggcggtgtatgcgtacgacctgaccaatgtgagtgcgcccctgggtggggagggaagcactgtcatgtaggcagtttcacttgcggttgtcctcatgacctcgtgctgggtgtcgacgggcgaacttgcatggaggggtcccccgaaccccccacaagtgcctctattctgtctgtcgcagtgcgtgaagctgaaaaagatgaacgcgccctaaagcaagagattcacgagctgagaggaaggcttgagcggttggagcagtgggcagggcaggcaggggcttgggtccgagcagttctgcccgtcccgcccgaggagctgcagcctgagcaggttgccgagttgtggggccgaggggatcggatagagtctctcagcgaccaggtgctgctgctggaggagcgcctcggagcatag

SEQ ID NO: 186386 - DNA, 777 bp, synthetic construct
  misc_feature 1..777: note = Description of Artificial Sequence: Synthetic coding sequence
  source 1..777: mol_type = other DNA
atgggcagccgggccgagctgtgcaccctgctgggcggcttcagctttctgctactgttaatacccggcgaaggcgctaaaggcggatctctcagggagtcacagggagtgtgttccaagcaaacactcgttgtccccctgcattataacgaatcctactcccagccagtttacaagccatatctgacactttgcgcaggcagacgaatctgctcaacatataggaccatgtatagagtgatgtggcgagaggtgcgtcgggaagtacagcagacacatgctgtgtgttgtcaggggtggaaaaagaggcatccgggggcacttacatgtgaagcaatatgcgccaaaccttgccttaacggtggtgtttgtgtgagaccggaccagtgtgagtgtgctcctggctgggggggcaaacattgccacgtgggcagcttcacgtgcggctgcccacatgatctggtgctgggggtggacggtcgaacgtgtatggaagggtctccggaaccaccaacttccgcatcaatattgagcgtggccgtgagagaggcagaaaaggatgaacgcgcgcttaagcaggaaatacatgagctgcgcggacgcctagaacggctagaacagtgggccggacaggctggagcctgggtacgggctgttctgccagtgccccctgaagagttacagcccgagcaggtggccgagctgtggggcagaggtgaccgcattgagagcttgtctgatcaggttcttctcctagaggagcgcctgggtgcatag

SEQ ID NO: 186387 - DNA, 777 bp, synthetic construct
  misc_feature 1..777: note = Description of Artificial Sequence: Synthetic coding sequence
  source 1..777: mol_type = other DNA
atgggcagccgggccgagctgtgcaccctgctgggcggcttcagcttcctgctcctactgattcctggtgaaggggctaaagggggctcactgagggagtcccagggggtttgctctaaacaaacccttgtagtacccttgcattacaatgaaagttactcacaaccggtgtataagccctacctcaccctctgtgccgggagacggatatgcagcacatacagaaccatgtatagagtcatgtggcgcgaagtcaagcgtgaggttcaacagacccatgccgtctgttgtcagggttggaaaaagaggcatccaggcgcactcacatgtgaagctatctgcgccaaaccttgtctgaacggaggggtgtgtgtcaggcccgatcagtgcgagtgcgccccgggctggggcggtaaacactgccatgtcggcagcttcacatgcggctgcccccacgacctggtgttaggagtggatggacggacctgcatggagggatcaccagagcctccgacctcggcatcgattttgagcgtagcagtccgcgaggctgaaaaggacgagcgcgccctgaaacaggagattcatgagctacgtgggcggttggagcggttagaacagtgggctggccaggccggagcctgggtgcgcgcagttctgcccgtgccacctgaggagctccagcctgagcaagttgccgagttatgggggcgtggggaccgcattgagagcctcagcgatcaggtgttactgctggaagagcgtctgggcgcatag

SEQ ID NO: 186388 - DNA, 882 bp, synthetic construct
  misc_feature 1..882: note = Description of Artificial Sequence: Synthetic coding sequence
  source 1..882: mol_type = other DNA
atgggcagccgggccgagctgtgcaccctgctgggcggcttcagctttctactcttactgatacctggtgagggagccaaggggggatcactgcgtgagagccagggggtgtgtagcaaacagactctagttgttccactgcattataatgagtcctactctcaacccgtgtacaagccgtacctaactctgtgtgccggccggcgcatatgctctacataccgcaccatgtacagggttatgtggagagaagtccgaagggaggtccagcagactcacgccgtgtgctgtcaaggctggaagaagaggcatcccggcgcattgacatgcgaagcgatttgcgctaagccctgtctgaacggcggagtgtgcgtccgccctgaccaatgcgagtgcgctcccgggtggggcggtaagcactgccacgtcgatgtggatgaatgtaggacttcgattacactctgttcccaccactgctttaatacagccggcagcttcacatgcggatgtcctcacgacttggtcctgggcgtggacggacggacctgcatggagggctctccagagccgcccacatcagcctccatcctgtctgttgccgtgcgtgaggctgagaaagatgagagagccctgaagcaagaaatccacgagctgcgcgggcggctggagcggttggaacagtgggcgggccaggcaggtgcctgggtacgcgcggtgcttccagtgcctcccgaagaactgcagcccgaacaagtggccgaactctgggggagaggcgatcggatcgagagcctgtctgaccaggtacttctgctggaagaaaggcttggtgcctgtagctgcgaagataattcgctgggcctgggagtcaaccatcggtag

SEQ ID NO: 186389 - DNA, 882 bp, synthetic construct
  misc_feature 1..882: note = Description of Artificial Sequence: Synthetic coding sequence
  source 1..882: mol_type = other DNA
atgggcagccgggccgagctgtgcaccctgctgggcggcttcagctttcttcttctgctgatacctggcgaaggcgcaaaaggaggctccctgcgggaaagccagggggtatgcagcaaacagactctagtcgtccctctgcattacaatgagtcatactcacagccagtgtacaagccctacttaaccctatgtgccggccggcgaatatgtagcacctatagaactatgtatcgcgtgatgtggagagaagtccgtcgggaagttcagcagacacacgctgtatgctgccagggctggaaaaaaagacaccctggtgccctgacgtgcgaagccatatgcgcgaagccgtgccttaatggcggagtctgcgtccgccctgaccaatgtgagtgtgcaccgggctggggcggcaagcattgccacgtcgatgtcgatgagtgccgaactagtatcactctctgtagtcaccactgcttcaacaccgcaggctcttttacttgcggttgtccccacgatttggttctgggtgttgacggcagaacttgtatggaagggtctcccgagcccccgactagtgcctcaattctctccgtagccgtccgagaagctgagaaggatgaaagggcccttaagcaggagattcatgagctacgggggcgtctggagaggctggagcagtgggccggccaagcaggtgcatgggttagggccgtgttgcccgtccctcctgaggaactgcagcctgaacaggtagcagaattgtggggacgaggggatcgcattgaatcactgagcgatcaagtactgttgctggaagagcgacttggtgcatgttcctgcgaggataactccctcggtcttggcgtcaaccaccgctag

SEQ ID NO: 186390 - DNA, 882 bp, synthetic construct
  misc_feature 1..882: note = Description of Artificial Sequence: Synthetic coding sequence
  source 1..882: mol_type = other DNA
atgggcagccgggccgagctgtgcaccctgctgggcggcttcagctttctgctcctattgatcccgggcgagggcgccaaaggtggaagtctgcgcgaaagccagggcgtttgtagcaagcaaaccctggtggtgcccctccactacaacgagtcgtactcccagcccgtctacaagccttatctcactctttgcgctgggcgacggatatgttcaacttacaggacgatgtatcgggtaatgtggagagaagtccggagagaggtccaacagacacatgcagtatgttgccaggggtggaaaaaacggcatcccggagccctgacatgtgaagctatctgtgctaagccctgtttaaacggtggagtttgtgtgcggcccgaccagtgtgaatgcgcacccggctggggagggaagcactgccacgtcgatgtggatgaatgcaggacctctattactctctgctctcaccattgctttaacacagctggatccttcacctgtggctgcccacacgacttagttctgggcgtggacggtaggacctgtatggaagggtctcctgagcctccaacaagcgcctcaattcttagcgtggcagttcgggaggctgagaaagacgaaagagccctgaagcaagaaatccacgaactgcgcggacggttggaaagactagagcagtgggctggtcaggccggagcttgggtgagagccgtcctaccagtgcctcccgaggagctacagccagagcaggtggccgagctgtggggtcgtggcgatcgcattgaaagcctgtcagatcaagtcctattgctcgaggagcgtctgggtgcctgcagctgtgaagacaactccctgggtctgggcgtgaaccatagatag

SEQ ID NO: 186391 - DNA, 882 bp, synthetic construct
  misc_feature 1..882: note = Description of Artificial Sequence: Synthetic coding sequence
  source 1..882: mol_type = other DNA
atgggcagccgggccgagctgtgcaccctgctgggcggcttcagctttctgttactcctaatccccggtgagggcgctaaggggggcagcttacgcgagtctcaaggcgtctgctccaagcagaccttggtggtgccactccattacaacgagtcttatagtcagcccgtctataaaccttatttgaccctgtgcgcggggcgcagaatatgcagtacctacagaaccatgtaccgagtcatgtggcgggaggtgaagcgcgaggtgcagcaaacccacgccgtgtgttgccagggatggaagaagcggcatcccggagccctcacctgtgaagctatatgcgccaaaccttgcttaaatggcggagtttgcgtcaggcccgatcagtgcgagtgcgcacccggctggggcggcaaacattgccacgtggacgtggatgaatgtcgcactagcattacactatgttcccaccattgctttaacactgctggtagctttacctgtggatgtccacatgatcttgtcctcggtgtggacggccgcacctgtatggaaggcagcccagagccaccaacatcagcttccatcctgagcgtggctgtgcgtgaggcagagaaggatgagcgggccttgaagcaggagatccacgaactgaggggtcgactggagcgcctggagcagtgggccggtcaggctggcgcctgggtaagagccgtgttgccagtgccaccggaagagttgcagccagagcaggtggcggaactgtggggtagaggcgacaggattgagagtctgagtgatcaagtgctcttactcgaggagcggctgggcgcctgctcatgtgaggataattcacttggcctgggtgtgaaccaccgatag

SEQ ID NO: 186392 - DNA, 882 bp, synthetic construct
  misc_feature 1..882: note = Description of Artificial Sequence: Synthetic coding sequence
  source 1..882: mol_type = other DNA
atgggcagccgggccgagctgtgcaccctgctgggcggcttcagcttcctgctcctgctgatcccaggcgaaggagctaaaggagggagcttgcgtgagagccaaggggtgtgctccaagcagaccctggtagtgccgctccattacaacgagtcttactcacaaccggtttataaaccctacctgacactctgcgcaggaagacgaatctgtagcacttatagaacaatgtatagggtgatgtggcgtgaggtcagaagagaggtgcagcagacacatgcagtgtgttgccaaggatggaaaaagagacatcccggcgccttaacctgtgaagctatctgtgcgaagccatgtctgaacggtggggtgtgcgtgaggcccgaccagtgcgagtgtgcacccggatggggggggaaacactgccacgttgatgtggacgaatgtcggacctcaattaccctgtgttcacatcactgctttaacactgccggttctttcacctgcggctgccctcacgacctggttttgggtgtggacggaaggacttgcatggagggcagtccagagcctcctacaagcgccagcattctctccgtggcagtccgcgaagccgaaaaggacgagcgcgcactgaaacaagaaatccacgaattgagaggccgcctggaaagactggagcagtgggccggccaggccggagcgtgggttagagcagttctacccgttccccccgaggagttgcagcccgagcaggtggctgagttgtggggccgaggcgaccggattgagtctttatcagatcaggtgctgcttttagaggagagattgggcgcatgctcctgcgaggacaactctctgggcctcggtgtgaatcataggtag

SEQ ID NO: 186393 - DNA, 882 bp, synthetic construct
  misc_feature 1..882: note = Description of Artificial Sequence: Synthetic coding sequence
  source 1..882: mol_type = other DNA
atgggcagccgggccgagctgtgcaccctgctgggcggcttcagctttctccttctgctgattcccggcgagggagccaagggcgggtcactgagggaaagccagggagtgtgttcgaagcaaactctggtggtgccactccattacaatgagtcgtatagccagcctgtctataagccctatttgacactgtgcgccggccgcagaatttgttcaacatataggactatgtaccgtgttatgtggcgtgaggtacggagagaagttcagcagacgcacgcggtgtgctgtcaagggtggaagaaacggcacccgggggcactcacatgtgaggctatctgcgctaagccctgcctcaatggtggagtgtgcgtgaggcccgatcagtgtgagtgcgcaccaggttggggtgggaaacactgccatgttgacgtggacgagtgccgtacatcaataacgttgtgcagtcaccactgctttaacactgccggcagttttacctgcggatgcccacatgatctggtcttgggcgttgatggcagaacttgcatggagggaagcccagagcctcccacaagtgcaagtattttgtcagtcgcagtaagagaagcagaaaaggacgagcgggcactcaagcaggaaatccacgagcttagggggaggttagagaggctggaacaatgggctgggcaggcaggggcctgggtgcgggcggtactgcccgtcccacccgaggaactgcagccagaacaagtcgccgaactgtggggtcgcggggatcgaatagagagtctctccgaccaggtgttgctcctcgaagaaagactgggagcctgctcctgcgaggacaatagcctggggctcggcgtgaaccatcgatag

SEQ ID NO: 186394 - DNA, 882 bp, synthetic construct
  misc_feature 1..882: note = Description of Artificial Sequence: Synthetic coding sequence
  source 1..882: mol_type = other DNA
atgggcagccgggccgagctgtgcaccctgctgggcggcttcagcttcttgttacttctgatccccggagagggcgcaaagggaggttctctgcgcgagtcccagggggtgtgctctaaacagacgttggtggtgcctctacactacaacgaatcttacagtcagcctgtgtataaaccgtacctgacgctctgcgcaggcagaagaatttgtagtacgtaccgcaccatgtatcgcgtgatgtggagagaagtcaggagagaggtccagcagacacacgctgtctgttgccaaggatggaaaaaacggcacccaggtgcactgacctgcgaggccatttgtgctaagccatgtctaaacggcggggtctgcgtgagacccgaccagtgcgaatgtgccccagggtggggaggcaaacactgtcacgtcgacgtcgacgagtgccgaaccagtatcacgttgtgctctcaccactgcttcaacaccgccgggagcttcacttgtggttgtcctcacgatcttgttcttggcgtggatggtaggacgtgcatggagggttctcccgaaccaccaacgtcagcatcaatactgtccgtagcagtacgcgaggcagaaaaggacgaacgcgctctgaaacaggaaattcacgaactccgggggcggcttgaacgattggagcagtgggccgggcaagccggcgcctgggtgcgagccgtgcttccagttccaccagaagagctccaacccgaacaagtcgcagaactctgggggagaggtgacagaatagaatcattgtccgaccaagtgctgttgttggaggaacggctcggtgcatgttcatgtgaggataactccctgggcctgggggttaaccatcggtag

SEQ ID NO: 186395 - DNA, 777 bp, synthetic construct
  misc_feature 1..777: note = Description of Artificial Sequence: Synthetic coding sequence
  source 1..777: mol_type = other DNA
atgggcagccgggccgagctgtgcaccctgctgggcggcttcagcttccttttgctgttaatccccggtgagggggcgaagggaggctctctcagggaatcccagggtgtgtgcagcaaacagacactagtagtgcctctgcactataatgagagctacagccaaccagtctataagccttacctgacattgtgtgctggacgcagaatttgttcaacctaccgaactatgtacagggtcatgtggagagaagttcgtagggaagtacagcagacacatgctgtgtgttgccaggggtggaaaaagagacaccctggggcgctgacctgcgaagccatttgtgccaagccttgcctcaacggaggcgtatgcgtgcgcccggatcagtgcgagtgcgcccccgggtggggaggtaaacactgccacgtgggatccttcacatgcggctgcccacatgatctggttctgggcgtcgacggacggacttgtatggagggcagtcctgagccccccacttcagcgagcatcttgagtgtggccgtgcgggaagcagagaaggatgagcgggctctgaagcaggagatccacgaactgaggggccgactggagaggctcgagcagtgggccggccaggcgggcgcttgggtgcgcgcggtgttgccagttccaccggaagaattgcagcccgaacaggtggccgagctgtggggccgcggtgatcgaatcgaaagcttgagcgaccaggtgctcctcttggaggaacgcctgggagcttag

SEQ ID NO: 186396 - DNA, 882 bp, synthetic construct
  misc_feature 1..882: note = Description of Artificial Sequence: Synthetic coding sequence
  source 1..882: mol_type = other DNA
atgggcagccgggccgagctgtgcaccctgctgggcggcttcagcttccttctcttgctcattccaggagagggcgcaaaaggcggaagcctgcgagaatcccagggggtgtgcagcaagcagaccctggtggtccctttgcactacaatgagagctactcacagcccgtctataaaccgtacttgactctatgcgctggccggcgtatttgtagcacatacaggacaatgtatcgcgtgatgtggagggaggtgagaagagaggtgcagcagactcatgccgtgtgctgtcaggggtggaagaagagacaccccggcgccttaacttgcgaagcaatctgcgctaagccatgtctgaacggtggcgtgtgcgtaaggcccgatcagtgcgagtgtgcacctggatgggggggcaaacactgtcatgtcgacgttgacgagtgccgcacctccatcacactctgcagccatcactgctttaacacagctggttcatttacctgtgggtgtcctcacgatttagtcctaggagtggacggcaggacctgcatggaagggagccccgagcctccaacatccgccagtattctgagcgtggcggtgcgcgaagccgagaaagacgaacgcgcactcaagcaggagatccatgagctccggggcaggctggagcggctcgaacaatgggccggtcaggcaggagcttgggtaagagcggtgctgcccgtcccaccggaggaattgcaacccgaacaggtggccgagttgtgggggcgcggggaccggattgagagcttgagcgatcaggtgctcctgctagaggagcgcctgggagcttgtagctgcgaggacaacagtcttggactcggggttaaccaccggtag

SEQ ID NO: 186397 - DNA, 1281 bp, synthetic construct
  misc_feature 1..1281: note = Description of Artificial Sequence: Synthetic coding sequence
  source 1..1281: mol_type = other DNA
atggccaacgacagcggcggccccggcggccccagccccagcgagcgcgaccgtcagtactgtgaactgtgtggaaagatggagaatctgctgcgctgctctcggtgtcggagcagcttctattgctgcaaagaacaccagaggcaggattggaaaaaacacaagctggtgtgccaaggttctgaaggagccctgggccacggcgtcggccctcaccagcacagcggacctgctccccctgctgccgtgccccctccacgggctggcgcacgcgaaccccgcaaagcagcggccagacgtgacaatgcatctggagacgctgccaaagggaaggtgaaggcaaaaccccctgccgatcccgccgcagccgcctccccttgtcgggctgctgcgggtggtcagggttccgccgtggccgccgaagctgagccggggaaggaagagccacctgcccggtcatcgcttttccaagaaaaagctaacctgtacccaccttccaatactccaggcgatgcgctgtctcccggcggcgggctgaggcctaacggtcagactaaaccattacctgcactgaagctggcactagagtacattgttccctgtatgaacaagcatggtatttgtgtggtggacgatttcctcggcaaagaaactggtcagcagatcggcgatgaggtgcgcgcgctgcatgacacaggaaagttcaccgatgggcaacttgtgtcccagaaaagcgattcctccaaagatattaggggggataagattacatggatcgagggcaaggagccagggtgtgagactatcggtctgctgatgagtagcatggatgatctgatacgtcactgtaacggtaaactggggtcttacaaaatcaatggcagaacaaaagccatggtcgcatgttatccgggaaatggcaccgggtacgtgcggcatgtagataatcccaacggtgacggtcgatgtgtcacctgcatatactacctgaataaggattgggatgccaaagtgagcggtggcattctgaggatctttcccgagggaaaggctcaattcgctgatattgagccaaagtttgatagattgctgttcttttggtccgatcgacgaaaccctcacgaggtacagcctgcgtacgctacaagatatgcaattacagtttggtacttcgacgctgacgaaagagcccgagccaaagtaaagtacctgacaggagagaaaggagtgagggtggaattaaacaagcccagcgatagcgtcggtaaggacgtgttttag

SEQ ID NO: 186398 - DNA, 216 bp, synthetic construct
  misc_feature 1..216: note = Description of Artificial Sequence: Synthetic coding sequence
  source 1..216: mol_type = other DNA
atgaacaagcacggcatctgcgtggtggacgacttcctgggcaaggagacaggccaacagataggagacgaggtgcgtgcgctccatgacacaggtaagtttactgacggatcttggagcgcccgcagagttacacggccccggacaagtgaggcaattcgcagtccaggaagccgcgccaggtcacccgctgctaagccccttgggtgctcttag

SEQ ID NO: 186399 - DNA, 1224 bp, synthetic construct
  misc_feature 1..1224: note = Description of Artificial Sequence: Synthetic coding sequence
  source 1..1224: mol_type = other DNA
atggacagcccctgccagccccagcccctgagccaggccctgccccagttgcctgggtcctcatctgaacccttagaacccgagcccgggcgggcacggatgggcgttgaaagctatcttccttgtccactgctgccttcataccactgccctggagtaccgagtgaggcttctgcaggcagcggtacaccacgcgcaactgccacttcaacaactgcctcccccctcagggacggatttggcggccaggacggcggagaactgcgccctcttcagagtgagggcgccgcggcactcgtgacaaagggatgtcagcgcctcgctgcccagggagctcgccccgaagctccaaaaaggaaatgggctgaagacggaggcgacgccccctctccatcaaagcgcccctgggccaggcaagaaaaccaggaggctgagagggaaggcgggatgagctgctcctgctcctcagggtctggggaggcaagcgcggggttgatggaggaggctcttccctcagcaccagaacgactagcactggactacatcgtgccttgtatgcgctactatgggatctgtgtgaaggattctttcctgggggccgcacttggaggcagagtgctcgctgaggtggaagccctcaaacgcggcggaaggcttagagacggccagctcgtctcccagagggcaatccccccacggagcattcgcggggaccaaatcgcatgggtcgaagggcatgaaccgggctgtcgcagtattggagctctcatggctcacgttgacgccgtgattagacactgtgccggaaggttaggcagttacgtgatcaacgggcggactaaagccatggttgcctgttaccctgggaatgggctgggctatgtcagacacgttgacaatccgcacggagatggccggtgcatcacctgcatttactatttgaatcagaactgggacgtcaaagtgcatggaggcctgctacagatctttcccgaaggaagacccgtggttgctaacatcgaacccctgtttgaccggcttctcatcttttggtcagatcgaagaaacccacacgaggttaaacctgcctacgctacacggtatgccatcaccgtgtggtacttcgatgccaaggaaagggccgccgccaaggacaaatatcagcttgccagtggacagaaaggcgtccaggtgcctgtatcgcagccacctacacctacttag

SEQ ID NO: 186400 - DNA, 1224 bp, synthetic construct
  misc_feature 1..1224: note = Description of Artificial Sequence: Synthetic coding sequence
  source 1..1224: mol_type = other DNA
atggacagcccctgccagccccagcccctgagccaggccctgccccaacttcccgggtcctcaagcgaaccattagaacccgaacccggtagagcacgtatgggcgtggagtcatacttgccttgtcctttgctcccaagttatcactgcccaggggtaccttctgaggcatccgctggaagcgggaccccccgagccaccgctacaagtaccactgctagtccgttaagagatggtttcggcggacaggacggcggcgagctccgaccgctccagtcggaaggggccgctgcacttgtcacaaagggttgtcagcgcttggcagcccagggagccaggccagaagctccaaaacggaaatgggctgaggacgggggcgatgcgccctccccctctaagagaccatgggcccggcaagaaaaccaggaagcggagagggaggggggcatgtcttgtagctgtagcagcggatctggcgaggctagtgcaggtctcatggaagaagccctgccttcagctcctgagaggcttgctctggactacatagtcccttgtatgcgttactacgggatctgcgtgaaggactcgttcctgggcgcagctctgggaggtcgcgtcctcgcagaggtcgaggctctgaaacgcggaggaaggctccgtgacgggcagctggtgtcacaacgggcaattcctcctcgttctatcagaggagatcagatcgcctgggtggagggacatgagccgggatgtcgaagcattggggcccttatggcccacgtggacgctgtgatcaggcattgtgcaggacggcttggcagttacgtgattaacggtcgtaccaaggccatggtggcatgctacccagggaatgggctggggtatgtcagacacgtggacaaccctcacggagatgggagatgtatcacttgcatctactacttaaatcaaaattgggacgtcaaggtgcacggcggtctgctacaaatattccccgaaggtagacctgtggtggctaatatcgagccgctcttcgaccgtctcctgatcttttggtcggatcggcgcaatccacacgaggttaaacctgcctacgctacgaggtatgctattaccgtgtggtacttcgacgcaaaagagagagccgccgccaaagataagtatcagctggcatccggccagaagggggtgcaggtgcctgtgagtcaaccgcccacccccacttag

SEQ ID NO: 186401 - DNA, 720 bp, synthetic construct
  misc_feature 1..720: note = Description of Artificial Sequence: Synthetic coding sequence
  source 1..720: mol_type = other DNA
atgcccctgggccacatcatgcggctggacctggagaagatcgccctcgagtacatcgttccgtgcctgcacgaagtgggattctgctacctggacaacttcctgggcgaagtggtcggggactgcgtacttgaacgcgtaaagcagctacactgtaccggtgccttgagggatgggcagctagctggcccaagggccggagtgagcaaaagacatctccgaggcgaccagataacctggatcggcggaaacgaagaagggtgcgaagcgatatcatttctgctctctcttatcgataggctggtgctttactgcggttctcggctcgggaagtactacgtcaaggagaggtcaaaggcaatggttgcctgttaccctggcaatgggacgggctatgtgcgtcacgtagataatccgaacggcgacggaaggtgtatcacctgtatatactatcttaacaaaaattgggatgccaagctccatggcggaattttacggatcttccctgagggcaagtccttcattgccgacgttgagcctatattcgatcggcttctgtttttctggtctgatagaaggaatccgcatgaagtccaaccgagctacgcaacccgctacgcaatgacagtttggtacttcgacgccgaagagcgagctgaagcaaaaaaaaaatttcgaaacttgaccagaaaaaccgagtccgccttgactgaggattag

SEQ ID NO: 186402 - DNA, 720 bp, synthetic construct
  misc_feature 1..720: note = Description of Artificial Sequence: Synthetic coding sequence
  source 1..720: mol_type = other DNA
atgcccctgggccacatcatgcggctggacctggagaagatcgccctcgagtacatcgtgccctgcctacacgaggtgggattttgttacctggacaacttcctgggcgaagttgtcggcgattgtgtgttggagcgcgtgaaacagcttcactgtacaggcgcattaagagacgggcagctggctggacctcgggcaggggtatccaagcgccatctgcgcggcgaccagattacctggatcgggggaaacgaggagggatgcgaggccatctcctttttactgtcactaattgacagactcgtcctttactgcgggtcccgcctaggtaagtactatgtgaaagaacgctccaaagccatggttgcctgctatcctggcaacggcacggggtacgttagacacgtggataaccccaatggggacggccgctgtatcacttgcatttattacttgaacaagaattgggacgccaagctacacggtggtatcctccggatctttcccgaaggaaagagcttcatcgcagacgtggaacccatctttgataggcttctgttcttctggtccgaccggcggaacccgcatgaagtgcagccaagctatgctaccaggtatgctatgaccgtgtggtatttcgatgctgaggagcgcgccgaagctaagaaaaagttccgcaacctgactaggaaaactgagagcgccttgacagaggactag

SEQ ID NO: 186403 - DNA, 1605 bp, synthetic construct
  misc_feature 1..1605: note = Description of Artificial Sequence: Synthetic coding sequence
  source 1..1605: mol_type = other DNA
atgttcagctgggtgagcaaggacgcccggcggaagaaggagcccgaactcttccagactgtggccgaaggattgaggcaactatatgcccagaagctcctgcccctggaggaacattaccgtttccatgaattccacagtcctgccctggaagatgccgattttgacaacaaacccatggtactgttagtcgggcagtactcgacaggaaaaaccacctttatcaggcacctcattgagcaggactttcccggcatgagaattggaccagaacccacaaccgatagttttatcgccgttatgcacggtccaaccgagggcgtggttcctggcaatgcgttagtcgtagacccccgccggcccttcagaaagctcaacgcattcggaaatgcttttttgaaccgatttatgtgcgcccagcttcctaatcccgttctggatagcatcagtataattgatactcccggaattctcagtggagaaaagcagcggatttcccggggttatgattttgcagccgtcctcgagtggttcgctgagagagtagaccgcattattcttctgtttgacgcccacaaactggacattagcgacgaatttagcgaggtgatcaaggcgcttaaaaaccacgaggacaagatccgggtggtcctcaataaagctgaccaaatcgagacgcagcaactcatgagagtgtatggggcactcatgtggtctctcggtaagattatcaacactccagaggtagtgagggtctacataggttctttttggtctcatcctttgcttatccctgataaccgaaaactcttcgaggcggaagagcaagatttgttcaaggacatccagtccctgccgaggaacgcagccttacggaagctcaatgacctgataaagcgcgcccgactggcaaaggtccacgcatacataattagctctctgaagaaagaaatgccaaacgtctttgggaaggagagcaaaaaaaaagagctcgtgaataaccttggcgaaatttatcagaaaatcgaacgggaacatcagatctccccgggggatttcccgtctctccggaagatgcaggagctgctgcagacccaggacttctccaagtttcaagccctaaagccaaagttactcgacactgtggacgatatgctcgccaacgacattgctagattaatggttatggtcagacaagaggagagtctgatgcctagccaagtggtgaaggggggcgcatttgatgggacaatgaacgggccattcggacatgggtacggggagggagctggcgagggaatcgacgacgtggagtgggtggtgggcaaggataagcctacatatgatgagatcttttatactttgtctcccgtgaacgggaaaatcaccggagccaacgccaaaaaagaaatggttaagagcaagcttccaaataccgtgctgggcaaaatttggaaattagctgatgtggataaagacggcctcctagacgatgaggagttcgcgctggctaatcatctgattaaagtgaagctcgaaggacatgagttgcctgcagacctgcccccgcacctggttcccccgtcgaagcgtagacatgaatag

SEQ ID NO: 186404 - DNA, 1605 bp, synthetic construct
  misc_feature 1..1605: note = Description of Artificial Sequence: Synthetic coding sequence
  source 1..1605: mol_type = other DNA
atgttcagctgggtgagcaaggacgcccggcggaagaaggagcccgaactgtttcagacagtggccgaagggctgagacaattgtatgctcagaaattgctgccgctcgaagagcactataggtttcacgaattccattcacctgccctcgaggacgcagatttcgacaataaaccaatggttctcctagtgggccagtattccacaggcaaaacaaccttcataaggcatctgattgagcaggatttccctggcatgcgcattggccccgagcccaccaccgatagtttcattgctgtcatgcatggccccactgagggcgtggtccctggaaatgcactggtcgtggacccacgcaggccattcagaaaattgaatgcctttggaaacgctttcctgaaccggtttatgtgcgcacagctccccaatcccgtcttggactctatcagcatcatcgacacacccggtattttgagtggggagaagcagcgcatttccagaggatatgattttgccgcagtcctggaatggttcgccgagagagttgatcgaataatcctcctgtttgacgcccacaaattggacatttccgatgaattttccgaggtgattaaagcactgaagaatcacgaggacaagatccgcgtagttctgaacaaggctgaccagatagagacccaacagctgatgagggtgtacggggccctgatgtggtctctgggcaaaatcattaacaccccggaggtggtacgcgtttacatagggtcattctggtctcacccactattgatccccgacaaccggaagctgtttgaagcagaggagcaggatttgtttaaagacatccagagtctccccagaaacgccgctctcaggaaactcaatgacctgattaaaagggctaggctggcgaaggttcacgcctacatcatttcttccttaaagaaagaaatgcctaacgtcttcggtaaggagagcaagaagaaagagctagtcaataatctcggtgaaatttatcaaaaaatcgagagggagcatcagatctccccgggcgatttccctagcctgcgtaaaatgcaggagctcctccagacccaggacttcagcaaatttcaggctcttaaacccaaactgcttgacaccgtggatgatatgttggccaatgacattgcccgcctcatggtgatggtcaggcaggaggagtccctcatgccatctcaggtcgtgaaaggcggcgcattcgatgggactatgaatggccctttcggtcacggctatggagaaggcgccggcgaaggaatcgatgatgtcgaatgggtggttggtaaagacaagccaacctatgatgaaatcttctacacactcagccccgtgaatggcaagattacaggggcaaatgctaagaaagagatggtgaagtcaaaacttccaaataccgtactgggcaagatctggaaactggcagacgtagataaagacgggttgctcgacgacgaggagttcgccctcgcgaaccacttaattaaggtcaagctcgagggccatgaactgccggccgaccttccccctcacctggtgccccccagcaagcgccgacacgagtag

SEQ ID NO: 186405 - DNA, 438 bp, synthetic construct
  misc_feature 1..438: note = Description of Artificial Sequence: Synthetic coding sequence
  source 1..438: mol_type = other DNA
atgttcagctgggtgagcaaggacgcccggcggaagaaggagcccgaactcttccagacggtcgccgagggcctccgccaactgtatgcacaaaaactcctgccactagaggagcactacaggttccacgagttccactcaccagccttagaggatgcagacttcgataataaacctatggtcctgctcgtggggcaatatagtacaggcaagactacattcatcaggcacctgattgagcaggatttcccgggcatgcgcatcggtccagaacccactacggactcctttatcgctgtgatgcatggacctacggagggagttgtccccggtaatgctctagttgtggatcctcggcgcccattccgcaaattgaacgccttcggtaacgctttcctgaatcggttcatgtgtgcccagctcccaaaccccgtttag

SEQ ID NO: 186406 - DNA, 1296 bp, synthetic construct
  misc_feature 1..1296: note = Description of Artificial Sequence: Synthetic coding sequence
  source 1..1296: mol_type = other DNA
atggagcagcccggcaccgccgccagccccgtgagcggcagcatgttttcttgggtctctaaagatgccaggcgcaagaaagagccagagctgttccagaccgtagcagaggggctgaggcagttatacgcacagaagttgttgcctctggaggaacattatagattccatgagttccactcgcccgctctcgaagatgccgattttgataataagcctatggttctgctggtcggccagtattccacaggaaaaacaacttttattcggcacctgatagagcaggattttcctggcatgcgtatcggtcccgagcccaccacggactctttcatcgcagtcatgcatggccctacggagggagtggtcccaggaaacgcactcgtggtggatccaaggaggcccttccgaaagctgaacgctttcggcaatgcgtttctgaataggtttatgtgcgctcagctacctaaccctgtgttggattccattagcatcattgacacccccggaattctgtctggggagaaacagcgcattagccgagggtatgacttcgccgcagtgctggagtggttcgccgagcgagtcgatcgcataatcctgctgtttgatgctcataaactggatatttccgacgagttttcggaggtaattaaagccctaaagaaccatgaggataagatccgcgttgtattgaataaggccgaccagattgagacccaacaactaatgagagtgtacggcgctttaatgtggagcctgggcaagatcataaataccccagaggtcgttcgggtttacattgggtctttttggtcacatcctctcttgattccagacaataggaagctgttcgaggctgaggagcaagatcttttcaaagacatccagagcctaccacggaacgccgctctgcggaagctgaacgacctgatcaaacgggcacgcttggcaaaggtgcacgcttatatcatttcatctctcaagaaagagatgccaaatgtgtttggaaaagagtccaaaaagaaagagttggtgaacaatttaggagagatttaccagaagattgaacgagaacatcagatttcaccaggcgatttccccagtctgcgcaagatgcaggagctcctgcaaacccaggatttctcaaagttccaggccctgaagcccaaactgctggacgatgaggaatttgcgcttgccaaccatttaattaaggtgaagctagaagggcacgaactgcccgctgatctgcccccgcacctggtcccaccctctaaaaggcgccacgaatag

SEQ ID NO: 186407 - DNA, 447 bp, synthetic construct
  misc_feature 1..447: note = Description of Artificial Sequence: Synthetic coding sequence
  source 1..447: mol_type = other DNA
atgttcagctgggtgagcaaggacgcccggcggaagaaggagcccgaactgtttcagacagttgccgaggggctgcgccagctgtatgcccaaaagctgctccctttggaggagcattaccggttccatgagttccatagtccagccctagaagatgctgattttgataataagcccatggttctgctggtggggcagtacagcaccgggaagaccacgttcatcagacatttgatcgagcaggattttcccggtatgagaattggtcccgagcctactaccgattcttttatagccgtgatgcatggtcccactgaaggtgtggtacccgggaacgcgctcgtggtggacccgagaaggccgtttcgaaagctgaatgcgtttgggaacgcattcctgaatagattcatgtgtgctcagctgcctaatcctgtacttgattcttag

SEQ ID NO: 186408 - DNA, 1533 bp, synthetic construct
  misc_feature 1..1533: note = Description of Artificial Sequence: Synthetic coding sequence
  source 1..1533: mol_type = other DNA
atgttcagctgggtgagcaaggacgcccggcggaagaaggagcactaccgcttccatgagtttcactctccagctctcgaagacgccgatttcgacaacaaacccatggtgctcttggttggccaatacagtactggtaagaccacctttattaggcatttgatcgagcaggacttccccggtatgcgaattggccccgagcccaccactgacagctttatcgcggtgatgcatggtcccaccgagggcgtagttcctgggaatgccctggtcgtggacccccgccgaccctttaggaagctcaacgccttcggcaacgcctttctcaacaggttcatgtgcgcccagcttccaaaccccgtgttggattctatctctatcatcgatacaccaggcatcctgtcaggcgaaaaacagcgtatatcgcgagggtacgatttcgctgcagtgctggagtggtttgccgaaagagtggaccgcattatactcctcttcgatgctcataagttagatataagtgacgaattttctgaagttatcaaggctctcaaaaatcacgaggataagattcgggttgtgctaaacaaagcggatcagattgagactcaacagcttatgcgtgtctacggcgccctgatgtggagtcttggaaagatcattaatacccccgaggtggtccgcgtctacattggcagcttttggtcccacccgctgttgattcctgataatagaaagttgttcgaggcagaagaacaggacctcttcaaggacatccagagtctccctcgtaatgccgccctgaggaaactgaacgacctgattaaacgtgccagactcgcgaaagttcacgcatacattatctcctcacttaagaaggaaatgcctaacgtctttggaaaagaatccaagaagaaggagttggtgaataatctcggtgagatctatcagaaaatcgagcgcgaacaccagatttctcctggggatttcccttctctcagaaagatgcaggaactgttgcagacccaggatttctccaagtttcaggctctcaaacccaaactgctcgacaccgtggacgacatgctggcaaatgacattgcacgactgatggtgatggttaggcaggaggagtccctgatgccctcgcaagtagtgaagggcggagctttcgacggcaccatgaatgggccctttggccacggttatggagagggcgcaggagagggaatagacgatgttgaatgggtcgtgggcaaggacaagccaacctatgacgaaattttctacaccctgtcccctgtgaacggtaagattaccggggcaaacgcgaagaaagagatggtgaagtctaaactccctaacacagtcctcgggaagatttggaagcttgcggacgttgacaaagacggactgctggacgacgaagagtttgctcttgctaatcacttgataaaagtcaaactggaaggccatgaactgccagctgatctgccaccacatctggtgcccccctctaagaggcgccacgagtag

SEQ ID NO: 186409 - DNA, 1632 bp, synthetic construct
  misc_feature 1..1632: note = Description of Artificial Sequence: Synthetic coding sequence
  source 1..1632: mol_type = other DNA
atgttcagctggctgaagcggggcggcgcccggggccagcagcccgaagcaattcggaccgtaaccagtgccctgaaggaactgtatagaactaagctgttgcctttagaggaacattaccgctttggcgcgttccatagtcccgcactggaagatgctgactttgatggcaagcccatggtacttgtcgcagggcagtattccacaggaaagaccagctttatccaatacctcctggagcaggaagtccctgggagtagggtaggccccgagcccacaacagattgcttcgtcgcagtgatgcatggagacacggagggcacggtgcccggtaacgcattggttgtggacccagacaagccttttcgcaaactgaacccattcgggaacacctttctgaaccgctttatgtgcgcccagctgccaaatcaggtgctggaatccatctcaatcatcgatacaccaggaatcctgtcaggcgcaaaacaaagggtatcgagaggatatgacttccccgctgttcttcgctggtttgctgaacgcgttgacctgataatcttgctttttgacgcccacaagttggagattagcgatgagtttagtgaagctattggggcactccgaggacacgaggataagatccgcgttgttttgaataaggctgacatggtcgaaactcagcagctcatgcgagtgtatggggcactgatgtgggctcttggcaaagtggtgggaactcccgaggtacttagagtctacatcgggtctttttggtcacagccactactcgtgcccgacaatcgacgactttttgagctggaagagcaggacctgtttagagatatacagggcctgccacggcacgccgcgcttcggaagctgaacgatctggtcaagagagcgagactcgtccgggtccatgcttacataatcagttacctgaaaaaagagatgcccagcgtatttggcaaggaaaataaaaaaaagcagctgatactcaaactccctgtcatctttgccaaaatccagctcgaacatcatattagccctggggacttccccgactgccagaaaatgcaggaactgttgatggcccacgactttaccaagtttcactccctgaagcctaagttacttgaggcattggatgagatgctgacacacgatattgccaaactcatgccccttctgagacaggaggaattggagtccactgaagtcggagttcagggcggcgcttttgaaggcacccacatgggcccttttgtggaacgggggcccgacgaggccatggaagacggcgaggagggctccgatgacgaggctgagtgggttgtcacaaaagacaaatcaaagtatgatgagatcttttataaccttgcacccgccgatgggaagctcagcggatctaaagcgaaaacctggatggttggcactaaactgcccaactctgttctgggacggatatggaagttaagcgacgtcgatagggacggaatgctagacgatgaggagttcgcattggcttcccatctcatagaagctaagctggaaggtcacggcctacccgctaacttaccaagacggttagtacccccttctaaacggcggcataagggaagtgcagagtag

SEQ ID NO: 186410 - DNA, 516 bp, synthetic construct
  misc_feature 1..516: note = Description of Artificial Sequence: Synthetic coding sequence
  source 1..516: mol_type = other DNA
atgcccagcgtgttcggcaaggagaacaagaagaagcagctgatcctgaagctcccggtgatcttcgctaagatccagctggagcaccacatcagccctggagatttccccgattgccagaaaatgcaggagctgcttatggcgcatgatttcacgaagtttcactctcttaagccaaagctcctcgaagcgttggatgaaatgttgacccatgacattgcgaaactgatgcctctgctgagacaggaggaactggagtcaaccgaagtaggagtgcagggaggggcctttgagggcacacatatgggcccgtttgtcgagcgtggaccagacgaggcgatggaagaccaagggcaggttcaaattcggcgcgatctgcttcagcccggggcttgtcgcaggcaggcggagagacttcagggacaggacttggatggcggcgatcaggcccctcagctgtccgccggcgcacacctggaagcgcagaggtgtggcccacgaaggcacgccggatag

SEQ ID NO: 186411 - DNA, 1224 bp, synthetic construct
  misc_feature 1..1224: note = Description of Artificial Sequence: Synthetic coding sequence
  source 1..1224: mol_type = other DNA
atgtgcgcccagctgcccaaccaggtgctggagagcatcagcatcatcgacactccaggaatcttgtccggggccaaacagcgcgtgtcaagaggctatgactttccagcggttctgagatggtttgccgagagggtcgatcttattattctcttattcgacgctcataaactcgaaatcagtgacgaatttagcgaggccattggcgcactgcggggtcatgaggacaagattagggtggtgctcaacaaagcggatatggtggagacacagcagctgatgcgagtgtatggcgctctgatgtgggccctggggaaagtggttgggacacccgaggttcttcgggtgtatataggatcgttctggagccagccactgctggttcctgataaccggagattgttcgagttggaggagcaggacctcttcagagacatacagggattgcctcgtcacgctgcccttcgtaaactgaatgacttagtcaaaagggccaggctagtgagagtccatgcttatataattagctacttgaagaaagagatgccatccgtctttggcaaagaaaacaagaaaaagcagctgattttaaagctgcctgtcatatttgcaaaaatccagctggagcatcacatctcgcccggcgattttccggactgccagaagatgcaggaactactaatggcgcacgatttcacaaaatttcacagcctgaagccaaagcttctggaggccctcgacgagatgttgacacacgacatcgcaaagcttatgccactgctgagacaggaagagctcgagtccacagaggtgggagtgcaagggggagcgtttgagggcacccacatgggcccattcgtggaacgcggccccgacgaagcaatggaggatggggaggagggaagcgacgacgaggctgaatgggttgtcaccaaggacaaatcaaaatacgacgagatcttttataacctggcacctgctgacggaaaattgagcggctccaaggccaagacatggatggtcgggactaagttgcccaattccgtactgggacggatctggaagctctctgacgttgacagagatggtatgctggacgatgaggaatttgccttggccagtcatttgatcgaggccaagctggagggccatggactgcccgcaaacctccctcgacgcctggtccctccatccaagagaaggcataagggctcggccgaatag

SEQ ID NO: 186412 - DNA, 1242 bp, synthetic construct
  misc_feature 1..1242: note = Description of Artificial Sequence: Synthetic coding sequence
  source 1..1242: mol_type = other DNA
atgttcagctggctgaagcggggcggcgcccggggccagcagcccgaagctattagaacagtcacctctgcattgaaggaactgtacaggacgaaactgctacctctggaggagcattaccggttcggggctttccactctcctgcattagaagacgcagattttgatggcaagcctatggtgctagtggctggccagtactcaacaggaaaaacatccttcatccaatacctgttggagcaggaagttcccggcagccgggtcggtccagaaccaacaacggattgcttcgtggccgtgatgcacggtgacaccgaaggcactgttcctggcaacgccctagttgtcgaccccgataaaccatttagaaagctgaaccccttcggcaataccttcctgaacagattcatgtgcgcccaattgccaaatcaggtcctcgagtcaatttcaataatcgatactcccggcattcttagtggggctaaacagcgtgtgtcaagagggtacgatttcccagccgtcttacggtggtttgctgaacgggtggatctcattattctcttgttcgatgcgcataagctggaaatcagcgacgagttctcagaggctatcggggcattgcgcggtcatgaagataagattcgcgtcgtcttaaacaaggccgatatggtggagactcagcaacttatgagagtctacggtgctctgatgtgggcccttggaaaggtagtagggacacccgaggtcctgcgggtgtatatcggcagcttttggagccagccattactggtgccggacaatcggcggctctttgagttggaagagcaagacctattccgagatattcaaggactgcctcgacatgcagccttacgtaagctgaatgacttggtcaaacgggcaagactggtgcgggtgcacgcatacatcatttcctacctgaagaaagaaatgccttccgtcttcggcaaggaaaacaaaaagaagcagctcattttgaagctcccggtcatcttcgcaaagatacaactcgaacatcatataagtcctggcgattttccagactgtcagaaaatgcaggaacttcttatggcccacgacttcacaaagttccactcccttaagcctaaactgcttgaagctctggacgaaatgctgacccacgatattgccaagttgatgccattgcttcgccaggaggaactggagagcagtccggtagccgaaatgacaagtcgctag

SEQ ID NO: 186413 - DNA, 1602 bp, synthetic construct
  misc_feature 1..1602: note = Description of Artificial Sequence: Synthetic coding sequence
  source 1..1602: mol_type = other DNA
atgttcagctggctgaagcggggcggcgcccggggccagcagcccgaggccattaggacggtgacgtctgccctgaaggagttgtatagaaccaagttacttcctctggaggagcactatcgctttggtgcttttcattctccagcactggaggacgccgattttgatggcaaaccgatggtgctcgtggcgggacagtattctacaggtaagacctctttcattcaatatcttttggagcaggaggtgcctggatcgcgcgtcgcggttatgcacggagacaccgaagggacagtgcccggcaacgcacttgttgtcgatccggacaaacctttcagaaagctgaatccctttggtaatacttttctgaataggttcatgtgtgcccaactgcccaaccaggtgttagagtcaatcagcataatcgacacccccggcatactgtccggcgcaaagcagcgggtgtctagggggtacgatttcccagcagttctgagatggttcgcggagcgagtcgacctcattattcttctgttcgacgcgcacaagctcgagatttctgacgaatttagcgaggcgatcggggcacttcgcggccacgaggataaaatcagagttgttctgaacaaagccgatatggtggaaacacagcagctcatgagagtgtatggcgccttgatgtgggcactgggaaaggtcgtgggcacccctgaagtgctcagggtgtacattggcagcttctggtctcaaccattgctggtccccgacaatcgtaggctgttcgaactggaggagcaggatctgttccgggatatccagggactccctcggcacgcggcgctgagaaagctaaatgatcttgtgaagagggctcggttggtcagggtccacgcttatattatcagctaccttaaaaaagagatgccgagtgttttcggcaaggaaaacaagaagaagcagctcatcctgaagctgccggtgatctttgccaagatccagcttgaacaccacatctcgccaggcgattttcccgattgccaaaaaatgcaggaactattaatggcccacgactttactaagttccactccctcaaacctaaattactggaggccctggacgagatgctgactcatgacatcgcaaagctgatgcctctactacgccaggaggagctggaatctaccgaggtgggcgtgcaaggcggcgctttcgaaggaacccacatggggccttttgtcgaacgaggcccagatgaagccatggaagacggggaagagggcagcgacgacgaagcagagtgggtggtgacaaaggacaagagtaagtacgatgagattttttataacttagcgcccgccgacgggaagctgtcggggagcaaggccaaaacctggatggtcggcacgaaactgcccaactccgtgctgggacgcatctggaaactaagtgacgtagacagggacggcatgctggatgacgaggaatttgctctagcgtcacacctgatcgaagccaagctcgaagggcacggccttcccgccaatttgccccgtagactcgtgccaccatcaaagcgaagacacaaggggtctgccgagtag

SEQ ID NO: 186414 - DNA, 681 bp, synthetic construct
  misc_feature 1..681: note = Description of Artificial Sequence: Synthetic coding sequence
  source 1..681: mol_type = other DNA
atgcccagcgtgttcggcaaggagaacaagaagaagcagctgatcttgaagctccctgtgatttttgcgaagatccagcttgagcatcatatctctccaggcgacttccctgattgccagaaaatgcaggaactgctgatggcccatgacttcactaagtttcactcactcaagcctaagctgttagaggcccttgacgagatgttgacccacgatatagcaaagctcatgccattgttaagacaggaggaattggaatcgacagaggtaggggtgcagggcggtgccttcgagggtactcatatgggaccttttgtggaacgcggcccggatgaggccatggaggatggtgaggaaggtagcgacgacgaagccgagtgggtcgtgaccaaagataagtctaagtacgatgagatcttctacaacttagccccagcagatggaaagctgagcggcagcaaggccaaaacatggatggtgggaactaaattgcctaactccgtcctcggccgaatatggaagctgtctgacgtcgacagggacggaatgctggatgatgaggaatttgcgctggcctcccatctcatcgaggccaagctggagggccatggcctaccggccaacctgccgcggcgcctagttccaccatccaaacgcaggcacaaaggctccgcagagtag

SEQ ID NO: 186415 - DNA, 1608 bp, synthetic construct
  misc_feature 1..1608: note = Description of Artificial Sequence: Synthetic coding sequence
  source 1..1608: mol_type = other DNA
atgttcagctggctgggcaccgacgaccggcggcggaaggaccccgaagttttccagacggtgtcagagggcttgaagaaactctacaagtcgaagttgctgcccctggaggagcactacaggtttcatgagttccatagccctgccttagaagacgcagacttcgataataagccaatggtattgttagtcggccagtacagtaccgggaaaactactttcatccggtatttgttagaacaggattttcccggcatgcgaattggacctgaaccaacaacggacagtttcatcgctgtaatgcagggagatatggaggggattattccaggcaacgctctggtggtggacccaaagaaaccttttcggaagttgaacgcctttgggaatgctttcctcaatcgatttgtatgcgcacagctccctaaccctgtgctcgagagcatctcagtgattgacaccccaggtattcttagtggcgagaagcagcggatttctcgcggttacgatttcgcagccgtgctggagtggtttgctgagcgcgttgaccgcatcattctactcttcgacgcccataaactggatattagtgatgagtttagcgaggtcattaaagcacttaagaatcacgaggacaagatgcgcgtggttttgaataaggcagaccaaattgagacccagcaactgatgagagtttacggagctttaatgtggagcctgggaaaaatcgtgaacacacctgaggttatccgggtctatatcggatccttttggagccatccactgttgatccccgacaaccgaaagctgtttgaggctgaagagcaagatctctttcgggacatccagagtctgcccagaaacgcagcactgaggaagcttaatgacctgataaaaagggctaggctggccaaggtgcatgcatatattatcagctccctaaaaaaagaaatgccttccgtattcggtaaagacaacaagaaaaaagaactggttaacaatctcgcagagatctacgggaggatagagagagagcaccaaatatcccctggtgattttcccaacttgaagagaatgcaggatcaacttcaggcccaggatttttcaaagttccagcctcttaagagtaagctgttggaggtcgttgacgatatgcttgctcatgacatcgctcaattaatggtccttgtgagacaagaggaatcccagagaccaatacagatggtgaaaggaggagcgttcgaggggactctgcacggaccttttggacacggatatggcgaaggagctggagagggcatagatgatgcagagtgggtggtggcccgcgataaaccgatgtacgatgagatcttttacaccttgtcccccgtagatggcaagatcaccggggcaaacgctaagaaggagatggttaggtccaaactgccgaattctgtgctgggaaagatctggaagttggctgacattgataaagatggcatgttagatgacgacgaatttgcattagccaatcatctgattaaggtgaaactggagggacacgaactaccaaacgagctgcccgcgcatctgctccccccctcgaagaggaaggttgctgaatag

SEQ ID NO: 186416 - DNA, 528 bp, synthetic construct
  misc_feature 1..528: note = Description of Artificial Sequence: Synthetic coding sequence
  source 1..528: mol_type = other DNA
atgttcagctggctgggcaccgacgaccggcggcggaaggaccccgaggtgtttcagaccgtgtctgagggcctgaaaaagctgtacaagagcaaacttcttccccttgaagaacactatcggttccacgaatttcattctcctgccctggaggacgcagacttcgataacaagcccatggtgttgctggtagggcaatacagcacaggtaagaccactttcattcggtacttgctggaacaggacttcccaggcatgcgcatcggccccgagcccactaccgattccttcatcgctgttatgcagggggacatggagggtataattccaggcaacgcactagtggtagaccctaaaaagccatttagaaagcttaatgcttttgggaatgcgttcttgaatcgctttgtgtgcgcccagttaccaaatccagtgttggaatctattagcgttattgacacacctggaattctgtccggggagaagcagaggatttcccggggcccggcagccggaccaggtttatag

SEQ ID NO: 186417 - DNA, 4086 bp, synthetic construct
  misc_feature 1..4086: note = Description of Artificial Sequence: Synthetic coding sequence
  source 1..4086: mol_type = other DNA
atgggcgccgccggccggcaggacttcctgttcaaggccatgctgacgatttcctggcttacactgacctgtttccccggagctacaagcacggtggctgccgggtgccctgaccagtcacctgagcttcagccttggaatccagggcacgatcaggaccatcatgtgcacatcgggcaggggaaaactctcctcctgacttcaagtgcaactgtatattcgattcacataagcgagggagggaaactggttattaaggatcacgacgaacccattgttctgcgtacacgccatatcctaatcgataacgggggtgagctccacgcagggagcgccctgtgcccatttcaggggaacttcactatcattctctatggtagggcggacgaaggcattcagccggatccgtactatggtctcaagtacatcggtgtgggcaaagggggtgctctggagttgcacggtcagaagaagctgagctggacatttctgaacaagaccctgcatccaggtgggatggcagagggaggctattttttcgagcgctcatggggtcacaggggggtgatcgtacacgtaattgaccctaagtccgggacggtgatccactccgatcgctttgacacttatagaagcaagaaggaaagtgagaggttggttcagtatctgaacgccgtccctgatggccggattctgagtgtcgccgtcaacgacgagggttcccgcaatttggacgacatggcccgtaaggcaatgacaaaactgggtagcaaacacttcttacacctgggctttagacacccatggtctttccttaccgtgaaagggaacccttcttcttctgttgaagaccatatcgagtatcacggacaccgaggcagtgccgcggcccgggtttttaagctatttcagaccgaacacggagagtattttaacgtcagtctgtcgtcagagtgggtgcaggatgtggaatggacagaatggtttgaccatgacaaggtctcccagacaaagggtggcgaaaagattagcgacttgtggaaggctcatcccggaaagatatgcaaccggccaatagatatccaggccaccacgatggacggggtcaacctaagcaccgaggtagtgtataagaaaggccaggactaccggtttgcttgttacgatagggggagagcttgtcggtcctaccgagttcgattcctctgcggtaaaccagtgcgcccgaaacttaccgtgaccattgacactaacgtaaattcaaccatcttgaatctcgaggataacgtgcagtcttggaaaccaggagacaccctcgtgatcgcctcaactgactatagcatgtaccaagcggaagagtttcaggtgctgccgtgcaggtcctgcgctcccaatcaggtcaaggttgcagggaagcccatgtatctgcacattggagaggaaatcgatggtgttgacatgcgggctgaagtgggcctgctgagccgcaatattattgtgatgggagagatggaggacaaatgctacccataccggaatcacatttgtaacttcttcgacttcgatacgttcggcggccacattaagttcgcactgggcttcaaggctgcacaccttgaaggcactgagttgaagcatatggggcagcaactcgtggggcaataccctatacactttcatttggcaggcgacgtggacgagagaggaggctacgatccgccaacatatattagggacctatcgatacatcacaccttttctaggtgcgttacggtgcacggtagcaatggccttcttattaaggatgtggtgggctacaacagtctcggccactgcttctttaccgaggatggtcctgaagagcgaaatacgttcgatcactgtttgggcttgctggtcaagtcgggtaccctcctgcccagcgacagagattccaagatgtgcaaaatgattactgaggattcctatcccggctacatccccaaaccaagacaggattgtaatgccgtttccaccttttggatggcaaatcccaacaataatttgattaattgcgccgcagctgggagcgaggagactgggttctggtttatctttcatcacgtgccgactgggccgagtgtggggatgtactctccgggatattccgagcacattccgctgggcaaattttataataatagagcccattctaactatcgggccgggatgattatagataacggtgtcaaaaccactgaggcatccgccaaagacaagaggcccttccttagcatcatctctgcgcggtactccccacatcaagacgccgatccactgaagcccagggagcccgcaatcatacggcactttatcgcatacaagaaccaggaccacggtgcgtggctcagagggggcgacgtgtggctcgattcgtgccgtttcgccgataacgggattggattgacactggcatcagggggtacttttccctatgacgatggatcaaaacaggaaatcaaaaattcactgtttgttggagagtccggtaatgtaggtacagaaatgatggacaatcgaatctgggggcccgggggcctagatcactcaggcaggacactgcctattggccagaactttcccatacgtggaatccaactgtatgatggcccaatcaacattcagaactgcacttttcggaagtttgtggccttggaaggccgacacacctctgccctggccttcaggctgaacaatgcatggcaatcatgtcctcacaataatgtgacaggcatcgcatttgaagatgtgcccatcacctctcgagtatttttcggcgagcccggtccctggttcaaccagttggatatggatggggataagacctccgtcttccatgatgttgacggaagtgtcagcgagtacccgggtagttacttgactaaaaacgacaattggcttgtgcggcatccagactgcatcaacgttccagattggcgcggtgcgatctgtagtggttgctatgcccagatgtacatccaggcatacaagacaagtaacctccgtatgaaaataatcaagaatgacttcccatcccaccccctgtacctggaaggggccctaacccgcagcacccactatcagcagtaccagcctgtcgtgactctccagaagggctatactattcattgggatcagaccgcacctgcagaacttgccatctggctcatcaactttaataagggggattggatccgcgttggactgtgttaccctaggggaaccaccttttccattttgagtgacgtgcacaaccgcctgctcaaacagacctccaagacaggggtgttcgttcgcaccctgcagatggataaagtggagcagtcctatcccggccgaagtcactactattgggatgaagatagtggtttgctctttctcaagctgaaggcccagaacgaacgggaaaagtttgccttttgtagtatgaagggctgcgagcgcattaagataaaagctttgataccgaaaaacgccggggtgtcagattgtacagctacagcttaccccaaatttacagagcgagccgtagtagacgtccccatgcccaaaaaactgttcgggagtcagcttaagacgaaagatcacttcctcgaagtgaagatggagtcatccaaacaacatttttttcacctctggaacgatttcgcttacatcgaggtcgatgggaagaagtatccaagttctgaagacggcattcaagttgtggtgatcgatggaaaccaggggcgggtggtgagccatacctcgtttcgaaattcaattctgcagggcatcccttggcagctgtttaactacgttgcaacgatcccagataacagcatcgtgcttatggctagcaagggccgctacgtctcccgcggtccatggacgcgagttctggaaaaactcggcgcagatcgggggctgaagttgaaagagcagatggctttcgtgggctttaaaggctcttttcggcccatttgggtgaccctcgacactgaagatcacaaggctaagatctttcaggtggtgccaatcccagtcgtgaagaagaaaaaactctag

SEQ ID NO: 186418 - DNA, 1092 bp, synthetic construct
  misc_feature 1..1092: note = Description of Artificial Sequence: Synthetic coding sequence
  source 1..1092: mol_type = other DNA
atgagcatggacgtgaccttcctgggcaccggcgccgcctacccctcgcccaccaggggggcaagcgccgtcgtactccgctgtgaaggggaatgttggctattcgattgcggcgaagggacacagacacaactgatgaagagtcagctgaaggccggacgcatcacgaaaatcttcatcacacacttgcatggcgaccacttctttggcctgcctgggctgctctgtactatttcgctgcagtctgggtccatggtctccaagcagcctatagaaatatatgggcccgtaggtcttcgggattttatctggcggacaatggaactgagtcacaccgagttagtctttcactacgttgtccacgagctagtgcccacagctgatcagtgccctgcagaagaactgaaagagttcgctcacgtcaacagggccgacagccccccgaaggaagagcaaggacgcacaatcttactggattctgaggaaaattcgtacttgctgttcgacgacgaacagttcgttgtaaaggccttcagactgtttcatagaatcccgagtttcggctttagcgtagttgagaagaaaagaccagggaagttaaatgctcaaaaactgaaggaccttggagtcccccccggccccgcctacggcaaactaaagaatggcattagcgtggtgctggagaacggcgtcactattagcccacaagacgtgctcaagaagcctatcgtgggtaggaagatttgcatcctgggcgattgtagtggtgtggtaggcgacggaggggtcaagctttgttttgaggcagacctgctcattcacgaggctacactagatgacgcccagatggacaaagccaaagaacacgggcatagcactccacaaatggctgccaccttcgctaaactctgccgggcaaaaaggctggtcctaacacatttttcgcaacgttataaacccgtcgcactagcgcgggagggggagaccgacgggatcgccgagctcaagaagcaggctgagtccgtcctggatctgcaggaggtgacacttgctgaagattttatggtcattagcatccctattaagaaatag

SEQ ID NO: 186419 - DNA, 2481 bp, synthetic construct
  misc_feature 1..2481: note = Description of Artificial Sequence: Synthetic coding sequence
  source 1..2481: mol_type = other DNA
atgtgggccctgtgcagcctgctgcggagcgccgccggccggaccatgtcccagggtcggaccataagccaggcacccgcacggcgagaacgaccccggaaggatcccctccgccatctccgcactcgcgagaaacgcggtccttccgggtgcagcgggggacctaatacggtgtacctccaggtcgtggctgccggaagcagagacagcggggccgctctgtacgtattcagtgaattcaatcgatacctcttcaattgtggcgagggcgtacagcgcctgatgcaggaacataagttgaaagtggcccgactggacaacatcttcctcacaaggatgcattggagtaacgtgggaggcctgtccggcatgatcctcacgttaaaagaaacaggcctccctaaatgcgtcctgagtggtcccccccagctcgagaagtaccttgaagccatcaagattttttcgggccctctgaaaggcattgagttggctgtgaggccccacagcgcaccggagtacgaggatgagacgatgacagtctatcagattccgattcactcagaacagcggcgtggcaaacaccagccatggcagagccccgagaggccactgtcacgcctcagccctgagcgaagctctgacagcgaaagtaatgaaaacgaaccccatctacctcatggtgtgtctcagaggcgcggcgtccgcgacagcagcctggtggtagcttttatctgcaaactacacctcaagagaggaaattttctggtgctcaaggctaaagagatgggtcttccagtaggcacagccgctatcgctcccatcattgcagccgtgaaagacgggaaatccataactcatgaaggcagggaaatcttggccgaagagctgtgcacgccgcccgaccccggggccgcttttgtggtagtggaatgccccgatgagtcgtttatacaaccgatatgcgagaacgcaactttccagcggtatcagggtaaagccgacgctccagtcgcactggtggtacatatggctcctgctagcgtgctcgtcgactcaagataccagcagtggatggaacgatttggccccgacacgcaacacttggtccttaacgaaaattgcgcttccgttcataatttacgttctcacaagatccagacacagctcaatctgatccatccagatatctttccactgctgacttcattccgatgcaagaaggagggccccaccctgtcagtacccatggtgcagggtgagtgcctgttgaagtaccagctccgccctaggagagagtggcaaagggatgcaataatcacatgcaaccccgaggagttcatagtcgaagccctccaattgccaaatttccagcagtcagtgcaagaatacaggcgctccgcccaggacggccccgctcccgccgagaaaagatcccagtatcccgagattatttttcttgggaccggaagcgctattccaatgaaaatccgtaatgtcagcgccacactcgtcaacattagcccggacacatccctcctgctggactgcggcgaggggacttttggccagctctgcagacactatggcgatcaggttgacagagttctgggcaccctggcagcagtgtttgtgagccatctgcatgccgatcaccatactggcttgccctcgatcttattgcaaagagaaagggctcttgcctcgttaggtaagcccctgcatcctctactggtggtggctcccaatcagctgaaagcctggcttcagcagtaccataaccagtgccaagaagtattgcaccacatatcgatgatccctgcgaagtgcctgcaggagggtgcggaaatctcctctccagccgtagagaggctgatctcctctctgctccgaacttgcgacttggaagagttccagacgtgtttagttcggcattgcaagcacgcatttggatgcgcattagttcacaccagcggctggaaagtagtgtactcaggcgataccatgccttgcgaggcactggtgcgcatgggcaaggacgctactctcttaatacatgaggccactctggaggacggacttgaggaagaagccgtcgagaaaacccactcgactaccagccaagccatctcagtcggcatgaggatgaacgcagagtttataatgcttaaccacttttcccagcgatatgctaaagtgcctctgtttagtccaaacttctctgagaaagtgggggtcgcttttgatcacatgaaagtgtgcttcggagatttcccgaccatgcctaagctcatcccgcccctgaaggcactcttcgcaggggacatagaggagatggaggaacgccgtgaaaagcgggagctgaggcaagtgagagctgccttgttgtccagagaattagccggtggcctggaggatggtgaaccccagcagaagcgcgctcacacggaggagcctcaggcgaagaaggtgcgggcacagtag

SEQ ID NO: 186420 - DNA, 2424 bp, synthetic construct
  misc_feature 1..2424: note = Description of Artificial Sequence: Synthetic coding sequence
  source 1..2424: mol_type = other DNA
atgtgggccctgtgcagcctgctgcggagcgccgccggccggaccatgagccagggacggacaatctcacaggctcccgccaggcgcgaacgaccgcgcaaggatcccctacgccatttaagaaccagagagaagcgcggccccagcggctgctctggcggacctaacacagtgtatctgcaagtggtggcggccggcagtagagactcaggagtccagagattgatgcaagagcacaaacttaaagtagcaagactagacaatattttcctcactagaatgcattggtctaacgtggggggtctcagcggcatgatcctgactctcaaggaaactggcctccccaagtgcgtcctgtccggccccccgcagctagaaaaatatctggaagcaataaagatcttcagcggaccacttaaaggcatcgagcttgccgtgcgccctcacagcgcaccagagtacgaagacgagaccatgacggtatatcagatacccatccattccgagcaacggagaggcaagcatcaaccctggcagagtccagaacgccctctctccagactgagccctgagaggagttccgactctgagagcaatgaaaatgaaccccacctgccccacggcgtgtcgcagcggcggggagtaagagattcctctctcgtcgtggccttcatatgtaagcttcacctaaagaggggcaatttcttggtgctcaaggcgaaggagatgggtctgccagtgggtaccgctgcgatcgctccaatcatagccgctgtgaaggacgggaaaagcatcacccacgagggcagggagatcctggctgaggagctttgcactcctccagatcccggagctgcctttgtcgtcgtcgagtgtcctgatgagtcttttatccagccaatttgcgaaaacgccacattccagcgctaccaggggaaggccgatgcaccagtggccttggtcgtgcatatggctcccgcttccgtcctcgtcgacagcaggtaccagcagtggatggagcgatttggacctgacacacagcatttagtgctgaatgagaattgcgcctcggttcacaatttgcggagtcataagattcaaacccaactgaatctcatccacccagatattttcccactgctgactagtttccgatgtaaaaaagaaggcccaacgctgtccgtgccaatggtgcagggggaatgtctactcaaatatcagttgagaccccgccgcgagtggcagagagatgctatcatcacttgcaacccagaggagtttatcgtcgaagccctccaactccctaattttcaacagtccgtacaggaatacagacggtctgctcaggacgggcccgctcccgcagaaaagcggagtcagtacccagaaataatttttctgggaactggctctgcaattccaatgaaaatccgtaatgtgagcgctactttggtgaacatttctccagatacctcactgttgctggattgtggtgaggggacctttgggcagctttgtaggcattacggcgatcaggtggaccgggtgttggggacgctggctgcagtgttcgttagccatcttcacgcagaccatcatactgggctgcccagcatcctgttacagagggaacgggctttggccagcttaggaaaacccctgcacccactcctggtggtcgcccctaatcagttaaaggcttggctgcaacagtatcacaaccagtgccaggaggtactgcatcatattagcatgatcccggccaagtgcctgcaagaaggggcggagatctcttctcccgcagtcgaacgacttatcagcagtctactacgaacatgcgatcttgaagagtttcagacgtgccttgttcgacattgtaaacacgcctttggctgtgcattagtgcacacctccggttggaaggttgtttatagcggcgatacaatgccctgcgaggctctcgtgcggatgggaaaagatgcaaccttgttaatacatgaagcgaccctggaggacggactcgaagaggaggcagtggaaaagacccactctactaccagccaggctattagcgttggaatgcgaatgaatgcagagtttatcatgcttaaccatttctctcagcgctacgccaaggtgccactgttcagccctaatttctccgaaaaagttggagtggcctttgatcacatgaaagtgtgcttcggcgactttcctacgatgcccaagctcattcctcctctgaaggccctgttcgccggcgacatcgaggagatggaagaacgacgcgagaaacgagagctgcgccaggttagagccgctctgcttagcagggagctagccggtgggttggaagatggcgagccccaacagaaaagagctcacactgaggagcctcaagcaaaaaaagtgcgagctcagtag

SEQ ID NO: 186421 - DNA, 2361 bp, synthetic construct
  misc_feature 1..2361: note = Description of Artificial Sequence: Synthetic coding sequence
  source 1..2361: mol_type = other DNA
atgtgggccctgtgcagcctgctgcggagcgccgccggccggaccatgagtcagggtagaacgataagccaagctccagcgaggcgcgagaggcctcgcaaggatcctttgagacatctgcggactcgcgagaagcgtggcccgtctggttgttcaggtggccctaacactgtttacctccaagttgttgctgcaggctctagggatagcggagctgctttatatgtgttcagcgaattcaacaggtatctttttaattgcggcgagggcgtgcagaggctcatgcaagaacataaattaaaagtggccagactggataatattttcctgacccgcatgcattggagcaatgtgggtggcctgagcgggatgattctgaccttgaaggaaaccgggttgcccaagtgcgtgctgtcagggcctccccagctcgaaaagtatctggaggctattaaaatcttctctggtcccttgaaaggcatcgagctagccgttcgtccccattcagccccagagtatgaagacgagacaatgacagtgtaccagataccaatccactccgtcagtcagagaaggggcgtaagggatagcagtctggtggtggcttttatatgcaaactgcatctgaaacgcggcaacttccttgtgcttaaggcgaaggagatggggcttcccgtcgggacagccgccattgcgcccataatcgccgcagtcaaggacggcaagtctatcacccatgaaggcagagaaatactagcggaggagctgtgcacacccccagaccccggagctgcattcgtcgtggtggagtgccctgacgaatccttcatacagccaatctgtgagaatgccacatttcagcgctatcagggaaaagcagacgcccccgttgcgctcgtcgttcatatggcccccgcttctgtcctggtggattctcggtaccagcaatggatggaacgattcggacccgacacgcagcatctggtacttaacgagaactgcgctagtgtgcataacctccggagccataaaatacagacccagttaaatctgattcacccggacatcttccccctgttgaccagctttcggtgcaaaaaagaggggccaacactgagcgtcccaatggtgcagggcgagtgtctcctcaagtaccaactccggcctaggcgcgagtggcagagggacgcaattattacctgtaacccagaagaattcatcgtagaagctttgcagctgccaaactttcagcagagcgtacaggagtaccgccgctcggctcaagacggaccagcccctgccgaaaaacggtctcagtaccccgaaattatatttctgggtactggctccgccatacccatgaaaattcggaacgttagcgctaccctcgtgaacatcagcccagacacttctttgctgttggactgtggggaagggacgttcggccaactatgcagacactatggggaccaggtcgacagagttctgggcacacttgccgccgttttcgtttcccatctgcacgcagatcaccacacgggacttcccagtatcctgttgcagagagaacgggcactggctagcctggggaaaccattgcatccccttctagtggtggcacctaatcagttaaaggcctggctgcaacagtatcacaatcagtgtcaagaagtgctgcaccatatctccatgatcccagcaaaatgtttgcaggagggagccgagatcagttcgccagccgtcgaacgcctaatttcttctctgctccggacatgtgatctggaggagtttcagacctgcctggttcgccattgcaagcacgccttcgggtgcgccttggtccacacaagtgggtggaaggtggtgtactccggcgatacaatgccctgtgaagccctagtccggatgggtaaagatgctacactactgatccatgaggctacgttggaagacggtttggaagaggaggccgttgagaaaactcatagcaccacatcgcaagctatatccgtgggaatgcgcatgaatgccgagttcattatgctgaaccacttctcccagcgctacgcaaaagtacccctgttctcccctaatttctcagagaaggtcggggttgctttcgaccacatgaaggtctgctttggggacttccctaccatgcccaaactcataccacctctgaaggccctttttgccggcgacatagaagaaatggaagagcgacgcgaaaagcgcgagctcaggcaggtgcgcgccgcattgttgagtagagaacttgcaggaggattagaagacggagagccccaacagaagcgagcccacactgaggaaccgcaagctaaaaaggtcagggcacagtag

SEQ ID NO: 186422 - DNA, 861 bp, synthetic construct
  misc_feature 1..861: note = Description of Artificial Sequence: Synthetic coding sequence
  source 1..861: mol_type = other DNA
tgaccccacggcgtgagccagcggcggggcgtgcgggacagcagcttggtggtggcattcatttgtaaactccacctgaagcgcggtaatttcctcgtgctgaaagcaaaggaaatgggcctgcccgtcggaactgccgccatagccccaatcatcgccgccgtcaaagatgggaaatcaatcactcacgaaggccgcgaggtgctgcaaattctcgccgaggaattgtgcacccctcctgaccctggggctgcatttgttgtcgtcgagtgtccggatgaaagctttatacaacccatctgtgagaacgccaccttccagcggtaccaaggcaaagccgatgctcccgtcgctctcgtcgtccatatggcccctgcatccgtgctcgtggactccagataccaacagtggatggaaagatttggaccggacacccagcacctggtgcttaatgagaattgcgcctcagttcacaacttgcgcagtcacaaaatacagacacagttgaacctgatacatccagacatatttcctttgctaacctccttccgctgcaagaaggagggccccaccttgtccgtgcctatggtgcaaggggagtgtctgctgaaatatcaactgcggcccagacgggagtggcagagagatgccattatcacttgtaaccccgaggagttcattgtggaggcactccaactccctaacttccaacaaagcgtccaggagtacaggcggagtgctcaggacggccccgcgccagccgaaaagcgatcacagtacccagaaatcatcttcctcggcacaggctctgcgatccccatgaaaatccggaatgtgtcagcgaccctcgtaaacatatag

SEQ ID NO: 186423 - DNA, 837 bp, synthetic construct
  misc_feature 1..837: note = Description of Artificial Sequence: Synthetic coding sequence
  source 1..837: mol_type = other DNA
atcctggccgaggagctgtgcaccccccccgaccccggcgccgccttcgtggtagtggaatgccctgatgaatcattcattcagcctatttgtgagaacgccacatttcaacgctttggtccagacacgcagcacctggttctcaatgaaaattgcgcatccgtccataacctccgctcccacaaaatccagactcagctcaacctaattcatccagatatcttccccctattgacaagctttcggtgtaaaaaagaggggcccaccctctcagtccccatggtacagggagagtgtttgcttaagtatcagttgagaccaaggagagaatggcagcgcgatgcaattataacgtgtaatcctgaagagtttatcgtggaggcgctccagctgcccaacttccagcagtctgttcaagagtatcgcagaagcgctcaggatggcccagcccccgcggaaaagcggtcccaataccccgagattatctttctgggaacaggaagtgccatccccatgaagattagaaacgttagcgccactctcgtcaacattagccctgatacctcactgttgctggactgcggggagggaactttcgggcagttgtgccggcattacggcgatcaggttgatcgcgtgttggggacgctcgcggccgtgttcgtcagtcacctgcacgccgaccaccacactggactcccatcaattctgctccagcgtgagcgcgccctggccagtctgggcaagcctctgcatcccctacttgttgtggcccccaatcagcttaaagcatggttgcagcagtatcacaaccaatgtcaagaggtgctgcattag

SEQ ID NO: 186424 - DNA, 804 bp, synthetic construct
  misc_feature 1..804: note = Description of Artificial Sequence: Synthetic coding sequence
  source 1..804: mol_type = other DNA
atgaccctgggccggcggctggcctgcctgttcctggcctgcgtgctccccgccctgctgctcggcgggactgcattggcgtcggaaattgtgggtggacggagagcacggccccacgcctggccatttatggtctcgctccagctaagaggcgggcacttctgcggcgcaactttgattgccccaaatttcgttatgtctgccgcacactgtgtggcaaatgtgaacgtccgcgcagtgagggttgtcctgggggcccacaatttgtctagacgcgaacccacaaggcaggtcttcgccgtgcaaaggattttcgaaaatgggtacgaccctgtaaatcttcttaacgacattgtcattttgcagctgaacggctcagccaccattaatgcgaatgtccaggtcgcgcaactgcccgctcaggggaggcgtttaggaaatggggtgcagtgcctcgccatgggttggggcctgctggggaggaataggggtatcgcctctgttttgcaggagctgaatgttaccgtggtgactagtctctgcagaaggagtaatgtgtgtaccctggttcgcggacgacaagccggcgtgtgttttggtgacagcgggtctccacttgtttgcaatggtctcatccacggcatcgcctctttcgtacgaggcgggtgcgcaagcgggctttatcccgacgccttcgctccggtggcccagttcgttaattggatagacagtatcattcagcgtagtgaagataacccatgtccccacccacgagatcccgaccccgcctcacggacacactag

SEQ ID NO: 186425 - DNA, 804 bp, synthetic construct
  misc_feature 1..804: note = Description of Artificial Sequence: Synthetic coding sequence
  source 1..804: mol_type = other DNA
atgaccctgggccggcggctggcctgcctgttcctggcctgcgtgctgcctgcactgctgttgggaggaactgcgctagcctctgagatcgttggggggcgacgcgccagaccacacgcatggccattcatggtgtctctgcagctgcgggggggacatttttgcggtgccaccctgatagcgcctaactttgtgatgtctgcagcgcactgcgtggctaatgttaatgtgagggcagtaagagtggtgctgggcgctcataacctgtcacggcgagagcccacaagacaggtttttgcagtgcagagaatcttcgagaatgggtatgatcctgttaatctcctgaatgacattgtcattctccagctgaatggatccgccaccattaatgcaaatgttcaagtcgctcagctgcctgcccagggacgccgcctcggcaacggcgtccaatgcttggcaatgggctggggtctgctcgggcggaatcgggggatagcatcagtgctgcaggagttaaacgtcaccgtagtcacatctttatgcagacggagtaatgtgtgcaccctcgtgcgcggcagacaagctggtgtctgctttggagattccggcagccctctcgtctgcaatggtttgatacatgggatcgcctcattcgtgagggggggttgtgcctcaggcttgtatccagacgctttcgcccccgtggcacagttcgtgaattggatcgacagtattatccagaggagtgaagacaacccttgcccccacccccgagaccccgatcccgcgtcacgaactcactag

SEQ ID NO: 186426 - DNA, 3051 bp, synthetic construct
  misc_feature 1..3051: note = Description of Artificial Sequence: Synthetic coding sequence
  source 1..3051: mol_type = other DNA
atggccccccggaccctgtggagctgctacctgtgctgcctgctgaccgctgcagctggcgccgccagctatcccccgcgaggcttcagtctgtatacagggagtagcggagcactgagtccggggggccctcaggctcagattgccccacggcctgcatcgaggcacaggaactggtgcgcctatgttgtaacgcggaccgtgtcatgtgtgttggaggacggggttgaaacatatgttaagtaccagccttgtgcctggggccaaccacagtgcccccagtccatcatgtaccgccgttttctgcggccccgataccgggtggcttataaaacagtcactgacatggagtggaggtgttgtcaaggctatgggggcgatgattgcgctgaatcaccggccccagcgctaggtcctgcttcctcaacgcccaggcccctggctcagcccgcccggcccaacctcagcggaagttcggcgggttccccacttagcggcttgggtggggagggcccgggagaaagcgagaaagttcagcagttagaggagcaagtgcaatcactaacgaaagagttgcaggggctccggggcgtccttcaggggctgagtggccggttagctgaggatgtgcagcgcgctgtcgaaacagcctttaacgggcgccaacagcctgctgacgcagcggcccgccctggggtacacgagactcttaatgagatccagcaccagctgcagcttttggatacgcgtgtgtcgacccacgatcaggagctcggacatttgaacaatcatcacggtggttcctcttccagcggtggctcccgagcacctgcaccagcctccgcaccgcccgggccatccgaggaattattgcggcagctggagcagagattgcaggaaagttgctcagtgtgcttagcgggcctcgacgggttccgccggcagcagcaggaggaccgcgagcgcctgcgcgccatggaaaaactgctggcttcagtcgaggagaggcagagacatctcgctgggctggctgtaggacgaagacccccacaggagtgttgcagccccgaacttggtcgcagacttgcagagctcgaacgcagactcgacgtggtggcgggttctgtaacggttctgtccggacgcaggggtaccgagctcggcggggccgccggtcagggggggcaccctcccggctacactagtctggcatccagactctcccgtcttgaggatcggttcaattccactcttggcccatcagaggagcaggaagaaagttggcccggcgctccgggaggactctctcactggttacccgcagcgcgtgggaggttggagcaactaggcggcctcctggcgaacgtcagcggcgagctgggcggcaggctcgatctgctggaagagcaagtcgccggggctatgcaggcctgcggccaactttgttccggcgcacccggggagcaggacagtcaggtgagcgaaatcctgtcggcgcttgagcggcgggtcctagattctgagggacaattgcgcctcgtgggcagtggcctgcacacggtggaggctgcgggggaggcccggcaagccacactcgaggggctgcaagaggtggtgggaaggctgcaggacagggtggacgcccaggacgagaccgccgcagagtttacactgcggctcaaccttaccgcagcacggcttggccaactcgagggcctgctgcaggcccacggcgacgaaggctgcggggcatgcggaggagtacaagaagagctcggccgcctgcgcgacggggtcgaacgctgttcatgcccccttctccccccaagggggcctggcgcgggaccgggagtgggtggcccgagccgcgggcccttggacggattctctgtgttcggcggatcatcaggtagtgccctccaggctctccagggagaactctccgaagtcatcctgtcatttagttccctgaatgattctttgaatgaactccaaaccactgtggagggacaaggagctgatctcgcggatcttggggccaccaaggatcgcataatttcggagattaatagactgcagcaggaggccacggagcatgccaccgagagtgaagaacgattcagaggactagaggaagggcaagcccaggcaggacaatgtccttccttggagggacgtctgggccgcctcgaaggagtgtgcgaacgtctggacaccgtcgctggtggcctccagggcctgcgggaaggcctcagccggcatgttgccggtttatgggctgggctccgcgagaccaacacaacgagtcaaatgcaagcagcgctcctggagaagctggtcggcggacaggccgggttggggcgcaggctaggggccttgaactcgtccctgcagctcctagaggacagacttcaccagctttccctaaaggatcttactggaccagccggtgaggccggtcctccagggcccccgggcctgcagggcccgcccggcccagcaggccccccagggagccctggaaaggacggacaggagggtccaattggcccccctggtccgcaaggagagcagggtgtggaaggagcccccgctgcacctgtaccacaagtggcgttttcagccgccctgagtcttccacggagcgaaccgggaaccgtgcctttcgatcgagttcttctaaatgacggcggatattatgacccagaaaccggagttttcaccgcacccctggcaggacgctaccttctgagcgccgttctaacgggacacaggcacgagaaggtggaggcggtcctgagccggagtaaccagggggtagcaagggtcgactctggaggctatgagccagaaggcctggagaacaaaccagttgctgaatcccagccaagccccgggaccctcggtgtattttcgttgatcctgccattgcaggcaggcgacacggtgtgcgtggacctcgttatggggcagctagcccactccgaggaacccttgactattttttctggcgctctcttgtacggcgacccagagcttgaacatgcctag

SEQ ID NO: 186427 - DNA, 1044 bp, synthetic construct
  misc_feature 1..1044: note = Description of Artificial Sequence: Synthetic coding sequence
  source 1..1044: mol_type = other DNA
atggccgacctgggcgccaccaaggaccggatcatcagcgagatcaatcgactgcagcaggaggccaccgaacacgccacggaaagtgaagaaaggtttcgcggactggaggaaggccaggcccaggccggccaatgccccagccttgaaggccgcctgggacgactggaaggggtgtgtgagcgccttgacactgttgctggcggcctgcaaggcctgcgcgaaggtctttccaggcatgttgctgggctgtgggctgggctgcgcgaaactaataccacttcgcagatgcaagcagccctcctggaaaagttggtaggtggtcaagcaggtctcggacggcggctgggagcccttaactcctcactgcaacttttagaggaccgtctccatcagctgagtttgaaagacttgaccggcgagggcacgaaggggccagctggcgaagcgggacccccaggtccccctggcttacaaggtccccccggcccagccggaccgcccggcagcccaggtaaggacggtcaagaaggccctataggccccccaggcccccaaggtgaacagggggtggaaggagcgccggcggctcctgtgccccaggttgcatttagcgccgcactgagtctgccgcggtccgagcccgggaccgtaccttttgatcgagtcctgctaaacgatggaggttactatgatcctgaaacaggcgtctttacggctcctttggctgggcggtacctccttagcgctgtgctgacaggacaccggcatgagaaagtggaggcagtactctcccggtctaaccagggcgttgcccgagttgattccgggggttacgaacctgaaggcttagagaacaagcccgtggcagaatcacagcccagtcctggaacacttggcgtcttctctctgatccttccccttcaggccggagatacagtatgcgtggatttggtcatgggacagctggcacactcagaagaaccgttaacaatcttctctggcgccttactttacggagacccagaactcgagcatgcttag

SEQ ID NO: 186428 - DNA, 1062 bp, synthetic construct
  misc_feature 1..1062: note = Description of Artificial Sequence: Synthetic coding sequence
  source 1..1062: mol_type = other DNA
atgggcagcggcggccggagcgcccaggtgagcaccggccagcgggcctggctcctgccatgtagattcctcaaaaacaccatgagtaacgggtatgaagatcacatggcagaggactgcaggggagacattggtagaacaaacctgatcgtcaactatctgccacagaacatgacacaagacgaactgcgcagcctcttctctagcattggtgaggtggagtctgccaagctgattagagataaagtcgccggccactctctcggctatggatttgttaactatgtgacagcgaaagatgccgagcgagccatcaacactcttaacggcctgcggctgcagtccaagaccataaaggtatcctacgctaggcccagcagcgaggtcataaaagacgccaatctgtatatttcaggactaccaagaactatgactcagaaagacgtggaggacatgttctcacgcttcggaagaatcattaatagtagggtgcttgttgatcagaccaccgggctcagcagaggggtggcctttatacgctttgacaagagatctgaagccgaggaggctattactagttttaacggacacaaacctcctgggtccagcgagcctataacggttaagttcgcggcgaaccctaaccagaataagaacgtagcattgctatcccagttatatcacagccccgcccgtaggtttgggggacccgttcaccaccaggcccagaggttcagattcagtcccatgggcgtcgatcatatgtctgggctgtccggcgttaacgttcccggtaatgcttcatctggctggtgcatcttcatctataacttaggccaagatgctgatgagggaatcctgtggcagatgttcggccccttcggagccgtgaccaatgtcaaagtcatccgcgattttaacacaaataaatgcaaaggatttgggttcgtgaccatgacaaattatgaggaggcagctatggccatcgcatctctgaacgggtaccgactgggcgataagatcctccaagtatcttttaagactaataagagccataagtag

SEQ ID NO: 186429 - DNA, 981 bp, synthetic construct
  misc_feature 1..981: note = Description of Artificial Sequence: Synthetic coding sequence
  source 1..981: mol_type = other DNA
atgagcaacggctacgaggaccacatggccgaggactgccggggcgacattggcaggactaatctgatagtgaactatctgccccaaaacatgacacaagacgaactgaggagcttattcagtagtatcggggaagtcgagagcgccaagctcatacgcgacaaggtcgctggccatagcctgggctatggctttgtcaattacgtgaccgccaaggacgccgagagggctatcaataccctgaacgggctgaggctccagagtaaaacgataaaagtgtcatacgcaaggcctagttccgaggtcattaaggatgctaacctgtacattagcggcttgccacgtacaatgactcaaaaagacgtcgaggacatgttctcccggttcgggcggattattaatagccgagttttggttgaccagacgaccggcctttcacgcggagtagcttttatacggtttgacaaacggtcagaggccgaagaagccattacaagcttcaacggacataagccaccaggtagttctgaacccattactgtgaagtttgctgccaaccctaaccagaacaaaaatgtggcactcctgagccagctgtatcacagcccagcgagacggttcggcggaccagtgcaccatcaggcacagcgcttcaggttttctcccatgggagttgaccacatgagtgggctgtccggcgtgaatgttcccggcaacgcgagctccggctggtgcatcttcatctacaatttgggccaagatgctgacgaaggcattctgtggcagatgttcggcccttttggagccgtgaccaacgttaaagtgattagagactttaatactaataaatgtaaaggattcgggtttgttacaatgacgaattatgaggaggccgccatggcaattgcctccttgaacggctacagactgggcgacaagatacttcaggttagcttcaagaccaataaatcccataaatag

SEQ ID NO: 186430 - DNA, 828 bp, synthetic construct
  misc_feature 1..828: note = Description of Artificial Sequence: Synthetic coding sequence
  source 1..828: mol_type = other DNA
atgagcagcctgcacaagagccggatcgccgacttccaggacgtgctgaaagagccgagtattgcactcgagaagctcagagagctcagtttctccgggataccctgcgaggggggcctgaggtgtttgtgctggaagatccttctcaactaccttcccctggaacgagcatcatggacatccattctcgcgaagcagagggaactatacgcacaattcctcagagaaatgatcattcagcctggcatcgccaaagccaatatgggggtttctagggaagatgtgactttcgaagaccatcctttaaatcccaaccccgattcgaggtggaatacctattttaaggacaacgaggtccttctgcagattgacaaggatgtaagacgcctctgtcccgatatctccttttttcagcgtgctaccgactatccatgtcttcttatactcgatccacaaaacgaatttgagacactgaggaagcgcgtcgagcaaacgacacttaaatcacagactgtagcacggaaccgcagtggagtgacgaaccaggaacagaatattaaaccacagtttttcgctttccgctggcttaccttgctcctgtctcaggaattcctgttgcctgatgtcatcaggatctgggactcactcttcgctgacgataataggttcgattttctcttactggtttgctgtgccatgttgatgctgattcgggagcaactgctcgaaggagactttaccgtgaacatgaggctgcttcaggactaccccataaccgacgtttgtcagatacttcagaaggcaaaagaactgcaggatagtaaatag

SEQ ID NO: 186431 - DNA, 1164 bp, synthetic construct
  misc_feature 1..1164: note = Description of Artificial Sequence: Synthetic coding sequence
  source 1..1164: mol_type = other DNA
atggccgtgcggctgtgcgacgtggccagcctgctgcggagcggctcatgggctgccgagccatggacaggagtcatagccgccatggaaactcaactaagcaacggtccaacgtgcaataatacagccaacggaccgactacgattaacaacaattgcagttctccggtggacagtgggaacacagaggacagcaagactaatctgatcgtcaactatttaccccaaaatatgacccaggaagaattgaagtccttgttcggcagcatcggcgaaattgagagctgcaaattggtgcgggacaagatcactggacagagcctggggtacggattcgttaactacatagaccccaaggacgcggagaaggctatcaacaccctgaacggcctccgcctccagacgaagactatcaaggtctcctacgcccgtccctcttctgcatcaatccgggatgcaaatctgtacgtgagtggactgcctaagaccatgacccagaaggagctcgaacaactgttcagtcaatatggccggatcattacatcacgcattttagtagaccaagtaactggcatatcacgtggcgtaggattcattagattcgacaagcgcatcgaagccgaggaggcgattaaaggtctgaatggtcagaaaccacctggcgcgactgaaccgataacagtaaagttcgcaaacaaccccagtcagaaaactaaccaggccattttgagtcagctgtatcagagcccaaataggcgctatccgggccccttagcgcagcaggcacagcgcttcaggctggataacttgcttaacatggcttacggtgtaaaacgtttctctccaatgactatcgatggtatgacttccctcgccggcatcaatatccccggccatccagggaccgggtggtgcatcttcgtgtataacctagcccccgacgctgatgagtcgattctatggcaaatgtttgggcccttcggggcagttacgaatgtgaaggttatccgagacttcaacacaaataagtgtaaaggtttcgggttcgttacaatgactaattacgatgaagctgctatggctattgcttccctgaatggctacaggttgggcgaccgcgtgcttcaggtgtctttcaagacaaacaagacgcacaaagcctag

SEQ ID NO: 186432 - DNA, 1041 bp, synthetic construct
  misc_feature 1..1041: note = Description of Artificial Sequence: Synthetic coding sequence
  source 1..1041: mol_type = other DNA
atggagacccagctgagcaacggccccacctgcaacaacaccgccaatggacccactacaattaacaataactgttctagcccagtcgatagcgggaataccgaagacagtaagactaatttaatcgtgaattacttgccacagaacatgacgcaggaggagctcaagagcttgttcggctctatcggcgaaatcgaaagctgcaaattggtgagagacaaaataacaggccaaagcctgggatacggctttgtgaattacatcgatccaaaggacgccgagaaagccatcaacactttgaatggcctacggctccaaacgaagacgataaaagtctcttatgccaggcctagcagcgcatctattcgggatgccaatctgtacgtgtctggcttaccgaagaccatgactcagaaagagctagaacaactcttttctcaatacggcagaatcattactagccgcattctcgtggatcaggtgaccggaattagcaggggcgtggggttcattaggttcgacaagcgcatcgaagccgaggaggccattaaggggctgaatggacagaaaccccccggtgccactgaacccatcactgtcaaattcgctaacaacccctctcagaagacaaaccaagcgatcctgagccaactgtatcaatctcctaataggcgatatcccggacctcttgcacagcaggctcagcgcttcaggttcagtcccatgaccatagacggaatgacatccctggctggcataaatatcccagggcaccctggtacggggtggtgcatttttgtgtacaatctggccccagacgctgacgagagtatactgtggcaaatgtttggaccctttggggccgtcaccaatgtgaaggtgatccgagacttcaacaccaacaagtgcaaaggcttcggattcgtcactatgacaaactatgatgaagcagctatggccatcgcctcactaaatgggtatcggctgggtgacagggtgctacaggtgagctttaaaacaaataagacgcacaaggcctag

SEQ ID NO: 186433 - DNA, 1080 bp, synthetic construct
  misc_feature 1..1080: note = Description of Artificial Sequence: Synthetic coding sequence
  source 1..1080: mol_type = other DNA
atggagacccagctgagcaacggccccacctgcaacaacaccgccaacggacccactacaatcaacaataattgttcatcacccgttgattctggcaacacggaggacagtaaaaccaatctcattgtgaactatctacctcagaatatgactcaggaggagctaaagtccctatttggctctattggggagattgagtcttgcaagctcgtgagggacaagataacagggcaaagtctgggttatggcttcgtgaactacattgaccccaaggatgccgaaaaggccatcaatactctgaacgggctgaggctgcagacaaaaacaatcaaggttagttacgcacggccctcctcagcgtccatccgagacgcaaacctgtacgtttccggactaccgaagaccatgacacaaaaggaactggaacagctgttttctcagtacggcaggatcatcacgtctcggattctggtggaccaggtgaccgggatttcccgcggggtggggtttattcgatttgacaagaggatcgaagccgaagaggctataaaaggcctcaacggccaaaaacctccaggagcaaccgaaccaatcaccgtgaagtttgcaaataacccatctcagaagaccaaccaagcaatcctttcacagttatatcaatcacccaaccgcaggtaccccggcccacttgctcagcaggcacagagattccgtttagataacctgctgaatatggcttacggtgttaaacgattttcaccgatgactatcgacggcatgacttcacttgcaggaatcaatatcccaggacacccaggcacggggtggtgcattttcgtctataacttagcacccgacgctgacgagtctattctttggcagatgttcggtccctttggggctgtgacgaacgtaaaggtcattcgggatttcaataccaacaaatgcaaggggttcggctttgtgacaatgacgaattatgatgaggctgccatggccattgcttcgctgaacggctacagactgggcgatagagtactacaggtctctttcaaaactaataaaacccacaaagcttag

SEQ ID NO: 186434 - DNA, 1080 bp, synthetic construct
  misc_feature 1..1080: note = Description of Artificial Sequence: Synthetic coding sequence
  source 1..1080: mol_type = other DNA
atggagacccagctgagcaacggccccacctgcaacaacaccgccaatggtccgaccacaatcaataacaattgctcttcacccgtagactctggcaatacggaggactctaagaccaatctcatcgtgaactaccttccacaaaacatgacgcaggaggagctcaagagcctgttcggttctattggggaaattgagtcttgtaagttggtgcgagataagattacgggccaatctctgggctatggcttcgtaaattacatagaccctaaagatgccgagaaggctatcaataccctcaatggtctcaggttacaaacaaaaactattaaggttagctatgcacggccaagctccgctagcatcagagacgcaaatttatatgtatctggactgcctaagactatgacacaaaaagagctcgaacagctcttttcacagtatggacggatcataacctcgcgaatactggtagatcaggtcaccggtatttccaggggcgtgggcttcattaggtttgacaaacggatagaagcagaagaggccatcaagggtctgaatggtcagaagccaccaggtgcaactgagccaattacagtgaagtttgccaacaaccctagtcagaagactaaccaggccatcctgtctcaattatatcagtccccaaatcgaaggtacccggggccactggcacaacaggctcagagatttaggcttgacaatctcctgaatatggcatatggggtaaaaaggttcagcccaatgacaattgacggcatgacgtctcttgcaggcatcaacattcctgggcaccctggcaccggttggtgcattttcgtgtacaacctggccccggatgctgacgaatccattttatggcagatgtttgggcctttcggcgctgtgaccaacgttaaggtgatccgagacttcaacacaaacaagtgcaagggctttggattcgttacgatgactaactacgatgaggctgccatggccatcgcgtctctgaacggataccgtctgggcgaccgtgtgctgcaggtgtcctttaagaccaataaaacgcataaggcttag

SEQ ID NO: 186435 - DNA, 273 bp, synthetic construct
  misc_feature 1..273: note = Description of Artificial Sequence: Synthetic coding sequence
  source 1..273: mol_type = other DNA
atgacccagaaggagctggagcagctgttcagccagtacggccggatcattactagtaggattcttgtggaccaagtgacagggataagtaggggggtgggcttcatcagattcgataagcgtattgaggccgaagaggccatcaagggactcaatgggcagaaacctcccggagccactgaacctattaccgtcaagttcgccaacaatccctcacagaagaccaatcaggcaatcctcagccagctatatcagtcacccaacagacggtag

SEQ ID NO: 186436 - DNA, 570 bp, synthetic construct
  misc_feature 1..570: note = Description of Artificial Sequence: Synthetic coding sequence
  source 1..570: mol_type = other DNA
atggagacccagctgagcaacggccccacctgcaacaacaccgccaacggcccaactactattaacaacaattgctcatctccagttgacagcggcaacaccgaggacagtaagaccaaccttatcgtgaactatctgcctcagaatatgacgcaggaggagctgaaaagcttgtttggcagcataggcgaaatagagtcttgcaagctagttcgtgacaagatcacggggcaatctctggggtacgggtttgtgaattacatcgaccccaaggatgccgaaaaggccataaatactctgaacggtttacggctgcaaactaaaactatcaaagtaagttacgcgcgacccagcagcgctagcatacgagatgcaaacttgtacgtctccggattaccaaagaccatgacccagaaagaactggagcaactgtttagtcaatatggacggattattacatctcgtatcttagttgatcaggtcaccgggatctcccgcggtgttggatttattaggtttgacaagaggattgaggcggaggaggccatcaagggattgaatggacagtag

SEQ ID NO: 186437 - DNA, 1080 bp, synthetic construct
  misc_feature 1..1080: note = Description of Artificial Sequence: Synthetic coding sequence
  source 1..1080: mol_type = other DNA
atggagacccagctgagcaacggccccacctgcaacaacaccgccaacggacctacaacaatcaacaataattgttcatcccccgtcgattccggtaacacagaggactctaagactaatctgattgtgaattacctcccacagaatatgacccaggaagagctgaagagtctctttgggtccattggtgagatcgagagctgcaagctcgtccgcgataaaatcaccgggcagagcctggggtacggctttgtgaattatatagatcctaaagatgccgagaaggccattaacaccctgaacggcttgagacttcagacaaaaacgataaaggtgtcatatgcaaggccatcttctgcatcaattagggatgctaatctgtacgtgtcaggccttcctaaaactatgacccaaaaggagttggaacagttgttttctcagtacgggcgcatcatcaccagccgcattttagtagatcaagtgactgggatctcacgtggagttggattcataagatttgacaaaagaatcgaagctgaagaagctatcaagggactgaacggccagaagccccccggggccaccgagcccatcacagtgaaatttgccaacaatccctcccagaagacaaaccaggccatcctgtctcagctctatcagtcccctaaccgccgctacccgggacctttagctcaacaagcccagaggtttaggctcgacaacctgttgaatatggcatatggagtcaagaggttttctcccatgacaatagatgggatgacctctttggccgggataaatatacctggtcaccccggcaccggatggtgtatattcgtgtataacctggcaccagatgctgacgagagtatcctttggcagatgttcggacccttcggggcggttaccaacgtaaaggttattagagattttaacacaaataaatgtaagggcttcggctttgtgactatgactaattacgacgaggcggccatggctatcgcatcactgaacgggtatcggttgggagatagggtactgcaggtgtcattcaagactaataagactcacaaggcctag

SEQ ID NO: 186438 - DNA, 1104 bp, synthetic construct
  misc_feature 1..1104: note = Description of Artificial Sequence: Synthetic coding sequence
  source 1..1104: mol_type = other DNA
atggtgacccagatcctgggcgccatggagagccaggtgggcggcggccctgccggtccagcgcttcctaacggacccctgctcggtactaacggtgcaactgacgattccaagacaaacctaatagtcaactatctgcctcagaatatgacacaggacgaatttaagagcttgtttggcagtattggagacatagaatcctgcaagcttgtgagagacaagattaccggccagtctctcggctatggttttgttaattactcggatcctaatgacgcagacaaagccataaataccctgaatggtctaaaattgcagactaaaacaataaaggtcagttacgcacgcccgagctctgcctccatacgcgatgctaacttatacgtcagcgggctcccaaaaacaatgagtcaaaaagagatggagcagctgttcagtcagtacgggcgcatcataacctcacgcatcctcgtagatcaagtcactggggtctcccgtggagtggggttcatacgcttcgacaagagaatcgaggccgaggaagcgatcaaggggttaaacgggcagaagccgttaggagcagcggaacccatcaccgtcaagttcgctaataaccctagccaaaagaccggccaggccctcctgacacatttgtatcaatcttcagcccggcgctacgctgggccattgcatcaccagacgcagaggtttcgccttgacaacttgctcaacatggcatacggcgtaaagtctcccctgtccttaatcgcaagattcagtcccatcgccattgatggcatgtcaggtttggccggcgtcggtctttccgggggggccgctggggcaggttggtgcatcttcgtatacaatttgagcccagaagctgacgagtctgtactctggcagctatttggaccctttggcgcagtgacaaacgtaaaagtcattcgggatttcacaaccaacaagtgtaaagggtttggcttcgtcactatgaccaactatgacgaggcagcaatggccatagccagcctgaatggctatcggctaggcgagcgtgtgttgcaggtatcttttaaaaccagtaaacagcataaggcttag

SEQ ID NO: 186439 - DNA, 1083 bp, synthetic construct
  misc_feature 1..1083: note = Description of Artificial Sequence: Synthetic coding sequence
  source 1..1083: mol_type = other DNA
atggtgacccagatcctgggcgccatggagagccaggtgggcggcggtcccgctggccccgctctcccaaacgggcccctgctgggcaccaacggtgcaacagacgattcgaagaccaatctaatcgtgaactacctcccccagaatatgactcaggacgaattcaaatctctgttcggttccatcggggacattgaaagttgtaagctggttcgcgataagataacagggcagtcactcggctacggctttgtgaactactcagaccccaacgacgcagacaaagctatcaatactctgaatgggttgaagctgcagacaaaaaccatcaaggtatcctatgcccgtccttcttccgccagtattagagacgctaatctctatgtgtcaggtcttcctaagaccatgtctcagaaggagatggaacagctcttctctcaatatggtagaatcatcacctcccgaattctggtggatcaagtgacaggggtttctaggggagtgggatttatacgctttgacaagcggatagaggccgaagaggcaatcaaaggcctgaatggccaaaaaccactgggtgctgccgaaccgatcacagtcaagtttgccaataatccatcccaaaagacgggacaggcgctgctgacccacttataccagtcatctgctcgcagatatgcaggccctctgcatcatcagacccagagattccgcctggacaatttgttaaatatggcctatggggtgaaaagattctcgcctatcgcaatcgacggcatgagcgggctggccggcgtgggcctcagcgggggcgccgcgggtgctgggtggtgtatattcgtgtacaatctctcccctgaggctgacgaatccgttctctggcagctttttggccccttcggtgccgtgaccaacgtcaaggtgattagagatttcacaacaaacaagtgcaaggggttcggtttcgtgaccatgactaattatgatgaggctgcgatggcaatagcaagcctcaatggctacaggttgggtgagagggtactccaagtcagcttcaaaacctccaagcagcacaaggcatag

SEQ ID NO: 186440 - DNA, 1152 bp, synthetic construct
  misc_feature 1..1152: note = Description of Artificial Sequence: Synthetic coding sequence
  source 1..1152: mol_type = other DNA
atgcggctgctgctgctgcgggagatcgtgatcaacgagagccggaattgcagcttcatgatcatctccacaatggagcctcaggttagtaatggtcccaccagcaacacctctaacgggccctcctccaacaatcgaaactgtccaagtccaatgcagaccggcgcaactactgatgacagcaagacaaacctgattgtgaactacctcccacagaacatgacacaggaggaatttagaagtcttttcggcagcatcggggagatcgagtcatgtaagcttgttcgggataaaattaccggtcagtccctgggctacggctttgtaaactatattgaccccaaagacgccgaaaaggcaattaacacacttaacggcctcaggctgcaaaccaagactatcaaggtttcttacgctaggccatcaagtgcaagcatcagagacgcaaacctttacgtgagcggactacctaagacaatgactcaaaaagagcttgaacagctgtttagccagtatggccggattattacaagcaggattctcgtggatcaggtgaccggagtgtcccggggggtgggctttattaggtttgataaacgcatcgaggctgaggaggccatcaagggcctcaatggccaaaagcccagtggggcaacagaacccatcaccgtcaagttcgctaacaacccgtcccagaagtcctcccaggcgctgctctcacagctgtatcaatcgcccaaccggaggtatcctggacctttgcaccatcaagcacagagattccgtcttgacaatctgctgaatatggcatatggcgtaaaaaggtttagtccaatcaccattgatggcatgacgtctctggtgggcatgaatattccaggacatacaggaaccggatggtgtatctttgtgtataacttatcacccgattctgacgaatccgtattgtggcaattgttcggcccctttggggcagtgaacaatgtgaaggtgattagggattttaacactaacaagtgtaagggatttggattcgtaacaatgactaactatgatgaggctgccatggcaatcgcttcgcttaatggttacaggctcggcgacagggttctgcaggtcagctttaaaaccaacaaagctcacaagagctag

SEQ ID NO: 186441 - DNA, 1116 bp, synthetic construct
  misc_feature 1..1116: note = Description of Artificial Sequence: Synthetic coding sequence
  source 1..1116: mol_type = other DNA
atggagtggaacggcctgaagatgatcatcagcaccatggagccccaggtgtccaatggacctacatctaatacaagcaatggccctagcagcaacaatagaaattgtccaagccctatgcagacgggtgcaacaacagacgattcaaagactaatctgatcgtcaattaccttccccagaacatgacccaggaggagtttcgctctcttttcgggtcaattggagaaattgagagctgtaagctggtgcgcgacaagatcactggtcagtctctcggctatgggttcgttaattacatcgatcccaaagatgcggaaaaagcgattaatactctcaacggcctgcgcttgcagactaagacaatcaaggtgtcatacgcaagacctagctctgcctcaatcagggacgcaaatctctatgtgtccggattgccaaaaacgatgacccagaaggagctcgaacaactcttctcccagtacgggaggattatcactagccgcattctggtcgatcaggtcaccggtgtgtcccgcggcgtgggatttattcggttcgataagagaatagaggccgaagaggccatcaagggactgaatgggcaaaagccatccggcgcaaccgagcctatcacggttaagttcgccaacaatccgtcgcagaagagctcccaggctctgctgagccaattgtaccagtctcctaatcgtcgctaccccggcccgctccaccatcaggctcagagattccgccttgacaacttgctgaacatggcctacggcgtcaaaagattttctcccattaccatcgacggcatgacatcactggtaggtatgaacatcccaggacacaccggaaccgggtggtgcatcttcgtgtacaatctgtctccagactcagacgagtcagtgctttggcaactcttcgggccctttggagcggttaacaacgtgaaggtgattcgggatttcaatactaataagtgcaagggatttggattcgtgacaatgactaattacgacgaggcggccatggccatagcatctctcaatggatatcggctgggggatagagttctccaagtgtccttcaaaacaaataaggcacataaatcatag

SEQ ID NO: 186442 - DNA, 1158 bp, synthetic construct
  misc_feature 1..1158: note = Description of Artificial Sequence: Synthetic coding sequence
  source 1..1158: mol_type = other DNA
atggagtggaacggcctgaagatgatcatcagcaccatggagccccaggtgtccaacggaccaacaagtaacactagcaacggccccagcagcaataaccgtaactgccctagccccatgcagaccggggccaccacggacgatagtaagactaatctgattgtcaactacctgcctcaaaatatgacgcaggaagagtttagatcattatttgggagcattggagaaatcgagagctgtaagttagtgagagataaaataaccggtcagtctctgggatacggattcgttaattatatcgaccctaaagacgccgagaaggctataaatacactgaatggcctcaggctccaaactaaaaccataaaggtttcctatgcacggccaagttcagctagcatacgggacgctaatctatatgtgagcggtctgcctaagaccatgactcagaaagagttagagcagctgttctcacagtacgggcgcatcatcacctcccgcatcctcgtcgatcaagtgacaggtgtgagccgaggagtgggatttatccgtttcgacaagagaattgaggccgaggaggccattaagggccttaatggccaaaagcctagtggggcaacggagcctattactgtgaagtttgcaaataacccctctcagaagtcctcacaagcacttttgagccagctttaccagagcccaaaccgccggtatcctggtcctcttcaccaccaggcgcagagatttcggttggacaacttgctgaacatggcatacggcgttaaaagactaatgtcagggcctgtacccccaagtgcatgtcctcctagattttctcccatcaccattgacggcatgaccagcctggtgggtatgaatatccctgggcataccggcaccggctggtgcatcttcgtgtataatctctcgccagacagcgacgagtctgtgctctggcaacttttcgggcccttcggcgcagtcaataacgtcaaggtgattcgtgacttcaacaccaataagtgcaaaggcttcgggttcgtgaccatgacaaactatgacgaagcagcgatggctattgcctccttaaacgggtataggctgggcgacagagttctacaggtcagcttcaagacaaataaggctcacaaatcatag

SEQ ID NO: 186443 - DNA, 1143 bp, synthetic construct
  misc_feature 1..1143: note = Description of Artificial Sequence: Synthetic coding sequence
  source 1..1143: mol_type = other DNA
atggtgatgatcatcagcaccatggagccccaggtgagcaacggccccacttctaatacttcgaacggccccagctccaacaaccgtaactgcccctcccccatgcaaacaggcgctacaaccgacgacagtaaaaccaatctgatagtgaattatttgccacagaatatgacccaggaggaatttcgatcacttttcggttctattggggagatcgagtcatgcaagctggtgcgcgacaagatcactggacagtctctcggttatggatttgtgaattatatcgatcctaaagacgcggagaaggccatcaacacactgaacgggctgaggctgcagaccaaaaccatcaaagtttcctatgctaggccctcgagcgcatcgatccgcgatgcaaatctctatgtcagcggccttccaaagacaatgactcagaaagaacttgagcagttatttagccagtatggacgcattatcacttctcgtatattggtggatcaggtaacaggagtctctcgcggggtgggattcatccggtttgacaagcgcatagaagctgaagaggctatcaagggcttaaacggccagaagccctcaggggccaccgaacctattacggtgaagtttgccaacaatccctcacagaaatcatcccaggctctgctttctcagctctaccaaagcccaaatcggagataccccggtccactacaccatcaggcccagcggtttcggctggataatctactcaacatggcatatggagtcaaacgcctgatgagcgggccggttcctccatccgcgtgcccgcccagattttcaccaataactatcgacggcatgacctccctggtcggtatgaacattccaggtcacacagggactggatggtgcatattcgtctacaatttgtcacctgactcagacgagtcagtcctatggcagctattcggtcctttcggggccgtgaacaacgtaaaggtcataagagattttaacaccaacaaatgcaaggggttcggcttcgtaaccatgaccaattatgatgaggcggcgatggcaattgccagcctgaacggatataggttaggggatcgcgtcctgcaggtcagttttaagaccaataaagcacacaaatcatag

SEQ ID NO: 186444 - DNA, 1101 bp, synthetic construct
  misc_feature 1..1101: note = Description of Artificial Sequence: Synthetic coding sequence
  source 1..1101: mol_type = other DNA
atggtgatgatcatcagcaccatggagccccaggtgagcaacggcccgacttctaacaccagtaacgggccgtccagtaacaacagaaattgcccaagtccaatgcaaaccggggctactacagacgactcgaagaccaaccttattgtgaactacctcccacagaacatgacacaggaggagtttagatccctgtttggttctattggcgagatcgagagctgcaaactcgtgagagacaagatcactggacagtctctgggttacgggtttgtcaactacatcgatcccaaagacgcagaaaaagctattaatacattgaatggtttgcgactgcagaccaagaccatcaaagtctcctacgcacggccaagcagcgccagcatcagggatgcaaacctgtacgtctcgggtctgcctaagacaatgacacagaaggaactcgagcagctgttcagccagtatggccgaatcattacaagtcgcattttggtcgatcaggtgactggcgtgtcaaggggcgttgggttcatccggtttgataaaaggattgaagcagaagaagccattaaaggcctcaacggccagaagcctagtggcgctacggaacctatcacggttaagtttgctaataatccctcccaaaagtcctcacaagccctgctctcacaactgtaccaatccccaaaccgcagataccccggacctctccaccatcaggcccagcgctttaggctggacaatctgttgaacatggcctacggagtgaagagattcagccccattaccattgatgggatgacgtcgctggttgggatgaacatcccaggacacacgggtactggctggtgcatctttgtgtacaacctgtcccccgacagcgatgaaagtgtgttatggcagctctttggccctttcggcgctgtaaataacgtcaaggtgataagagactttaacacaaataaatgcaagggcttcgggtttgtgaccatgacaaattacgatgaggccgcgatggccattgcgtctctgaatggctacaggttgggcgatagggtcttgcaggtgtcctttaagactaacaaggcccacaagtcatag

SEQ ID NO: 186445 - DNA, 1101 bp, synthetic construct
  misc_feature 1..1101: note = Description of Artificial Sequence: Synthetic coding sequence
  source 1..1101: mol_type = other DNA
atggagcagatcatcagcaccatggagccccaggtgagcaacggccccactagcaatacaagcaatgggccgtcctccaataaccggaactgccctagtcctatgcagaccggcgctaccaccgatgacagtaagacaaatctgatagttaactaccttcctcagaacatgacccaggaggaatttcgatccctttttggaagcataggagaaatcgagtcttgtaagcttgtgcgagataaaatcaccggccaaagcctgggatatggtttcgtcaactatatcgaccctaaggacgcggaaaaggccataaacaccctcaacggcttgcgccttcagactaaaactataaaggtgtcctacgccagaccatcctcagccagcatccgggatgcgaatctgtacgtgtctgggttgcctaagaccatgacacagaaggaactggagcagctcttcagccagtatggaaggattattactagccggatcctggttgatcaggtgaccggagtgagtcggggcgtcggattcattaggtttgataagagaattgaggcggaggaagccatcaaaggcttaaatggacagaagccctctggtgcgacagagccaatcacagtaaagtttgccaacaatcctagccagaagtcaagccaggccctgctttctcagctgtaccaatcccctaatcgcaggtaccccggacctttgcaccaccaggcccagaggtttagattagataatctgctgaatatggcttacggcgtcaagcggttttctcccattactatcgacgggatgaccagcctggtcggcatgaacattcccggccacactggtacaggttggtgcatctttgtatataatctgagcccagactccgacgaaagcgtcctatggcaattgttcggacctttcggcgctgtgaacaacgtgaaggtcatacgcgatttcaacaccaataaatgcaaagggttcgggttcgtcacgatgactaattacgatgaagccgcaatggcgattgcatccttgaatgggtatcgcttaggcgaccgcgttctgcaggtcagcttcaagacaaataaggcccataaatcatag

SEQ ID NO: 186446 - DNA, 1110 bp, synthetic construct
  misc_feature 1..1110: note = Description of Artificial Sequence: Synthetic coding sequence
  source 1..1110: mol_type = other DNA
atgcggctgaagaaccagatcatcagcaccatggagccccaggtgagtaatggccctacatccaatactagcaacgggcctagttcgaacaatcgtaattgtccgtctccaatgcaaactggagccactacagatgatagtaagacaaacctcattgtgaattatctgcctcagaatatgacgcaggaggaatttagatcactctttgggagtatcggcgagatcgagagttgcaaactggtgagggataagatcactgggcaatcacttgggtacgggttcgtgaattacattgatcctaaagacgctgagaaggcaatcaacactctgaacgggttacgcctacaaacaaagaccatcaaagtctcttatgcaagaccctcctctgcttcaattcgggacgcaaacctttacgtgagcggcttaccgaagacaatgactcagaaagaactggagcagctcttcagtcaatatgggagaatcataactagtcgcatcctggtggatcaggtgactggagtatcccggggcgtgggcttcatccgcttcgacaaacgcatcgaggcagaggaggcgattaagggccttaacggacaaaaacccagtggggctacagagccaatcaccgtcaaattcgccaataatccctcccaaaaatcttcacaagcactgctgagtcagctgtatcagagtcctaatcggcgttacccaggccctctgcatcatcaggcacaacgctttagactagataacctgttgaacatggcttatggggtaaaaagattcagtcctatcactattgatggaatgaccagcctcgtaggtatgaatatacccggacacacagggaccgggtggtgtatcttcgtgtacaacttgagcccagactccgatgagagtgttctgtggcagctctttggaccgttcggtgccgtcaacaatgtcaaagtgatccgggacttcaacacgaacaaatgcaagggatttggattcgtcactatgaccaattacgacgaggctgccatggccatagcatctctgaacggctatcgcttgggagacagagttctccaggttagctttaaaaccaataaggcacacaagagctag

SEQ ID NO: 186447 - DNA, 855 bp, synthetic construct
  misc_feature 1..855: note = Description of Artificial Sequence: Synthetic coding sequence
  source 1..855: mol_type = other DNA
atgttccgggccgccgcccccggccagctgcggcgggccgtggcccaggatctgtgtaaagtagctggtatcgcaaaagtgctggtagcgcagcatgacgtctacaaagggttactccctgaggagctcacgcctctgatcttagctactcaaaaacagtttaattacacccatatttgtgctggcgcatccgcatttggcaaaaacctgctgccccgtgttgccgccaaactggaagtggcacccatcagtgatatcatcgccatcaagtctccagacacattcgtacggacaatttatgccggaaacgcactctgtacagtcaaatgcgatgagaaggtgaaagtttttagcgtgcggggcacgtccttcgatgcggccgcaacttctggcgggtcggctagcagtgaaaaggccagcagcacctcccctgtcgagattagtgaatggctggaccagaaactcacaaaatcagacaggcccgagctgaccggagctaaggtcgtcgtgtctgggggtcgcgggctgaaatctggtgagaacttcaaacttctttacgacctagccgatcaacttcacgccgctgtaggcgcttctcgggcggcagtcgacgccggattcgtgcccaacgacatgcaggtaggtcagaccgggaaaattgtcgcacctgagttgtatatcgccgtgggcatttccggagcaattcagcaccttgcgggaatgaaggactccaagactatcgtcgccattaacaaagatcccgaggctccaatttttcaggtggctgattatggaatcgtggcggacctgtttaaggtggtgcccgagatgacggagatactgaagaagaagtag

SEQ ID NO: 186448 - DNA, 1002 bp, synthetic construct
  misc_feature 1..1002: note = Description of Artificial Sequence: Synthetic coding sequence
  source 1..1002: mol_type = other DNA
atgttccgggccgccgcccccggccagctgcggcgggccgccagcctcctccgcttccagtcaactctggtgatcgccgaacatgcaaatgacagcctcgccccgattacccttaatactatcacagccgccacccggctcggtggtgaggtaagctgcttagttgctggcactaaatgcgacaaggtggcccaggacctctgtaaagtggctggtattgctaaggtgcttgtggcccagcacgacgtctacaagggccttttgccagaagaactgacccccctcatcctcgctacccaaaagcagttcaattatacccacatttgcgccggtgcttccgcctttggcaaaaacctcctgcctcgggtggccgccaagttggaggttgctccaataagtgacatcatcgccatcaagagccctgacaccttcgtcagaactatttatgctggcaatgccttgtgcacagtgaaatgtgatgaaaaagtgaaggtgtttagcgtccgtggcacctcctttgatgccgcagccacctccggaggaagtgcatcctctgaaaaggctagcagcacaagccccgtggagatatctgaatggcttgatcagaaactgaccaaaagcgacagacccgagcttaccggagccaaggtcgtggtctccggaggcagaggcttaaaaagtggggaaaattttaagctgctgtacgatctggcagaccagctccacgcagccgtcggtgccagcagagcagcagtggatgcaggctttgtccctaatgacatgcaggtgggccaaaccggaaaaatcgttgctccagaactttatattgccgtcggcataagcggagccatacagcacctggcaggcatgaaggattccaaaaccatcgtggcgatcaacaaggatcccgaagctcccatattccaagttgcggactacggtattgttgcagacctcttcaaggtcgtcccagaaatgaccgaaatcttaaaaaagaagtag

SEQ ID NO: 186449 - DNA, 768 bp, synthetic construct
  misc_feature 1..768: note = Description of Artificial Sequence: Synthetic coding sequence
  source 1..768: mol_type = other DNA
atggccgagctgcgggtgctggtggccgtgaagcgggtgatcgactatgccgtaaaaatcagggttaagcccgatagaaccggcgtggtcaccgatggagtgaagcatagcatgaacccgttctgcgagatcgcagttgaagaggctgtccggctaaaggaaaagaaactggtgaaggaggttatcgcagtttcctgcggcccggcccagtgtcaggaaactatccgaaccgctttagcaatgggagcagacaggggcatacatgtggaggtgccccccgccgaggccgaaagactggggccactgcaggtggccagagtcctggccaaattagccgagaaggagaaagtagacctggtgctgctcggcaagcaagccatagacgatgactgcaatcaaacaggccagatgactgcggggtttttagactggccccagggcacttttgccagccaggttacactggaaggagacaagctgaaagtcgaacgcgagattgatgggggactggaaaccctgcgccttaaactacccgcggtggtaactgcagatttgcgtctcaatgagccaagatacgcaacgctcccaaacatcatgaaagccaagaagaagaagatcgaggttatcaaaccaggagatctcggggtggatctgacatctaaactgtctgttattagtgtggaggaccccccgcagaggacagccggcgtgaaagtggagactaccgaggaccttgttgcgaagttgaaggagatcgggagaatttag

SEQ ID NO: 186450 - DNA, 1041 bp, synthetic construct
  misc_feature 1..1041: note = Description of Artificial Sequence: Synthetic coding sequence
  source 1..1041: mol_type = other DNA
atgtacctgagcctgtgggtgaccatcaacaccgtgaacctgcggaacaccttatccggcctacgcggggccgtaaccacagtgggaatgataaaaagcgacgtgcccggcacacaggaatggttggacgagcggaggagacagggagatctcccgctgccgaccaacagcaatcctgtactgtcgctggaactgtgcgatcccggtcaggggccggccccgtttcaggccgtggtggtattgatacagcctggcagggggctggctctgcggccgccacccagctgtctgttcccccctgacccgacgccgagcccccctgctggccagattcgcgtgaagcccgaccggactggcgtggtgaccgacggtgtaaaacactctatgaaccccttttgtgaaatcgccgtagaggaagcagtgagacttaaagagaaaaagctggttaaggaggttatcgctgtgtcctgtggtcccgcccagtgccaggaaactatccgaaccgccctggctatgggcgctgacaggggcattcatgtcgaggtgccacccgcagaagcagaacgtctgggaccacttcaagtggcaagggttctggccaaattagcggagaaggagaaagtggacctcgtgctgctggggaagcaggctatcgatgacgactgcaatcagaccggccaaatgacagcggggtttctcgattggccccagggaacgttcgccagtcaggtcactttggaaggtgacaaacttaaagtggagcgagaaatcgacggtggtctggagacactccggctcaagctacccgccgtagtcaccgccgaccttcggctgaacgagcctaggtatgccacactcccgaatataatgaaggccaaaaagaagaagatcgaggtgatcaaacctggtgaccttggtgttgaccttacaagcaagctgtccgtcatcagcgtcgaagatcccccccaacgcactgccggtgtgaaagtggagacaacggaggacctggttgccaagctgaaagaaattggcagaatctag

SEQ ID NO: 186451 - DNA, 1713 bp, synthetic construct
  misc_feature 1..1713: note = Description of Artificial Sequence: Synthetic coding sequence
  source 1..1713: mol_type = other DNA
atgctggtgcccctggccaagctgagctgcctgggcgtgaacatggaacggtttgcggaagaggccgatgtggttatcgtcggtgccgggcccgccggtctttctgcggcagtgcgcttgaaacagctggcagtggcgcatgagaaggacatccgggtctgcctggtggaaaaggctgcccaaattggtgcgcacaccctgtcgggtgcctgtttagatcctggcgcgtttaaagagctctttcctgactggaaagaaaagggtgctccactaaatactcctgtgaccgaggatcggtttgggatcctcacagaaaagtatcgcataccggtgcctattctgccaggattacctatgaacaaccacggcaattacattgtaaggcttggccacctggtaagttggatgggagaacaggcagaggccctcggggtcgaggtctaccccggatacgccgctgcagaggtcctcttccacgatgatggctctgtgaagggcattgccacaaatgatgtgggcatccaaaaggacggcgcgcctaaagctaccttcgaacggggacttgaactacatgccaaagtaacgatctttgcagaaggctgccatggacatcttgcgaagcaattgtacaagaaatttgacctgagggcaaattgtgagcctcagacctatggaattggcctgaaggagctatgggttattgatgaaaagaactggaagcctggccgcgtggaccatacagtgggctggcctttggacaggcacacatatggcggcagtttcctgtaccatctgaacgaaggcgagcccctggttgctttaggcttggtggtaggattagattatcagaacccgtacctgtctcctttccgcgagttccagagatggaaacatcacccctcgatacgccccacactcgagggtggcaagcgcatagcttatggagccagagccctgaacgagggaggtttccagtcgatacctaagcttacattccccggggggctgttgatcggatgctcacctggcttcatgaacgtacctaaaatcaagggcacgcacaccgccatgaaatccggaatcttggctgcggaatccatatttaaccagctcacctcagaaaacttacagagcaagaccatcggactgcatgtcaccgaatacgaggataatcttaagaatagttgggtttggaaggaactgtactccgtgaggaatatcagaccaagctgccatggagtcttaggcgtttacggcggaatgatttacacagggattttctactggattctaagaggtatggagccatggaccctcaaacacaaagggagcgatttcgagcgtctcaaacccgcaaaagactgtacacctatcgagtatccaaagcctgacggacagatcagctttgaccttcttagttctgtagctcttagtgggactaaccatgaacatgaccagccggcacacctcacactgagagacgacagcatcccagtgaatcgcaatctgtccatttatgacggaccagagcaacgcttttgccctgccggggtttacgaattcgtacccgtcgagcagggagacggattcaggctgcagattaatgcccagaactgtgttcactgcaaaacttgtgacattaaggatccttcacagaacattaattgggttgttcccgaaggcggcgggggtcccgcatataacggcatgtag

SEQ ID NO: 186452 - DNA, 1854 bp, synthetic construct
  misc_feature 1..1854: note = Description of Artificial Sequence: Synthetic coding sequence
  source 1..1854: mol_type = other DNA
atgctggtgcccctggccaagctgagctgcctggcctaccagtgcttccacgcactgaagataaagaaaaactaccttccactatgtgctacgcgctggagctctacttcgactgtccccaggatcaccacacattacacaatttatcctagagacaaggacaagcgctgggagggcgtcaacatggaacgcttcgccgaggaagcagatgtcgttatagttggcgccgggccagccggactgtccgctgcggttcggttaaaacagctcgccgtagcccacgaaaaggatatccgagtttgtttagtcgaaaaagcagcacagatcggcgcccataccctgagtggggcatgccttgatcccggagccttcaaggaactctttcctgattggaaggaaaagggagcgcctttgaacacgccagtgactgaagatcgctttgggattcttactgagaaataccggatcccagtgccgattctgccaggcttaccgatgaataatcatggcaattatatcgtcaggctgggccacttggtgtcatggatgggggaacaggcggaagccctcggagtggaagtctacccgggatacgccgctgctgaggtgctattccacgacgatggtagcgtcaaaggaatcgctactaacgacgtagggatccagaaagatggggcacccaaagctacttttgagcggggactggagttgcacgcaaaggtaacaattttcgcggagggctgccatggccatctggccaagcagctttacaagaagttcgatttgcgggctaactgcgagcctcaaacctacggaattggtctgaaggagttgtgggtaatcgatgagaagaattggaagccggggcgagtggaccacaccgtgggttggcctctcgaccggcatacatatggtggtagctttctgtaccacctgaacgaaggagagccgctcgtggcactgggcctggttgtgggcctcgactatcaaaatccatatctctccccctttcgggagtttcagcgttggaaacaccatcctagtatccgccccactcttgagggtggcaagagaatcgcgtatggcgctcgcgcattgaacgaaggggggttccaatcaatacccaagctgacatttcctggaggcctgctgataggatgctcgccaggctttatgaatgtccctaagatcaaaggtacccacacagcaatgaaatcagggatcctcgcagcggaatctatattcaaccagctgacatccgagaatcttcagagtaagaccataggtctccatgtcaccgagtatgaggacaatctgaagaactcttgggtctggaaggaattatattctgtgcggaatattcggccctcctgccacggcgtgctgggtgtttacggcggcatgatctacaccggaattttctattggattctcagaggcatggagccatggacactcaaacacaaagggagcgactttgagaggctgaagcctgcaaaagactgtactccaattgagtaccccaagccagacgggcagatttcatttgacttgcttagctctgtggccctgagtggaactaaccatgagcacgaccaacccgcgcatttaaccctgagagatgattccatccctgtgaaccggaacctgtctatttatgacgggccagagcagcgcttctgtccagcaggcgtgtacgagttcgtacctgtcgagcagggcgatggttttagactgcagatcaacgcacaaaattgtgttcactgtaagacttgcgatataaaagacccgtcccaaaatattaactgggtcgttccagaaggaggcggcggcccagcctacaacggcatgtag

SEQ ID NO: 186453 - DNA, 1287 bp, synthetic construct
  misc_feature 1..1287: note = Description of Artificial Sequence: Synthetic coding sequence
  source 1..1287: mol_type = other DNA
atggaccccagcgtgaccctgtggcagttcctgctgcagctgctgcgagaacagggaaatgggcatattatatcctggacatctcgtgacggcggcgaattcaagctcgtggacgccgaggaggtggccagattgtggggcctaagaaaaaataaaacgaatatgaattacgacaaactctcacgcgccctgagatactactacgataagaacataattcggaaagtgagcgggcagaaatttgtctataagtttgtttcctacccagaagtggccggatgctcaaccgaagactgcccaccccagcccgaggtatccgtcacctcaacaatgcccaacgtagccccggccgcgatccacgcagccccaggagacactgttagtggaaaacctggaactcccaaaggcgctggcatggccgggcctggaggactggcacggtccagccggaacgagtatatgcgttctggcctgtactcaacattcaccatccagagcctgcagccccagccacctccccaccccagaccggccgttgtgttgcccagtgctgcgccagccggagctgcggcacccccttcaggatcacgatcaacctcaccaagtccactggaggcatgcttggaagctgaagaagccggactgccgttacaagtgattctaactcctcccgaggcgccaaatctgaaatccgaggaactcaatgtcgagccgggcctcggccgggcccttcccccagaggtcaaagtcgagggacccaaggaggaattggaagtggcgggagaaagagggtttgtacctgagacaaccaaagctgaacccgaagtgcctccgcaggaaggtgttccggctagactgccagcagtggttatggatacggcaggacaggcaggcggacatgctgcttccagtcccgagatcagccagcctcagaagggccgtaagcctagagacctggagctccccctgtccccatcattgctcggcggacctggtccagaaagaactcccggttcagggtcaggatccggtctccaggctcccggcccagccctaacgccttcgctgctgccaactcacaccttgacccccgtgctgcttaccccttcatcactccccccttccattcacttctggtcaaccctgagcccaattgccccccggtcccccgccaaactgtccttccagtttcctagctccggctctgcccaagtgcacatcccatcaattagtgtggatggcctgtccacacctgtcgtgctcagtcctgggccccaaaaaccttag

SEQ ID NO: 186454 - DNA, 1836 bp, synthetic construct
  misc_feature 1..1836: note = Description of Artificial Sequence: Synthetic coding sequence
  source 1..1836: mol_type = other DNA
atgcccgagatcgtggacacctgcagcctggccagccccgccagcgtgtgtagaacaaaacatctacacctccgttgtagcgtggacttcacacgcagaacactgacaggcaccgccgctctgacagtccaatcccaggaagacaatttacgcagtctggtcctcgatacaaaggatctgactattgagaaagtggttattaatggccaggaggtgaagtacgctctgggagaaaggcagagctataaaggctcaccaatggaaatctccctcccaattgccctctctaagaaccaagagatcgtgatcgaaatatcattcgagacaagtccaaagtccagtgctttgcagtggcttacccccgagcagacgtctggcaaggagcacccatatctgttctcacagtgccaggccatccattgcagagctatcctgccttgccaagatactcctagtgtcaaactgacatatacagctgaagtgtctgttccgaaggagttagtggcactgatgtctgccatccgggacggcgaaacaccagaccccgaagatccgagtcgcaagatttataaatttatccagaaagtccccatcccatgttatctgatcgccctcgtagtgggagccctcgaatccaggcagatcggaccacggactctggtgtggtctgaaaaggagcaggtcgagaagtcagcctatgaattcagtgaaacagagtcgatgcttaagatagcagaagacctcggcggcccttacgtttggggacagtatgatctgctcgtgctccccccgtcgtttccttacggcggtatggagaatccttgtttgacgttcgtgacccccactctgctggccggagataagagtctgtcgaatgttattgcccatgagatttcacacagctggactggcaatctagtgacaaataagacatgggaccacttttggctcaatgaaggccacactgtatatctggaacgccacatttgtgggcggttgttcggcgaaaagttccgtcattttaacgctttgggcggatggggcgaattgcagaattcggttaagacgtttggtgagactcatcccttcactaagctggttgtggacttgacagacattgaccctgatgtggcttactcttctgtaccctacgagaaaggctttgccctcttattctacctcgagcaactgctgggcggtccggagatatttcttggatttcttaaggcctacgtcgaaaagttttcttataagtcaattaccaccgacgattggaaggacttcctgtattcttatttcaaggataaggttgacgtgctgaatcaggtggactggaacgcttggctgtactctcccggcctccccccaattaaacccaactacgatatgactcttaccaatgcttgtatcgccctcagccagcgatggatcactgcaaaagaggatgatctgaacagcttcaacgccacagacctcaaagatctgtcgtcgcaccagttaaacgaatttttggcccagaccttacaacgtgctccactgccccttggacacatcaaaaggatgcaggaggtatataatttcaatgccatcaacaattctgagatccgctttcgttggcttcggctgtgtattcagagtaagtgggaggatgcaattcccctggcgctaaagatggctactgaacaaggtcgcatgaaattcacgaggcctctgtttaaagatctggccgcctttgacaagagccacgatcaggccgttagaacataccaggagcataaagccagcatgcatcctgtcaccgccatgctcgtgggaaaggatttgaaggtggattag

SEQ ID NO: 186455 - DNA, 117 bp, synthetic construct
  misc_feature 1..117: note = Description of Artificial Sequence: Synthetic coding sequence
  source 1..117: mol_type = other DNA
atggagagcgccatcaccctgtggcagttcctgctgcagctgctgctggaccagaagcatgagcatctgatctgttggacctctaacgacggcgagttcaaattgctgaaagcctag

SEQ ID NO: 186456 - DNA, 483 bp, synthetic construct
  misc_feature 1..483: note = Description of Artificial Sequence: Synthetic coding sequence
  source 1..483: mol_type = other DNA
atggagagcgccatcaccctgtggcagttcctgctgcagctgctgttagatcaaaaacacgagcacctcatatgttggaccagcaacgatggcgaatttaaacttctgaaagcagaagaggtagccaaactctggggcttacgcaagaataagaccaatatgaattatgacaagctgtccagggccctgcgatattactacgacaagaacattataaaaaaggtgatcggccagaaatttgtttacaagttcgtttcatttcccgaaatcctcaaaatggacccacacgccgttgaaatctcccgggaatctcttctgctacaggacagcgactgtaaggccagccctgagggaagagaagctcacaagcacggcctcgccgcattgcggtccacctcacgcaatgagtatatccatagcggtctgtactcaagcttcactattaatagcctccagaatcccccagacgcctttaaggcatag

SEQ ID NO: 186457 - DNA, 1218 bp, synthetic construct
  misc_feature 1..1218: note = Description of Artificial Sequence: Synthetic coding sequence
  source 1..1218: mol_type = other DNA
atggacagcgccatcaccctgtggcagttcctgctgcagctgctgcagaagcctcagaataagcacatgatctgttggacaagcaacgatggccagttcaagttactccaggccgaggaggtggcccgcctgtggggcataagaaagaataaacccaatatgaactacgacaaactgagccgggctttgaggtattattacgtaaagaacattatcaaaaaagtgaacggacaaaagttcgtttacaagttcgtatcgtatcccgagattctcaatatggatccaatgactgtcggccgaattgagggtgattgcgaatccctcaatttttccgaagtgagtagctcgtcgaaggacgtagagaatggcggaaaggacaaaccaccgcagcctggggccaagacatctagccggaatgactacattcattccgggctgtacagctcttttacactcaactctcttaattcttctaatgtcaagctgtttaagttgataaagaccgagaatccagctgagaagttagcagaaaaaaaaagccctcaggaacccaccccatcagtgattaagttcgtgactacaccttctaaaaaaccacccgtggaacccgttgccgcgaccatttccatcggcccaagtattagcccctcctccgaggaaacaatccaggcgctggagacacttgtctcccctaagctgccatctcttgaagcaccgaccagcgcctccaacgtgatgactgccttcgccaccactccccccatctctagtattccacccctgcaagaaccgccgcgtacacccagcccccccctctcatcccacccagacatcgacacagatatcgattccgtggcctcccaaccaatggagctgcccgagaacctgtccctggaacctaaagaccaagattctgtcctgctggagaaagacaaggttaataattccagtagatctaaaaagcctaagggtctggagctggccccaaccctggtgatcacatcgtccgacccgagccctctcggcatccttagtcccagcctgccgacagcttcactcactccggctttttttagtcaggttgcctgctccttattcatggtgtcgcctctactatcttttatctgcccatttaaacagattcagaatctgtacacgcaggtgtgcttcctgctgcttcgctttgtgctggagcggctctgtgtcacagtcatgtag

SEQ ID NO: 186458 - DNA, 1296 bp, synthetic construct
  misc_feature 1..1296: note = Description of Artificial Sequence: Synthetic coding sequence
  source 1..1296: mol_type = other DNA
atggacagcgccatcaccctgtggcagttcctgctgcagctgctgcagaagccccaaaacaagcacatgatttgctggacatccaacgatgggcagttcaagttactgcaggccgaggaagtcgcgagactctggggcatacggaagaacaagcctaacatgaactatgacaaactgtctagagctctgagatactactatgtcaaaaatatcatcaagaaggttaacggtcagaagttcgtgtacaagtttgttagctacccagagatcctcaacatggatcccatgactgttggacgaattgagggggattgcgagagcctgaacttttccgaggtttcttcctctagcaaagacgtggaaaatgggggcaaggacaaaccacctcaaccaggggcaaagacctcatcacgcaatgattatatccactctggactctactccagttttacactgaactctctcaatagctcgaatgtgaaactttttaaacttataaagactgagaatccagccgagaaattagctgaaaagaagtctccacaggaacctactcccagtgtaataaaatttgtaacaactccatccaaaaagcctcctgttgaacctgtcgccgcgaccatcagtatcggtccatcaatcagtccgtccagtgaggagactatccaagccctcgagacactggtcagccctaagttaccatctctggaagctccaacttccgcatccaatgtcatgactgccttcgcgactactccacctatttctagtatcccgcccctccaagaacccccgcgcaccccaagtcctcccctgagttcccatcctgacatcgatacagacatagactcagtggcttcacagccaatggagttgcctgagaacttgtctcttgaacctaaagatcaggacagcgtcttgctcgagaaggataaagtaaataattctagcaggagcaaaaagccaaagggtctagaactagccccaaccctggtgattacttcaagtgacccatcccccttgggtatactgtcaccatctttacccaccgcatctctgacacctgcctttttctctcagacaccgataatcctaaccccctctcccttgctcagttccatccacttctggagcacactgtcaccagtcgcacccctgtctcctgccaggctacaaggcgctaataccctgtttcagtttcccagcgtccttaattcgcatgggcctttcaccctgagcggccttgatggacccagcacacctggcccttttagcccagacctgcaaaaaacatag

SEQ ID NO: 186459 - DNA, 1566 bp, synthetic construct
  misc_feature 1..1566: note = Description of Artificial Sequence: Synthetic coding sequence
  source 1..1566: mol_type = other DNA
cggccccaggacccccggcggcggtgccgggtgcggggccggggcggacggggggccagatcaaggggcgggggcaggtgcggcagactacgtgccccaggaggactcggtctcgcggcggccgccttttacggatctgccgccggcgtggcagctgcggcagccccatcttcttcctttcagagagaagaagaggccgagggcggggaggctcatcgcgtgcgcggtggcgataggggcggcgcgccacgggcagcctctctgattgccatggatagcgccatcacactctggcagttcctcttgcagctcctgcagaagccccagaacaagcatatgatttgctggacgtccaatgacggacaatttaaactgttacaggccgaggaggtagcccggctgtggggcatccgaaagaataaacccaatatgaattacgacaagctgagcagagcactgagatactactatgtgaaaaacattatcaagaaggtgaatggacaaaagttcgtgtataagttcgtgagctatcctgagattctgaatatggacccgatgaccgtggggagaattgaaggcgattgtgagagtcttaattttagcgaggtcagctcgagctcgaaggacgtggaaaatggaggaaaggataaacctcctcaaccgggtgccaagacaagtagcagaaatgactacattcactctggcctatattcctcctttaccctaaacagtctgaatagctccaatgtgaaactgttcaagctaataaaaaccgaaaatccggcagagaagctggctgaaaaaaagtcgccacaggagcctactcctagtgtcattaaattcgtcactacaccgagtaagaaacctccagtggaaccagtcgcagctacgattagtattggcccctccatctcgccctcatctgaggaaacgatccaggccctcgagacactagtttcccccaaattgccaagtctcgaagctccaacttctgcttccaacgttatgaccgcctttgccacaacaccccctatatcgtcaataccccccttgcaggagccacctagaactccttcacctcctctcagctcacaccccgacatcgacacagacattgattccgttgcatcgcaaccaatggaattaccagagaacttgtccctcgagccaaaggaccaggactctgttctgcttgagaaggacaaagtcaataattcttctaggagtaaaaaaccaaagggattggaactagccccaactctggtgatcacatcctcggatccttcccccctgggaatccttagcccatcactgccaaccgcttcccttacacccgcgttcttctctcagactccgatcatattaactccttcccccttgctgagctcaattcatttctggagcacactctcaccggtcgcacccctgtcaccagcaaggctgcagggagcgaatacacttttccagtttccatcagtgctcaatagtcacgggccattcaccctgagcggtctcgatggccctagcacccctgggccattttcccccgaccttcagaagacttag

SEQ ID NO: 186460 - DNA, 807 bp, synthetic construct
  misc_feature 1..807: note = Description of Artificial Sequence: Synthetic coding sequence
  source 1..807: mol_type = other DNA
atgaacggcaccgccaaccccctgctggaccgggaggagcactgccttaggctcggcgagtccttcgagaagcggccccgggccagtttccatactatcagatacgattttaagccagccagcatcgacacttcatgtgaaggtgaactgcaggtgggcaagggcgatgaggtgacaattacccttcctcacatccccgggtctacacccccaatgaccgtgtttaaggggaacaagcgcccctatcagaaggattgtgtgctcattataaaccatgacacgggggaatacgtgctcgagaagctctctagctcaattcaggttaagaagaccagagcagaggggagctcaaaaattcaagctcggatggagcagcagcccacacggcctccgcagacctcccagccccctccgccaccacctcctatgcccttcagagcacccacaaagcctcctgtgggcccaaagactagcccactaaaggataacccctccccagaaccccagctcgatgatatcaagcgtgagctccgcgccgaagtggacatcatcgagcagatgtcctcgagctccgggtcaagttcctccgatagtgaatcaagcagcggtagcgacgatgatagcagctcaagcggcggagaagataatggccccgcctccccaccccagccgagccatcagcagccttacaattccagacccgctgttgcaaatgggacgtcccggcctcagggcagcaaccaattgatgaatactctccgcaacgatcttcaactttcagaatctgggtcagactcagacgattag

SEQ ID NO: 186461 - DNA, 504 bp, synthetic construct
  misc_feature 1..504: note = Description of Artificial Sequence: Synthetic coding sequence
  source 1..504: mol_type = other DNA
atgaagagccagctgcactgccacatcagcctggccgagggcagctctaaaattcaagccaggatggagcagcaacccactagaccacctcagacatcccaaccccctcctccacctccacctatgccctttagagctcccactaagcctcccgtgggaccaaaaacctccccactgaaggataatccatccccggaaccccagctcgatgacataaagcgcgagttgagagctgaagtggatatcatcgaacagatgagttcaagcagcggtagcagctcctcagatagcgaatcaagctcaggatcagacgacgattcaagttcatctggcggtgaggacaatggcccagcctctccaccccaaccaagccaccagcaaccctataactctaggcctgctgtggctaacggcacctcaagaccccaggggagcaatcagctgatgaacacattgcggaatgatctccagttgagtgaatccggaagcgatagtgatgactag

SEQ ID NO: 186462 - DNA, 2979 bp, synthetic construct
  misc_feature 1..2979: note = Description of Artificial Sequence: Synthetic coding sequence
  source 1..2979: mol_type = other DNA
atggcccggggcggcgccgcctgcaagagcgacgcccggctgctgcttggccgcgatgcactacgcccagcaccagccctccttgcccctgctgtcttgcttggcgcagctctcgggcttggacttggcttgtggctggggtgccgagccggcaggcagcggacaagacaccagaaagatgacactcagaacctattgaagaacctggagagcaatgctcagactccttccgaaacaggctccccgagccgcagaaggaagagagaagtccagatgtcaaaggacaaagaggcagtcgatgagtgtgaaccaccttccaactctaatataacggcttttgccctgaaggcaaaagtgatctacccaattaaccaaaaattccggccacttgcagatggttcaagtaacccatccctccatgagaacctaaaacaggctgttttgccccatcagcccgtggaggccagcccctctagctccctgggcagcctgtcacagggtgaaaaagatgattgctcttcatcatcatcagtccattccgctaccagcgacgaccgattcctctcaagaacattcctcagggtaaatgccttcccagaagttctggcctgtgagtccgttgatgtggacttatgtatttatagtctgcatttgaaggacttgctacatctggacaccgctctgcgacaggaaaaacacatgatgttcatacagatcttcaagatgtgcctccttgaccttctgcccaagaaaaagtctgatgatgaactgtaccagaaaattctgtcaaagcaagagaaggacctggaggaactcgagaaggggctacaggtcaagctctctaacaccgagatgtccggcgcaggagacagcgagtacataactttggctgacgttgaaaagaaagagcgtgaatattcagagcagctgattgacaacatggaggccttctggaagcagatggcaaatatccaacatttcctcgtggaccagttcaagtgctcttcctcaaaggctcggcagttaatgatgactctgaccgagaggatgatcgcagcagagggtctgctgtgtgattcccaggagttgcaagccctcgatgcattggagagaacaatggggagggcacacatggcaaaagtcattgaatttctcaagcttcaggtccaggaagaaaccaggtgtcgtttggctgcaatttcgcatggtctagagcttctcgcgggcgaaggtaagctgagcggacggcaaaaggaagagctgctcactcagcaacacaaggcgttctggcaggaggctgagcgattttctcgagagttcgttcagcgcggcaaagacctggtcactgccagtttggcccaccaggtggaaggtactgctaagctgacccttgcacaggaggaagaacagcgatcctttctggccgaggcccagccgaccgctgaccccgaaaagttccttgaggcttttcacgaggttctggaacggcagaggctgatgcagtgtgatctggaagaagaggagaacgtccgcgccaccgaagcggtggtggccctctgtcaggagctctatttttctactgtagacacatttcaaaagtttgtggacgcgctgtttctacagactctgccaggtatgaccggcctccctcctgaggagtgcgactatttgcggcaggaggtccaagagaacgccgcctggcagctcggaaaaagtaacaggttccgtagacagcaatggaaactcttccaggagttattagagcaagaccagcaggtgtggatggaggaatgtgctctctcatcggtgctgcagacccacctccgcgaagaccacgaaggtactataaggggggtgctcgggcgcttgggaggcctgaccgaggagtccacgcgctgcgtgttacaagggcacgatctgctgctcagatcggcattgaggaggttggccttgaggggaaacgctcttgcaactcttacccagatgaggctctctggcaaaaagcacctgctgcaggaattgcgggaacagagggccctggaacaaggctcctctcagtgcctcgacgagcaccagtggcagctcctgagggctcttgaggcccgagtgttagaggaggcttctcgtttagaggaggaagcacagcaaactaggttgcagctgcagcagagactacttgccgaagcccaagaagtgggacagctgctccagcagcacatggagtgtgctattgggcaggcccttctcgtgcacgcccgcaatgccgcaacaaagtcacgcgcaaaagatcgggatgatttcaaacgcacccttatggaggccgccgttgagtcggtatacgtgacatccgcgggagtgtcccgcctggtgcaggcgtattatcagcagatcggacggattatggaggaccacgaggaaaggaaacttcagcacctcaaaaccctacagggcgaaaggatggaaaattataagcttcgcaagaagcaggagttgtcaaacccatcttccggctccaggaccgcaggaggggctcacgagacgagccaggccgtgcaccagaggatgctctctcaacagaaacgatttcttgctcagtttccagtccatcaacaaatgcgcctccatgctcaacaacaacaggcgggtgtgatggatctcctggaggctcagcttgaaacgcagctacaggaagctgaacagaactttatcagcgaactggctgcgctggcccgcgtgccactggcagagagtaagctgttaccagccaaaagaggcctactggagaagccattgcggactaaacgcaagaagccactgccgcaggaacgcggagatctcggagtgcccaataacgaggatctggcttctggcgaccagacatcaggttctttgtcttctaagcgactatcccagcaggagtcagaagccggtgactccgggaattcaaaaaagatgcttaagcggcgaagcaacctgtag

SEQ ID NO: 186463 - DNA, 2979 bp, synthetic construct
  misc_feature 1..2979: note = Description of Artificial Sequence: Synthetic coding sequence
  source 1..2979: mol_type = other DNA
atggcccggggcggcgccgcctgcaagagcgacgcccggctgctgctcggccgagatgccctgaggccagctcctgctttgcttgcccccgccgtgctgctgggagctgctctgggactcggcttgggtctgtggttggggtgccgggcaggcagacagaggactcgccatcagaaggacgatacgcagaatctattaaagaatctagaaagcaacgcacagactccctcagagacgggaagcccaagcagaaggaggaagcgcgaggttcagatgagcaaagacaaggaggcagtggatgaatgtgagcctccttccaactctaacataactgcgtttgctttaaaagccaaagtgatctatcccatcaatcagaagtttaggcctcttgcggatggctccagcaatccaagccttcacgagaacctaaagcaggccgtgctcccacatcagcctgtcgaggcaagcccgtcttccagcctgggctccctctctcagggagagaaagacgactgcagcagctcgtcatcagtgcactctgcaacctcggacgataggttcctttcaagaacatttctgcgcgtgaacgcattcccagaggtgttggcttgcgagagtgtagatgttgatctatgcatctatagtctgcacctaaaggacctgctgcatctggataccgcactgaggcaagagaagcatatgatgttcatccagatttttaagatgtgtctcctcgatttgcttcccaaaaaaaaaagcgatgacgaactgtaccaaaagatcttgtccaagcaggaaaaagacttagaggagttggaaaagggcttgcaggtcaaattgtcgaacaccgagatgagcggggcaggagactcagagtacattaccttagccgatgtagagaaaaaggaaagagagtacagtgaacaactgatcgacaacatggaagctttttggaaacagatggcgaacatccagcacttcctggtggaccagtttaaatgctcttccagtaaagcacggcagttaatgatgacgttgactgagagaatgatcgctgccgaaggcctactctgcgacagccaagagcttcaggctctggatgcgcttgaacgcactatgggaagagctcatatggctaaagtgattgagttccttaagctccaggtccaagaagaaaccaggtgccggctagctgcaataagccacggtttagaattgttagctggtgagggtaagttgagtggacggcaaaaagaagagctgctaactcaacaacacaaggccttttggcaggaggcggaaaggttttctagggagttcgtccaacggggtaaggacctggttactgctagtttggcacaccaagtggaaggaaccgccaagctgacactcgcccaggaggaggaacagcggtcattcctcgcggaagctcagccgacagccgaccctgaaaagttcctcgaagctttccatgaggtcctcgagagacaacgcctgatgcaatgtgacctggaagaggaagagaacgtgcgagctacagaagccgtggtggcgctgtgccaggaactgtacttttctaccgtcgatacatttcagaagtttgtagacgcactttttcttcaaacactgcccggcatgactggcttgcctccagaggaatgcgactatctccggcaggaagtgcaagagaatgctgcatggcagctgggtaaatctaaccgattcaggagacaacagtggaaattgttccaagagttgctggagcaagatcagcaggtgtggatggaggagtgtgcccttagctcagtgctccaaacacatctgcgggaggaccacgagggcaccattaggggcgtcttaggaaggctgggcggtctgactgaggagagtacacggtgcgtcctgcaaggccatgacctgcttctgaggagcgcactgcgtagactggccctgaggggtaatgctctagccactctcactcagatgaggctcagtggcaagaaacatcttctccaagagctgagggagcagcgcgccctggagcagggatcctcacagtgtctggatgagcatcagtggcagctcctgagggccctggaggctcgggtcctcgaggaagcttcgagattagaagaggaagctcagcaaacacgcctgcagttgcagcagaggctccttgccgaagcacaagaggtagggcagctactgcagcagcacatggaatgcgcaatcggccaggcactcctggtacacgcgcggaatgcagcaactaagtcgagggccaaagatagagatgatttcaagcggaccttgatggaagccgctgtggaatccgtttacgtgactagcgcgggagtcagccggctggtccaggcatactaccagcagataggacgtattatggaggatcatgaggaaagaaaactgcagcatttgaagaccctgcagggtgagcgaatggagaattacaagcttaggaagaagcaggaactctccaatccctctagcggctccaggaccgccggtggtgcacacgagacatcacaggcagtgcaccagcggatgttgtctcaacagaagcgctttttagcgcaatttccagtccatcagcagatgagactgcatgctcagcagcagcaagccggagtgatggacctccttgaagcccagctcgagacccagctccaggaggccgagcagaactttatcagcgaactcgcagcactcgcgagagtgcccctcgccgagtcaaagttactcccagccaaaaggggcttactcgaaaaacccctacgcacaaagcggaaaaagccgctacctcaggaacggggcgacttgggtgttccgaacaacgaggatctggcctccggtgaccaaacttccggcagcctaagttcgaaaagactgtctcagcaagaaagcgaggccggtgattctggcaatagtaagaagatgctcaagagacgatccaatttgtag

SEQ ID NO: 186464 - DNA, 3687 bp, synthetic construct
  misc_feature 1..3687: note = Description of Artificial Sequence: Synthetic coding sequence
  source 1..3687: mol_type = other DNA
atgatctggcccaaggtggagtgctgccacttcaagaccgccgtggaggccccgctgggcatgaagctggacaagaaaatggaggtgtttatcccactgtccacctctgcagcctctagtggcccttgggcccattctttgtttgcttttattcccagctggcctaagaagaacctgttcaagcgtgagagtccaatcacgcatagactatacggtgacatctcccgggaggttcagggcacttccgagaacggagttatctttcagaagtgcgctctcgtctcaggttcaagcgaggctcagaccgcgcggatatggttgctcgtgaacaataccaagaccacttcatcggccaaccttagcgaactactcctgctggactcaatcgccggcttaacgatctgggatagtgtgggaaaccgaacgtccgagggattccaggccttttcaaaaaagtttctgcaagtcggcgacgcattcgcagtatcgtatgctgctactctgcaagctggggatttggggaatggtgaaagtctgaaattacccgcccagttgacttttcagagtagctcccgaaatcgaactcaactgaaagtgctcttcagcataaccgccgaggaaaacgtgaccgtgctgccgcaccacggtctgcacgcagctggatttttcatagcattcctgctatcccttgtactcacatgggccgccctgtttctgatggttcgataccagtgcctcaagggaaacatgctgactagacaccgagtgtggcagtatgagtcaaaactggaaccactacccttcacctcagcggatggagtcaacgaggacctttccctgaatgaccagatgattgatatcttgtcatccgaggacccgggaagcatgcttcaagccctcgaagaacttgagatcgccactctgaatcgggctgatgccgatctcgaagcttgtaggactcaaatcagcaaagacatcatagcactgctgctgaaaaacctgaccagtagtgggcatttatccccacaagttgaacgtaagatgagtgctgtgttcaaaaagcaatttctcctgctcgaaaatgaaatccaggaagagtatgaccgcaaaatggtggcactcaccgcagagtgcgatctcgaaacccgcaaaaagatggagaaccaataccaacgcgagatgatggctatggaggaggctgaagaactcctgaaaagagctggagagcgcagtgctgttgagtgctcaaacctcctgagaacactgcatggactggagcaggagcacttgagaaaaagtctggcactgcagcaggaggaagacttcgccaaagcccaccgccagcttgcagtcttccagcgaaacgaattgcactccattttctttactcagattaagagcgccatcttcaagggagagcttaagcccgaggccgctaaaatgcttctccaaaattactcaaagattcaggagaacgtggaggaactgatggatttttttcaagccagtaaacgctatcacctttcgaaaaggtttgggcaccgcgaatatctggtacagaatctgcagagcagtgaaacgcgggtgcaggggttgctgagcactgccgccgctcagctgacacatctaattcagaagcatgaacgcgctggctatctcgatgaagatcagatggagatgttgctggaacgggcccagactgaagtgttttctatcaaacagaagctggataatgatttgaagcaggaaaagaagaaactccatcagaagctaatcaccaaacgccgacgagaactactgcagaaacaccgggagcagcgccgcgagcaggcctccgtgggggaggcattccgaacagttgaggacgccggccagtatctgcaccagaaaaggtccctgatggaggagcacggtgccaccctggaagagctacaggagaggttggatcaggctgccctcgatgatctccgaactcttactctaagtttgttcgagaaagctaccgatgagttgcgacgtctccagaatagtgctatgacccaggagttacttaagcgtggagttccttggctgtttctgcaacagatcttggaggagcacggcaaggagatggctgcgcgtgccgagcaattggaaggagaagaaagggacagggatcaggaaggcgtccagagtgtcagacagagactaaaagacgatgcccccgaggcagttactgaggagcaggcggagttgcggaggtgggaacacctgatattcatgaagctctgcagtagcgtgttctctctgagcgaagaggagttacttaggatgcggcaggaagtccacggatgcttcgcacagatggaccgctcactagctctgcctaagatccgcgctcgggtgttgctgcaacagtttcaaaccgcctggcgggaggcggagttcgtcaaactggatcaggcagtcgctgccccagagcttcagcagcagagcaaagtaaggaaaagccggtcaaaatccaagagtaagggagaattgctcaaaaaatgtatcgaggataagatccacctgtgcgaagaacaggcgtctgaggacctggtcgagaaggtgagaggcgagttgctgcgagaaagggtacagaggatggaggcccaagaaggtgggttcgcccaaagccttgtggcattgcagttccagaaagcctcacgggtgaccgaaactttatcagcttatacagcactactttctatacaggacctcctattggaagagttgtctgcaagcgagatgctgacaaagagtgcatgtacacagatcttagagtcgcattctcgggaactgcaggagctggaaagaaaactagaggatcagcttgtgcaacaggaagccgctcaacagcaacaagccctcgcttcctggcaacagtgggttgccgacggtcccggaattcttaacgagccgggcgaagtggacagtgagaggcaggttagcaccgtcctgcaccaggccctgtcaaaatcacagacacttctggaacagcaccagcaatgtctccgggaagaacagcagaattccgtcgtgctggaggacttgcttgaaaacatggaagccgacactttcgcgaccctctgtagtcaggagctgagactcgcatcttacctcgcgcgtatggccatggttcctggcgccactctgaggcggctcctcagcgtggtgcttccaacagccagccagccacagctgttagccttacttgacagcgccacagagagacatgtggaccatgccgccgagtcagacggaggtgccgagcaggcagatgttggaagaaggagaaagcaccagtcttggtggcaggcacttgatgggaagttgagaggtgacctgatcagtagaggactcgagaaaatgctctgggccaggaaaagaaagcagtccattcttaaaaagacatgcttaccgctcagggagaggatgatcttcagcggaaaaggatcttggccgcacctatccctggagcccattggagagcttgccccggtccctattgtgggggccgagacaatcgacctgctgaacactggagaaaagttgttcatattcagaaatccgaaggagcccgagatctctctccacgttccacctcgaaagaagaaaaatttcctcaacgctaagaaggcaatgagggcactgggcatggactag

SEQ ID NO: 186465 - DNA, 3927 bp, synthetic construct
  misc_feature 1..3927: note = Description of Artificial Sequence: Synthetic coding sequence
  source 1..3927: mol_type = other DNA
atggaccccagcggcagccggggccggcccacctgggtgctggccggtggtctgctcgctgttgcccttgcgctcgggggacgaggatgtctgggcgcgtcttcaagaccccggtggcgtccacttggagcccaacctccccgcgatccccaggtcgctcctcgctctggaccaggactgaggatccctcctggcagatctggggcagggcctgagtcctccacgcaggacctaccttgtatgatatggcctaaggtcgagtgttgccactttaaaacagccgttgaagccccgctcggcatgaagctggataaaaaaatggaagtttttatccccctctccacgtctgcagccagctccggcccttgggcacactccttgtttgccttcattccaagttggcctaaaaagaacctctttaaacgcgagagtcctatcacacatagattatatggtgacattagtcgcgaggtccagggaaccagcgaaaatggagtcatattccagaaatgcgctctggtctccggcagttccgaggcccagactgcacgaatctggcttttggttaataacaccaagaccacttcatctgctaacttgtcagaactgctcctgctggactccatcgctgggctcactatctgggacagtgtagggaatcgtaccagtgaaggtttccaggcctttagtaagaagttcctgcaggtgggtgacgcattcgccgtttcatatgctgccaccctccaagctggggatctcgggaacggagaaagtctcaaactgcctgcccagctgacattccagtcatcttctcgaaacagaacccagctgaaggtgttgttctctattacagccgaggagaatgttacagtacttccccatcacggtttacatgccgccggcttcttcatcgctttccttctttccctggtgcttacctgggccgctctatttctgatggtgcgctatcagtgtctgaaaggaaacatgcttaccaggcacagggtgtggcagtacgaatctaaactggagccgctgccctttaccagcgcggatggtgtgaacgaagacttgagtctgaacgaccagatgatagatatcctgtcttccgaagatcccggcagcatgctccaggccctcgaagaactggagatcgcgaccctgaaccgcgcggatgccgatctggaagcctgccgcacacagatctcaaaagatattatcgccttactgctcaagaatttaacctctagtggccacctgtcgcctcaggtggagcgcaagatgtccgctgtcttcaaaaagcagtttcttctgttggagaatgaaatacaggaggagtacgatcgtaagatggttgccctaacagctgagtgcgatctcgagaccaggaagaaaatggaaaatcagtatcagagagaaatgatggcaatggaggaagctgaggagctgctgaagcgcgcaggggaacgctctgccgtggaatgcagtaatctcttgcggacgttacatggtctcgagcaggagcacttgcggaagtctttagccctacagcaagaagaggactttgctaaggctcacagacaacttgccgtgtttcagcgcaatgaactgcattctattttctttacccagatcaagtcagctatttttaagggcgaacttaaacctgaggcagctaagatgctcctgcagaattattcaaagatccaggagaacgtggaagaactaatggatttctttcaggcaagcaagagatatcacttgtccaagaggtttggacatcgtgagtacctcgtgcagaatttgcaaagctcagaaactagggtccagggactgctgagcacggctgctgcgcaactgactcacctgatacaaaagcatgagagggctgggtatttggatgaggatcagatggagatgctattagagcgggcacagactgaggtcttctcaattaagcagaaattggacaacgacctcaagcaggaaaagaaaaagcttcaccaaaaactgataacaaagaggcgcagggaactgcttcaaaagcatcgcgagcaacgtcgtgagcaagccagcgtcggggaggcatttaggaccgtggaagatgccggccagtatctgcaccaaaagagaagcctaatggaagagcacggtgcaacgttggaagaactacaggaacggctagaccaagccgccctggatgatctgagaactctgaccctgagcctgtttgaaaaagccactgacgaacttcgtaggctgcagaatagtgctatgacccaggaacttctaaagaggggtgtcccctggctgtttttgcagcagatccttgaggaacatgggaaagaaatggctgcccgcgcagagcagctcgagggagaggagcgcgatagagatcaggaaggggtgcaaagtgtgaggcagcgcctaaaagacgacgcccccgaagccgtgactgaagagcaggctgagcttcgccggtgggagcatttgatcttcatgaagttatgcagttcagtgtttagtctgagcgaggaagagctccttcgtatgaggcaggaggtgcacgggtgtttcgcccagatggaccgtagccttgctttacctaaaattagggcaagggtgctgctccagcagttccagacagcgtggcgagaggcagaatttgtcaaacttgatcaggcagtggcagcccctgaactgcagcagcaatccaaagtcagaaagtcccgctccaaatctaagagtaaaggagagttgctcaaaaagtgcattgaggataagatccacttatgcgaagagcaggcctcagaggaccttgtggagaaagttagaggggaactgttacgggagagggtgcaacggatggaggcccaggagggggggttcgcccagagcctggttgccctacaatttcagaaagcatcacgggtcaccgagacactctctgcttacacagcccttctttcaatccaggatctgctcctggaagagctatcagcttccgagatgctgaccaaaagcgcgtgtacgcaaatcctcgaaagtcattctcgggagctacaagaactggagagaaaattggaggaccagctagtgcagcaggaagccgcacagcagcagcaggcactggccagttggcagcagtgggtcgcagacgggcctggaatcctaaacgagcccggcgaggtggacagcgagaggcaggttagtaccgtcctgcaccaggctctctccaaatctcagaccctgttggagcagcaccagcagtgcctgagggaagaacaacaaaactccgtcgtcttagaagatctcctagaaaatatggaagccgatacgtttgccaccctatgtagtcaggaactgcgcctcgcgtcttatctggcgaggatggctatggtgcccggggctaccttgcgcagactactgagcgtggtacttcccacagcgagtcagcctcagcttcttgccctgctggactccgccaccgaacgtcatgtggaccatgccgcggagtctgatggaggtgccgagcaagccgacgtcggacggcggagaaagcaccagtcgtggtggcaggccctggatgggaagcttcggggggacttgatatctagaggcctcgaaaagatgctctgggcccggaagaggaaacagtccatcctgaagaagacttgtctacccctgcgggagcgaatgatattttcagggaaagggagctggccgcacctttcattagaacccatcggagagctggccccggttccaatagtcggagcagagaccatcgatcttttgaatactggggaaaaattgtttattttccgcaatcccaaggagccagagatttcactgcatgtccctccaagaaagaagaagaattttctcaatgctaagaaagctatgcgggccctggggatggactag

SEQ ID NO: 186466 - DNA, 3741 bp, synthetic construct
  misc_feature 1..3741: note = Description of Artificial Sequence: Synthetic coding sequence
  source 1..3741: mol_type = other DNA
atggaccccagcggcagccggggccggcccacctgggtgctggccggagggctgctggcagtcgctcttgctctgggaggaagaggatgtctcggagccagctctagacctcgatggcgacctctgggtgcccaacccccaagagacccgcaggtggcaccccgctccggacctggacttcgaattccacctggcagatcaggggcagggccggaaagtagtacccaggacctaccatgtatgatctggcccaaagtggaatgctgtcattttaaaaccgccgtggaagcccctctgggcatgaagctggataaaaaaatggaggttttcatccccctttctacttcagccgcaagctccggcccgtgggcccatagtctgttcgcctttataccgtcctggcccaaaaagaacctctttaaacgagagtctcctatcacacaccgcctgtatggtgatatctcacgggaggtgcagggaactagcgagaacggcgtcatattccaaaaatgcgccctggtaagcggctccagcgaggcacaaacagccagaatctggttactggtcaataatacaaagaccacatcctctgctaaccttagcgagctcttgctcctggattcaattgccggactcaccatatgggatagcgtgggaaaccgtacctctgagggattccaagcattttccaaaaagttcctgcaggtgggggatgcgttcgctgtgagttacgccgcaactcttcaagccggagatctggggaatggcgagtcccttaaactccctgcccagttgaccttccagagctcgtcccgcaacaggacacagttgaaagtgctttttagcattaccgccgaagaaaatgtgacagtcttgcctcaccacgggcttcacgcagccggattcttcattgcctttctgttgtcccttgtccttacctgggccgcactcttcctcatggtccgctaccaatgcctgaagggaaatatgttaacgagacatagagtctggcagtatgaaagtaagctggagcctctaccatttaccagtgccgacggcgtgaacgaagatctgagcctcaacgatcagatgatcgacatcctgagctccgaagatcccgggtctatgctccaggcacttgaagaactcgagatcgccacgcttaaccgcgctgacgctgatctagaagcctgccgaacccagatcagcaaagacattattgcgcttcttcttaagaatctcacgtctagcggtcacctgagcccccaggtggagagaaaaatgtccgcagtttttaagaagcagttcctgctgctggagaatgagattcaggaagaatacgacagaaaaatggtggctcttaccgccgaatgcgatctggagaccagaaagaagatggaaaatcaatatcagcgcgaaatgatggcgatggaagaagccgaggaattgctgaagcgggctggcgagcgcagcgctgtggagtgctctaacttattgaggacacttcacgggctggaacaagagcacttgaggaagagcctggcactccagcaggaggaggattttgccaaggcccatcgacaactggcagtgtttcaacggaatgaactgcactctatatttttcactcagatcaagagtgcaatctttaagggtgaattgaagccagaggccgcaaaaatgttgcttcagaactactccaaaatacaagaaaatgtcgaggaactaatggactttttccaggccagcaagaggtaccatttgtctaagcgctttggccaccgcgagtacttagttcaaaatctgcagagttccgagaccagggtgcaggggctgctgtctactgcggcggcgcagctgacgcatctgattcagaaacatgaaagagccgggtaccttgatgaagatcagatggaaatgctcctcgagagggcccagacagaggtgttcagtatcaagcaaaaactcgacaacgacctgaaacaggaaaagaaaaaacttcatcagaagctcattaccaagcgacggagagaactgctgcagaagcaccgggagcagcgaagagagcaggcaagcgtgggggaggcattcagaacggtagaagatgccgggcaatacctgcatcaaaaaagaagtctgatggaggagcacggggctaccctggaagagctgcaggagcgacttgatcaggcagctcttgacgacctgcgaacactgaccctgtccctttttgagaaggctacagacgaactccgccgcctccaaaattctgccatgactcaggagctgctaaagcgtggagttccttggctgttcctacagcagatccttgaagaacacggcaaagaaatggccgcccgtgccgaacagttggaaggagaagagcgggacagggaccaggaaggcgttcagagtgtgcggcagcgcctcaaggacgacgcacctgaggctgtgactgaagaacaggccgaacttcggcggtgggagcacttgattttcatgaaattgtgttcatctgtgtttagcctgagcgaggaggaacttcttcgcatgcgccaggaagttcacggatgcttcgcccagatggaccgctccttggccctcccaaagatccgggcacgcgttttattgcagcagttccagacggcctggagggaggctgagttcgtgaaattggaccaggccgtggcagccccagaactgcagcagcagtccaaggtcaggaaatcccgttcaaaaagtaagtctaaaggtgagctgctcaagaaatgtattgaggataaaatacatctatgcgaagagcaagcttccgaggatctggtggagaaagtgcgcggtgaactgctacgggaacgcgtccagcgcatggaggcacaagagggcggcttcgcacagagccttgtggctctccagttccagaaggcctcaagagtaactgagacgttgagcgcatacacagccttgctttcaatccaggacctcctgctggaagagcttagtgccagtgagatgctgaccaagagcgcctgcacacagatactagagtctcactctagagaattgcaagaactggagcgcaaactggaagatcaattagttcagcaggaggccgcgcaacaacagcaagccctggcatcctggcagcagtgggtggcggacggcccaggtatactaaatgagcccggtgaggtggactcagaacgacaagtcagcacagtcctccatcaagcattaagcaagagtcagactctacttgaacagcatcagcagtgccttcgggaagagcaacagaacagtgtggtgctggaggatctgcttgaaaatatggaggccgacaccttcgccactttgtgtagtcaggagttaagattagccagctatctcgcccgcatggccatggtgccaggcgctacattacgtcgactgctttccgtggtcctccccacagcctctcaaccacaactgctggctcttctggactcagctactgagaggcacgtggatcatgcagccgagagcgacgggggcgccgagcaggctgatgttgggagacgacgaaaacaccagtcctggtggcaagccctcgatggcaaacttagaggcgatctgattagtagagggctggaaaagatgttatgggcccggaaacgcaagcagagatccggtaatcaagagtcattctggcaatacctggtgggtactccagaaattgggctgattgaatggatgagtgagaaatag

SEQ ID NO: 186467 - DNA, 882 bp, synthetic construct
  misc_feature 1..882: note = Description of Artificial Sequence: Synthetic coding sequence
  source 1..882: mol_type = other DNA
atgttcatcagcctgtgggagttcttctacggccacttcttccggttctggatgaaatggttactgaggcagatgactggtaaatgcgaactgcagcgaatcttcgatacttatgtgggcgctcagcggacacacaggattgagaacagcttgacctatagcaaaaataaggttctgcaaaaggcaacccatgtggtgcagtctgaggttgacaagtacgtcgacgatatcatgaaagaaaagaacattaatccggagaaggacgcttcttttaagatctgtatgaagatgtgcctgctccagatcactggatataaacagctgtatctggacgtggaaagcgtccgcaagagaccttacgatagcgacaatctgcaacacgaagaactgctcatgaagctctggaacttactcatgccaacaaagaagttgaatgctcgaatttcaaagcagtgggctgagatcggatttcagggcgacgaccccaagacagacttccgagggatgggtatactggggctgattaacctggtgtattttagcgaaaattacaccagcgaggcgcaccagatactctcaagatcaaatcatcccaagttggggtactcttatgccatcgtcggaattaacctgacggagatggcctactccctgctgaagagcgaggctcttaagtttcacttatataatttggtgcccgggattccaacaatggaacactttcatcagttctactgctacttagtgtacgagttcgataagttctggtttgaggaggagcccgagtctataatgtacttcaatctgtatagggaaaaattccacgagaaaataaagggtctgctgctcgattgcaatgtggcactgaccctcaaggtttag

SEQ ID NO: 186468 - DNA, 507 bp, synthetic construct
  misc_feature 1..507: note = Description of Artificial Sequence: Synthetic coding sequence
  source 1..507: mol_type = other DNA
atgttcatcagcctgtgggagttcttctacggccacttcttccggttctggatgaagtggttgttgcgccagatgacaggcaagtgcgagcttcagcggatcttcgacacttatgtgggggcacagagaacccaccggatcgagaacagtctcacctatagtaaaaacaaggtgttgcagaaggcgacacatgtggtccaatctgaagtggacaagtatgtagacgacatcatgaaggaaaaaaatatcaaccctgaaaaagatgctagttttaaaatctgcatgaagatgtgtttgctccaaattacagggtataagcagttatacttggacgttgagagcgttaggaagaggccttatgatagtgataatttacagcatgaagagttactaatgaagctctggaacttgctcatgcccaccaagaaattaaacgcgagaatctcaaagcaatgggctgagattggcttccagggagatgatccaaagacagatttcaggggatag

SEQ ID NO: 186469 - DNA, 108 bp, synthetic construct
  misc_feature 1..108: note = Description of Artificial Sequence: Synthetic coding sequence
  source 1..108: mol_type = other DNA
atgttcatcagcctgtgggagttcttctacggccacttcttccggttctggatgaagtggctgctccggcagatgacaggaaagtgtgagcttcagaggatcttctag

SEQ ID NO: 186470 - DNA, 1866 bp, synthetic construct
  misc_feature 1..1866: note = Description of Artificial Sequence: Synthetic coding sequence
  source 1..1866: mol_type = other DNA
atggccgccctgaaggaggaccggagctacggcctgagctgcggccgtgtctctgacggtagcaaggtctccgtttttcacgtgaaactcactgactcagctctgagggcttttgagtcttaccgggctagacaagactccgtatccctgcggcctagcatcaggtttcagggtagccaggggcacattagcatacctcagcctgactgccccgctgaagcacggacattttcattctacctctccaatattgggcgggacaacccacaaggaagctttgattgtattcagcagtatgtgtcatcacatggggaagtgcatttggattgtctggggagcatccaagataagatcacagtgtgtgcgacggatgactcttaccagaaagcgagacagagcatggcacaggctgaggaggagactaggtcccggtctgcaattgttatcaaggccggcggcaggtatttaggcaaaaaagtgcagttccgcaagccagctccaggcgccaccgatgcagtcccctcccggaagagagccacacccatcaacctggctagcgccatcaggaagagcggggccagcgccgtgagtggcggatctggagttagccaacgtccatttagagatcgcgtacttcacctgctcgcattgcgaccatacaggaaggccgagctgctcctgagactgcagaaagatggccttacccaggccgataaggacgctctggacggattactccaacaggtggctaatatgagtgcgaaagacggaacatgtaccctacaggactgcatgtacaaagatgtgcagaaggattggcccggctattccgagggagaccaacagctgttaaagcgcgtgctggtaagaaagctgtgtcagccccagtccaccgggagtttgctaggcgatccagccgcttcttctccacccggagagcgaggcaggtcggcgtcacctccccagaaaagactccaaccgccagatttcattgacccccttgctaacaaaaaaccgcggatctcccattttacccagcgggctcagcccgctgttaacgggaaactcggcgtgcctaatggaagagaggccctgttaccaaccccaggaccccctgcctccaccgacacactttctagcagcactcatctgccccccagactggagccacccagggcccacgacccgctggctgacgtgtccaatgatcttgggcattcgggcagagattgtgagcacggcgaggccgccgcccctgccccaacggtgagactcggactccctttgcttaccgattgtgctcagcccagcaggccacacggctcaccgtcccgcagcaagccaaaaaagaagtctaagaaacacaaagataaggaacgggcagcagaggacaagccaagagctcagctgcctgattgcgcacctgcaactcacgcaacgccgggggctcctgcagatacccccgggttgaacggcacttgctctgtgtccagcgtgcccacctcgacctcagaaactcccgactatctcctcaagtatgcagctatatcgtccagtgagcagcggcagtcctacaaaaatgatttcaatgccgaatactctgagtatcgcgatctccatgccaggatcgagcggattacccggcggtttacgcagctggacgcgcaattgagacagctgtcacagggtagcgaagaatacgaaacaacacggggccagattctgcaggaatatcggaagattaagaaaaccaacaccaattactcgcaggaaaagcatagatgtgagtacctacatagtaaactggctcacatcaaacgcttaatagctgagtacgaccagagacaactgcaggcgtggccgtag

SEQ ID NO: 186471 - DNA, 90 bp, synthetic construct
  misc_feature 1..90: note = Description of Artificial Sequence: Synthetic coding sequence
  source 1..90: mol_type = other DNA
atccaccggctggtggtggccttccaggacagcgtgagcctgcggccttccatcagatttcaagggtcccaaggtgaaatgtctctgtag

SEQ ID NO: 186472 - DNA, 1194 bp, synthetic construct
  misc_feature 1..1194: note = Description of Artificial Sequence: Synthetic coding sequence
  source 1..1194: mol_type = other DNA
atggaggagctgcaggagcccctgcggggccagctgcggctgtgctttacgcaggccgctcggactagcttgctgcttctgcgcctgaacgatgctgcattacgggccctacaggaatgccagcggcaacaggtgaggccagtgatcgcattccagggccacagggggtacctaagattacctggtccggggtggtcatgccttttcagttttatcgtatctcagtgctgtcaagagggggccgggggcagcttggatcttgtatgccagaggttcctccgatctgggccaaatagcctccactgcctcggttcccttcgcgaacgcctcattatatgggccgctatggactctattcctgccccatccagtgtacagggtcataacctgacagaagacgcccgccacccagagtcctggcagaacaccgggggatattctgaaggcgacgccgtgagtcagccacaaatggcactcgaggaggtttctgtgtctgatccactggcgagcaaccaggggcaaagtctccccggatcctccagggagcatatggcccaatgggaagttaggagtcagacacatgtgcctaatcgtgaaccagtccaggctcttccatcttctgccagcagaaaaaggctggacaaaaaaagaagcgtgccagttgccacagttgagctggaagagaagcgcttcaggacgttacctctggttcctagcccactgcagggcctgacaaaccaagacctgcaggagggcgaggattgggagcaggaagacgaggacatggacccccgtctggagcacagctctagcgtccaggaagacagcgagtccccatctccagaggatattccggattacttattacagtatcgagccatccactcggctgaacagcagcacgcatatgaacaggatttcgaaacagactatgccgagtaccgcatccttcacgccagggtgggaactgcctctcagcgctttattgaactgggtgctgaaatcaagagagttaggcggggaaccccggagtacaaagtgctcgaagataagatcatccaggaatacaagaagtttcggaaacagtacccaagctacagggaggagaagcggcgttgcgagtacctgcatcagaagctgtcacatatcaaaggccttatcctggagttcgaggagaagaatcgcggctcatag

SEQ ID NO: 186473 - DNA, 2889 bp, synthetic construct
  misc_feature 1..2889: note = Description of Artificial Sequence: Synthetic coding sequence
  source 1..2889: mol_type = other DNA
atggacaccgacctgtacgacgagttcggcaactacatcggccccgaactggacagtgacgaggacgacgatgaactcgggagagagaccaaggatctcgacgaaatggacgacgatgacgacgacgatgatgtgggcgaccacgacgatgatcaccctgggatggaggtggtactgcacgaggtttacggccccgaagttgaaaccatcgtgcaagaggaagacacccaacctttgaccgagccaattattaagcctgtcaagaccaagaagttcactctgatggaacagaccctcccagtgacagtctatgagatggactttctggccgacctgatggacaacagcgagctcattcgcaacgtaaccctatgtggccatctgcatcacggcaagacttgttttgttgattgtttaatcgaacagactcatccagagatccgtaaacggtacgatcaggacctgtgttacacagacatcctgttcacagaacaggagcgcggggtggggatcaaatccacacctgtcactgtggtgcttcccgacactaaggggaaaagctacctgtttaatatcatggataccccggggcacgttaatttttcggatgaggtgacggcagggctgcgtatctcagacggggttgtcctgttcatcgatgccgccgaaggtgtgatgcttaatacagaacggcttattaagcatgccgtgcaggagaggctggcagtgacagtgtgcataaacaaaattgataggctaatcctggaactgaagctgccacccaccgatgcatattataagttgcgacacattgttgatgaggtgaatggcctaatttctatgtattcaaccgacgaaaatctcatactgtcgcccttacttggaaacgtttgcttttcatcctctcagtattccatatgttttaccttaggtagctttgcgaagatttacgcggacacattcggtgatatcaactatcaggaattcgctaagcgcctgtggggggatatctatttcaacccaaagaccaggaagtttaccaaaaaggccccgacaagcagctcccaaagatccttcgtggagttcatacttgagccactttataagatactggcgcaggtggtgggggacgtggatacgtctctcccgcgcactctggacgagctcggtattcatttaaccaaggaagaacttaaactaaatattcgaccacttctgaggttagtgtgtaagaaattttttggagagtttactgggttcgttgacatgtgtgtgcagcacatcccctcccccaaggtgggagcaaaacccaaaatcgagcatacctacactgggggtgtggatagcgatctgggcgaggcgatgtctgattgtgatcctgacggacccctaatgtgccacactacgaagatgtacagcacagatgacggcgttcagttccacgcttttggacgagttctcagcggaaccatacacgcaggccagccagtgaaggtattgggagaaaattacaccctggaagacgaagaggattctcaaatttgtacagtgggtcgactgtggatttcagttgccaggtatcatatagaggtcaaccgcgtccctgcggggaattgggttctcatcgagggagtggaccagccaattgtgaaaacagccaccattacagaaccacgtgggaatgaggaagctcagatcttccgtcccttgaagtttaacacaacctccgtaattaagattgcagtcgagcctgttaatccctccgaattgcctaagatgcttgacggtctgaggaaagtgaacaaatcttatcctagtctcactacaaaagtcgaggagtcaggcgaacacgtcatcctgggaaccggtgagttgtaccttgactgcgtgatgcacgacctgaggaagatgtattccgagatcgatataaaggtcgccgatcccgttgttactttctgcgagaccgtggtggaaacttctagtttaaaatgtttcgccgagacccccaacaagaagaacaagatcaccatgatagcggagccacttgagaagggtctggctgaggacatagaaaatgaggttgttcaaattacctggaacaggaagaagctaggggagttcttccagaccaaatacgattgggatttgctggcggcacggtctatttgggcatttgggcctgatgcaacaggccccaacatcttagtcgatgacaccctgcctagcgaagttgacaaagctcttctgggctctgtcaaagattcgattgtacagggattccaatggggaacccgtgaggggcccctttgtgatgaattgattaggaacgtcaaatttaaaatcctggatgcggtcgttgcccaggaacctcttcatcgcggcggcggtcaaatcatccctaccgcccgacgtgtcgtctactccgcattcctgatggccacaccacggctaatggaaccttattactttgtggaggtgcaggcacccgctgactgcgtttctgccgtctataccgtgttagctagacggaggggccatgtcacccaggacgcccccataccgggaagtcccctgtacactatcaaagcctttatccccgcgatagactcctttggctttgagacagatcttaggacccatacccagggccaagcctttagcctatccgtttttcaccattggcagatcgttcccggtgacccactggacaagtctattgtaatcaggcctctagaaccacagccagctccacatttagcccgcgaattcatgataaaaaccagacggagaaagggtttgtctgaagatgtgagcattagcaaattttttgatgaccctatgttgctcgagctagccaaacaagacgtggttctgaattaccccatgtag
